United States Patent Application Publication US 2007/0161031 A1 - sequence listing, part 33

SEQ ID NO: 41865 - DNA, 2300 bp, Homo sapien
cctgaaaccaaacccacagtatctctgaggtatgcctatgtagcagtcccataagttatcgtgcactttaagcattaccaagtccagaactgtaaatgctacacatttacagaaataccacttgaaggtttaactacttataactgtttcataattagaattacaaattttgaatattaattattttaattggggggaggggccaagatggttgagtagaaacagctctactctacagcccccactgagacaaacataaacagcgagtgaattctgcatttctaactgaggtatccagattccctcattgggactgactaggcagttggtgtgacccatggagagcaaggaaaagcagagttgggcgacagttcacccaagagctacacagggcaaagagacctccctcctccagccaagggaggcagtgagggattgtgctacccacccggagaactgtgctttacccacagatttttgcaaaccccagaacaggtaatccctttgtgagtccacaccaccagggccttgggtcccaagcacaaagctgtgcagacccatagcaggggctccagctggcagccacttgggcaggtactgagctgtaggagtttctgcgtactctggtggctcgcagaaatccagtgaagcaggagatccatcaactcccatgagaagagggctgaagccagggagccaagcagacccactcccacagaaccccacaagctaagacccactggcatggaatccccactggctagcacagcacctggagtctgcctaagaagaccaagttcctggggggaagggtgaccgccattactgcgggtctagccggtggttttcccccaccagtgctagggagactgggtggtttgcgctgggcagaattccccacagtgcagtacagaggctgtggcagatataccattattgcatatccaaaggaatataaatcattctattacaaagatacatgcacgtgtatgtttattgcagcactgttcccaatagcaaagacatggaatcaacccaatgcccaccaatgatagactggataaataaaatgtggtacatatacaccatggaatactatgcagccataaaaaggaatgagatcaagtcctttgcggggacatggatgaagctggaagccattatcctcagcaaactaacacaggaacagaaaaccaaataccacatgttctcacttacaagtgggagccgaacaatgagaacatatggacactgggagggaaacaacacaccctggcacctgtcgagggagggccggtggtagggagagcatcaggaaaaatagctaatgcatgctgggtttaatacctaagtgatgggttgataggtgcagcaaatcaccatggtacatatttgcctatgtaagaaaactgcatgtcctgcacatgtatcccgaaagttaaaataaaataaatacataagtacacaaataaaattttaaaagacaaaaaaaaaaatcttaattgtatgtgggtagttccctttgattgaaagtgagatagaaataattttttaaaacttactattcaaaatttgcaaaactaaataagagtaaaagaaatttacattttgtccctggattgatacaagacaaaaacatagtgtggaaaagctggagttgaggatgaacgagattctgagaataaaaatccctggtacatagccaaaatttcagaacttcagattttcaagggctataaaataggtaacctcaagccaccgtctccaacagataaaaggaaccaggtaatatctatattccagggagaaagaatagaaaattggctatcactgacaaaacttagtgggaaggagggatctagaaggtgggatggtggagggatccccagcttggggggtggggaggggctgtgcttcagtctccccctcccctgcccctctccctccctctccccctcctgctgcacctccccctccctctgcgcctccccctcccactgcccctccccaacaaaggagccctttgtgacatcaaggccccacctctgtgacgcaggcctgggccccagtccctagtccccacggggatgcccagagctcagttgcttgaaagcaacgcgcctattcacatggagaatcttccctttcctttaaaattacttagtgcctcatcgctaaacgcccccagttccacaccatgggtgttggatatcttcctcactttggtgtttgccctggggttcttcttcctattactcccctacttatcttacttccgttgtgatgacccaccctcacca

SEQ ID NO: 41866 - DNA, 2300 bp, Homo sapien
gattcacactgcccaatttctaaacttaatgtaaagcagtatataactggcctaagactaaacagatagctcattgggataaaattgaaagtccagatagatacctcgccatttatggtcaatggattttacaagagtgccaggacaacccaatgggaagaagtagtctctgagactactgagtatacatgcacatgcaaatgaatgaaattagacctctatctcacacatacataaaaatgtaccaaatagacctcaatgtaagaactaaaactataaaactgttaaaacatgggagaacaaaagagaagataacccacagaatggaagaaattattgcaaatcatgtctcttataagggtctagtattcaaattatttaaagagcttttacaactgaataagatgccgtgtgtggtggctcacacctgtaatcccagcattttgggaggccgaggtgggcagatcacgaggtcaggagttcgagaccatcctggctaacacagtgaaaccccatctctactaaaaatacaaaaaattagccgggcgtggtggcgggcgcctgtagtcccagctactcgagaggctgaggcaggagaatggcgtgaacccaggaggcagagcttgcagtgagcagagatcacgccactgcactccagcctgggcaacagagtgagactctgtctcaaaaaaacaaaaataaaaacaaaaaaccaacaactgaataagaaaaagaaatttaacctaattaaataataggtaaagcttataagtaaatatttcttcagcaaatatgtgtgaatgtccaataaaatcatgaaaaaatagttggcaacattagccagtaggcaatcaaagtcacaatgaaatacctcttcacacagacaagtatagctgtaatttaaaagaatgataataataaatgttggtgaggatgtggagatattaaaaccctcatgattgctgtttgaaatgtaaaatggtatagctattttggaaaaaatatggcagctcctccaaattttaaagttggtgttatcataagattgaacaattttactcctaggtatatattcctaagaaaaataaaaatgtatccatagaaaaacttacacgtgaattttcatggaagcattatttataatagtcaaaaagtggaaacaacccaaatgtctatcaactgttaaatagatccgcaaaatgtggcacatccattactatttacatccaatgaaatattattcaataaaatgcataaaatactgacacacgctacaagatggatgaaccttgaaaataccatgttaagtgaaagaggccagattgaaaagaccacacgttatatgattccactgatatgaaatctctcgaataggaacctctgcagagacagaaagtaaattagtagttgcctaggctggggtgttggggagaaacagagaatgactgctagaggttatggaggtttttgtaggagggaataagaaggtgctcgggggaggggagtgaaaatactctaaaattgatcatggcaatgtttgcacatgcctgcaaatatactaaaagacatagaattttacactgtaattgggtctattacatggcatatggattatatctgaataaagatgtttaaaaattaatgatttgggaaaaaattgaaaaccaaagatgagataagtcacctataaattatacatttatactgaagaattagttatatgtaaatataagatgaggatgatttggagaattaaaatctctattaagtgttagtcaattctgggttatgagtatattggagtttgctactttttcttcaagttgtagtttttaaaaaactttaaaaagtgaaaaataaaaaataaaacaggaaaggatttcactattactttatctcccaggatatttaaggtttggtctcattctctaaatgtacttaaaacaagaccgttggacttacattttgttaacataacaaaaatgtatttatcatttcagagatttccgcatatttcgcaactggctcctcaatgacataccattttcaagaacattacactttaagtgaaaactccagctctctcgtttcttcattacacagagatgtaacattgaccagagaaatgatcacactgagcttccgaaccacacgaactccgagcttattgctgtatgtgagctctttctatgaggaatacctttcagttatcctcgccaacaatggtgaatatcttttgtgtaaagaaaaagagaaccctgagttagaaaaataggactgtaatgacatgggtcttttca

SEQ ID NO: 41867 - DNA, 2300 bp, Homo sapien
tggcctgaaaccaaacccacagtatctctgaggtatgcctatgtagcagtcccataagttatcgtgcactttaagcattaccaagtccagaactgtgaatgctatacatttacagaaataccacttgaaggtttaactacttataactgtttcataattagaattacaaattttgaatattaattattttaattggggggaggggccaagttggttgagtagaaacagctctactctgcagcccccactgagacaaacataaacagcgagtgaattctgcatttctaactgaggtatccagattccctcattgggactgactaggcagttggtgtgacccatggagagcaaggaaaagcagagttgggcgacagttcacccaagagctacacagggcaaagagacctccctcctccagccaagggaggcagtgagggattgtgctacccaaccggggaactgtgctttacccacagatttttgcaaaccccagaacaggtaatccctttgtgagtccacaccaccagggccttaggtcccaagcacaaagctgtgcagacccatagcaggggctccagctggcagccacttgggcagttactgagctgtaggagtttctgcgtactctggtggcttgcagaaatccagtgaagcaggagatccatcaactcccatgagaagagggctgaagccagggagccaagcagacccactcccacagaaccccacaagctaagacccactggcatggaatccccactggctagcacagcacctggagtctgcctaagaagaccaagttcctggggggaagggtgactgccattactgcgggtctagccggtggttttcccccaccagtgctagggagactgggtggtttgcgctgggcagaattcccacagtgcagtacagaggctgtggcagatataccattattgtatatccaaaggaatataaatcattctattacaaagatacatgcacgtgtatgtttattgcagcactgttcccaatagcaaagacatggaatcaacccaatgcccaccaatgatagactggataaataaaatgtggtacatatacaccatggaatactatgcagccataaaaaggaatgagatcaagtcctttgcggggacatggatgaagctggaagccattatcctcagcaaactaacacaggaacagaaaaccaaataccacatgttctcacttacaagtgggagccgaacaatgagaacatatggacactgggagggaaacaacacaccctggcacctgtcgagggagggccggtggtagggagagcatcaggaaaaatagctaatgcatgctgggtttaatacctaagtgatgggttgataggtgcagcaaatcaccatggtacatatttgcctatgtaagaaaactgcatgtcctgcacatgtatcccgaaagttaaaataaaataaatacataagtacataaataaaattttaaaagacaaaaaaaaatcttaattgtatgtgggtagttccctttgattgaaagtgagatagaaataattttttaaaacttactattcaaaatttgcaaaactaaataagagtaaaagaaatttacattttgtccctggattgatacaagacaaaaacatagtgtggaaaagctggagttgaggatgaacgagattctgagaataaaaatccctggtacatagccaaaatttcagaacttcagattttcaagggctataaaataggtaacctcaagccaccgtctccaacagataaaaggaaccaggtaatatctatattccagggagaaagaatagaaaattggctatcactgacaaaacttagtgggaaggagggatctagaaggtgggatggtggagggatccccagcttggggggtggggaggggctgtgcctcagtctccccctcccctgcccctctccctccctctccccctcctgctgcacctccccctccctctgcgcctccccctcccactgcccctccccaacaaaggagccctttgtgacatcaaggccccacctctgtgacgcaggcctgggccccagtccctagtccccacggggatgcccagagctcagttgcttgaaagcaacgcgcctattcacatggagaatcttccctttcctttaaaattacttagtgcctcatcgctaaacgcccccagttccacaccatgggtgttggatatcttcctcactttggtgtttgccctggggttcttcttcctattactcccctacttatcttacttccgttgtgatgacccaccctcacca

SEQ ID NO: 41868 - DNA, 2300 bp, Homo sapien; identical to SEQ ID NO: 41864

SEQ ID NO: 41869 - DNA, 2300 bp, Homo sapien; identical to SEQ ID NO: 41863

SEQ ID NO: 41870 - DNA, 2300 bp, Homo sapien
gcacctccacatcccgagttcaagcaattctcctgccccagcctcctgagtagctgggattacaggtgtgcaccaccacactcggctaacttttgtatttttagtagagaaggggtttcaccatgttggtcaggctggtctcaaactcctgaccttgtgatccacacacctcagcctctcaaagtgatgggattacaggcgtgagccaccgcatctggccaaaaaaatttaagccccaaatttatctatgtgtactgccttagctgcatccacaaatttctgtattctaagttgttttgtttacattcacttcaaaatatctcatttgagaattctttcacccatgggttaattaggaatgtataacttacagttcttttgtatttctccagataaatttgtgtttactgatttctggtataatttctctgtggcccaagatcatcctctgtataatttatttcttctatatttctgaaggtttgtcttacagtctagaatatagtctgttttgatgattgttccatgtgcatttcagaagaatgtgaattcagctgttgaatgcattgtgtcttcaggtttgaagccatggttattgcaagtgctactttatcttatctcttctgcttgagtattgggtctactgtgtattcctgcctctcctcttacttctgtgcttctttttttcttgtttccttcccatagctgctatgagttcctgtcagtgccctaaaacaacttattatattcttgcccttgcagattaagacatttgttccataaattagataataatttggttctaggcagaattttggtagtggctgctgtgaccgtctcccagcatatcctaagaatggaactttctcaggattcttcatggctcatggaagaaaacatataagagcatgcagatcctgtgtatctacggcagggaacattagctccctgctcagcctccatggaaccacaggattgtatcattttggtttggcctgagcatgagaaaacatcaaaagtgtttcctgttctgttagaccaccattttctcagacctctggctggaagaagcaggcttttctttgtgctctttttgtctgtgcctgtcagtgcaggattgtaggtttcttcagcacccagtctaggatatagaatagccttggaattccatactgtgtcatttcttaagtcctgaagtccactttctttccattttgtagtattcgtatatttgtatatttgttaatctttttttgttgttttgttttttctctagggatttttaattgtaagagggaagatgtgggaagaaaggggttactactccaccttgactggccccggaaataatacctgttttataaacagcatggatgaggagagaatctgtctgtgtgcatgaagtatttaatatttggaaacatgaccagaaacaatagaataaaatacataacaaaacaggggccgggcacagtggctcatgcctgtaatcccagcactttgggaggtcaaggcaggaggatcgcttgagctcaggagtttaagatcagcctgggcaatgtagcaagaccctctctccactaaatataaaaaaaattaacaggacatggtggcatatccctgtagtcccatctagtagggaggctgaagtgggaggatcacttgagcctaggagttcaaggctgcagtgagctatgatcatgccactgcactccagcctgggtgacagagcaataccctatttcaaaaaccaaaaccaaaaccaaaatatgagtataagttcttctccatgagaaatgtaagatttatactatattttcaatttttctcattttaggatattttaaagttgatcacatcaaagggatccgggaaaaacaagaaaaacctctgtggcaagaaatattcatcagtgatgctgacaaaacattgagtaaagaaggacagaaagttttagaaaaactatttaatctggaaatagctccagagctttcagaaaaaatatcctgtaaatgtgactcacacagaatgaatttgccagttgcttctcaattaattataagtgaaagaaaatattcaagaaagaagactgaatacatgaatgtgtgtgagaaactgcagcttgatattaagcatgagaaagctcatgctgaagagaaatcttatgaacatggtgaaaatgctaaagctttcagttataagaaaggtcagcattggaaatttcaaactttggaggaatcttttgaatgtgatggatctggacaaggtttatatgataagacaatttgtattacacctca

SEQ ID NO: 41871 - DNA, 2300 bp, Homo sapien
agactaatgataggagattacattgacctgaaatgcagcataaaaactatagtttttatagtattgcagtgtagtaactgtttggcatttttgaggtaaatttcactgatacattatctatgtttatatatttcggtgtactttttgggacatttttgcatttatgttatgggagatattggtctgaaagtttcttttcttgaatagtatttgcctaatcttgctatgaggatgaggcaggccttataaaatgatttgggaaatattccatcttttattttctagaagacattgtgtaggattggtattatttcttccttggatatttggtaaaatttactagttaaaactatttggtccagaagttgttctttggaattgcacacacacacacacacacacacacacatacacatatatagaggaagatttcattacattcttaagccttatttacatatgcaaacatagttaaaatttgagtaaattagacattcagttaacatatcctccatcataatgaagtaagttaatatgttgtcgtaaatatccttttcaccgacagctcctttagaaaaaaatgtcttttagattattctgccattatgttttaacatttgacatagaatatattccctgtggttacaatacacattcacctgcctcttctttccacttagattgtccaaataaagttagtttgcttttatagttaaaaaaaaaaaagagagagagactagaatgctgttacaaaacggtgtcagagctagctacttcacttttcaccatgtaaggatataacaagaagtgagtggtctgtaaaccagaagaggtcttcacaagaacacagtcatgttggcaccctaatctcagacttccagtctcctgcactgggaaaaataaatgtttattctttaagccatttagtctatggtaatttgttgtagtagcccgaactaagacagagttattgttaatgttgttttattatctcttgaatgtctgttagtagttagtcctctcttgaatttttggtattggtaatttgtgtcttctctttttttctctctgatggtttttatcattaaaaaaactttttaaaaaattaagcttttggtttgacttttttgtcatccttctactttctttcaacttaatgtcctgtctttatctagtttcctaagggggaaacaagcatctgactggagatctttcttttcaaatataatttttttaaagacagagtctcactctgtcacccaggctggagtaccgtggctcactgcacctccacatcccgagttcaagcaattctcctgccccagcctcctgagtagctgggattacaggtgtgcaccaccacactcggctaacttttgtatttttagtagagaaggggtttcaccatgttggtcaggctggtctcaaactcctgaccttgtgatccacacacctcagcctctcaaagtgatgggattacaggcgtgagccaccgcatctggccaaaaaaatttaagccccaaatttatctatgtgtactgccttagctgcatccacaaatttctgtattctaagttgttttgtttacattcacttcaaaatatctcatttgagaattctttcacccatgggttaattaggaatgtataacttacagttcttttgtatttctccagataaatttgtgtttactgatttctggtataatttctctgtggcccaagatcatcctctgtataatttatttcttctatatttctgaaggtttgtcttacagtctagaatatagtctgttttgatgattgttccatgtgcatttcagaagaatgtgaattcagctgttgaatgcattgtgtcttcaggtttgaagccatggttattgcaagtgctactttatcttatctcttctgcttgagtattgggtctactgtgtattcctgcctctcctcttacttctgtgcttctttttttcttgtttccttcccatagctgctatgagttcctgtcagtgccctaaaacaacttattatattcttgcccttgcagattaagacatttgttccataaattagataataatttggttctaggcagaattttggtagtggctgctgtgaccgtctcccagcatatcctaagaatggaactttctcaggattcttcatggctcatggaagaaaacatataagagcatgcagatcctgtgtatctacggcagggaacattagctccctgctcagcctccatggaaccacaggattgtatcattttggtttggcctgagcatgagaaaacatcaa

SEQ ID NO: 41872 - DNA, 2300 bp, Homo sapien
ccctaacctacaagcttttgatgagtttgatttaataactccacctcctgtgtggtgtggctggcttcacatcaattaaattcttcctttactgcaatgccctggtctctgtgaattgattttttttgtgcagcaggcgggaagaacccatcaggaggttacagtatggttgttgaacttttcgatttatggagttttaaaatataattaccaatatgtgtcttcataaaatacttttacactatgacactatacaatatttttattagatcttatttgttattcatgatttttcatcctaatttttaaaactatgatttttattagacttttatttacaatttttattatgaaaattttcaaacatacatggaagtagagacaaaagtaataaaacccaatgtattccttacactctacttcaataattataaatatatggagtagtcttaaaatttcatatatatccctcccacaaacacacactcaagcataattttagcacaaaccccagacatcatattatatcattttaaaatatatagctatgtatctttaagggaaaggacttttaaaatacatgatagtagtaccattaacacaactaaataaattaacagtaattccttaatatcatctaatgtttggtgttcaggttttcatgattgtctcacagatctctttttcagtgagaatccaaacaagtccacgcacactgcatttggttgacagaggtttttgacagagcaggagcatcgccatcatggacaagtaccaccattctaaagttccccttgatccacctaaaaaccacctaaatccaaagggcatcagcctaatggctaaggtcagcatgaccataaaccacaaatgacatgtccaaccagaaacattccaaccataggataaacccctccctgaccagagacatgccagcccccagataacctcccctccagctggagagatgtcagccccaagaaaacctcccctctgaccatagacattccaaccccgccatgagcttctcccccatacagaaacattccaagcctgtgataagctctctcaccaataaatactcttactctggaagagagagtgttcctaaccgaaatcggccagaagcccctctcaggtttattctccaaaataaacctgtctttgactcttaagccacttttcatgtttctttcctctttctttaactttaacagttttaattgatcacaatatcttcttcccacctgactccatgtatttgcagaaaaaactaggtcattcgcctgtagaatttcccacattttgtgtttggcttagtgcagccttatggtataatttaacacatataaactgatagttagaacaagaggttgatttaagttcttttagttttatattcttttggcaagaatacttcaaaggtggtgcagtgtgcttcctattgaatcatattcagaggcatgtaatgttggattttctttctcttatcagacttcttaattttagttgttccagtacataaaaattagtatgttatcatggtctgtgattactaatcatttaagagtttatggggatgtaagttacttgctcctgctttgctgtctgccacgagtaaaagccccctgaagactccccagaagcagatgctgccatgcttcctgtacagcctgtggaacgtcattgaaattataagactatcattcaaatggaagcattacagttctttggaaacattattatttcaaaatgaaggagaatgatacagatacactggctgaggtgttttgaggtgcattgaaaagttccaagctgttacttaccttaacatgttcttgaggtaccatggcatggattaaaaggaaatttggtaagtggcctccatttaaacgacttactagggaagctatgtgaaattatttaaaagggtaaggggatcaaatagtacttagccttcatgcaaaagttgtacagaagtcatatggaaatgaaaaaaggttttttttgccctcccccttgtgtatatcttatgggcagtggatggaagaaaataaaataacaaatgaaatgcgatggttgttctgaacaagggtctcaaccatgtgcatttattggcataggaaatagtgaccaagaaatgcagcagctaaacttggaaggaaagaactattgcacagccaaaacattgtacatatctgatttagacaagcaaaagcacttcatgttgtctgtaaaggtgttctatggcaacagtgatgacattggtgtgttcctcagcaagtcatccaaaccttcca

SEQ ID NO: 41873 - DNA, 2300 bp, Homo sapien
tattaggccagaaaacaagtcttagcaaatttaagaagattgagatctcaccaagtattctttttgactacagtggcatgaaactgaaaattaaaaacaggagaaaacttagaaaagtgacaaatatgtggaaatcaaccaacacactcctgaataaccagtagatcaaagaaaacatcaaaaaagaaataaaatatcttgagacaaactaaaatgaaagcacgacatactaaaactgatgagatgaagcaaaagccgttctaagagagggaagtttatacagataagtgctaaatgaagaaaaaagatctcaaataaacctcaaaaaatagagaaaaaaaatcaagcccaaaattagaagaaggaaataacaaagatcatagcagaaataaatgaaatagactagaaaaacaatagcaaagatcaatgaaacgaagagctgattttttgaaaagataataaaaattgaccaacctatcactaggctaagaaaaaagaaatcttaagtaaataaaattagaacaaaaaaggagatattaaaattggtaccatagaaatacaaaggataataatagtctactctaaacaactatgtgtcaacaaattgtttaacttagaataatttctagaaacatacatccactaagactgaaacatgaagaaatagaaaataaaaacagataaataatgagtaaaaatattgagtcagtagtcaaaaagctcctgaaaaaggaaaatccaagaccagatagcttagtggagaattctaccaaatgtttaaagaagaattaataccatttcttcacaaactcttccaaaagttgaagaggagggaacacttccaaacattttttatgaggccagcattaccctgataacaaggacagaaaaggacactacaaggatgacagagatttttaaggtacaaatgatgtattgttggaattgaaaatacaggctttgttagtacaaagatttgtgtgtggataggtggatgtgtactggtgtgtgcatgcatacatatacaagcttaccttgttttattacacttcacattattatgcttctcggatattgcagtttgtacaggttgaaggtttgtggcaaccctgcaccaagcaagtctaccagtgccacttttctggtagcatgtgcttattttgcacctctgtgttacatttttgtaattcttgcaatatttcaaatgttttgttattattatatctgttatggtgatctgttatcagtgatcgttgatattactattgtcattgttttggggcatcacaagccatgctccaaaagacaatgagcttaattgatacatatgtgtattcgaatggttccatcgatctgcccttcctccatctcaccctctcctcaggtctgttttctgagacacagcaatattgaaattaggccaattaataactctataaaggcctctatgtgttcaagtgaaagtaagagtcacacatctcttattataaatctaaagtgagaaatgattaagctgagtgaggaaggtatgttaaaagccgagacaggccaaaaggcccaggctggtctcaaactcctgacctcaagcaatccacctgccgcagcctccccaggtagctgagattaaaggcatgagccaccatgtccagcttctatgcattattttaaatggagtattgaagactctgttactgtagaactatttctaacttcaattctgtcaatatttgggtcacaggccttaatgtgattacacgctggtctgatgctcatggccaggacattttgttttcctgttggacataaacaatctcacagaatatcaacttcagaaggttaatctgagaccgtgataagtgcaaacaaaaacaagggcactttataatgttgtctaagtgcagataaaaaacaaggtcttgatgtcacccacaaaatacttaataatcatattgctcctgctttctgacagcatccaatctaaagtcttcactttctgagatcctgtccgaaatcaaccaattaaagcccaaatcgtataatagtttctctctaactcctcccactgagatgacccatagtaccccattccttgctgcaatgtaattatatttaattacaagtgtgcccctggtagtctttaactgaagggcactgactgggtcactggtgaagttccccgcaggaactgagtcagaccccatctcagggccctgcacaagataggtgcctgctctaaggcgtggaccctcgccacagccctggcccgtcttgacgggcgagggttactgtacttgtcccaa

SEQ ID NO: 41874 - DNA, 2300 bp, Homo sapien
cagactaatgataggagattacattgacctgaaatgcagcataaaaactatagtttttatagtattgcagtgtagtaactgtttggcatttttgaggtaaatttcactgatacattatctatgtttatatatttcggtgtactttttgggacatttttgcatttatgttatgggagatattggtctgaaagtttcttttcttgaatagtatttgcctaatcttgctatgaggatgaggcaggccttataaaatgatttgggaaatattccatcttttattttctagaagacattgtgtaggattggtattatttcttccttggatgtttggtaaaatttactagttaaaactatttggtccagaagttgttctttggaattgcacacacacacacacacacacacacatacacatatatagaggaagatttcattacattcttaagccttatttacatatgcaaacatagttaaaatttgagtaaattagacattcagttaacatatcctccatcataatgaagtaagttaatatgttgtcgtaaatatccttttcaccgacagctcctttagaaaaaaatgtcttttagattattctgccattatgttttaacatttgacatagaatatattccctgtggttacaatacacattcacctgcctcttctttccacttagattgtccaaataaagttagtttgcttttatagttaaaaaaaaaaaaagagagagagactagaatgctgttacaaaacggtgtcagagctagctacttcacttttcaccatgtaaggatataacaagaagtgagtggtctgtaaaccagaagaggtcttcacaagaacacagtcatgttggcaccctaatctcagacttccagtctcctgcactgggaaaaataaatgtttattctttaagccatttagtctatggtaatttgttgtagtagcccgaactaagacagagttattgttaatgttgttttattatctcttgaatgtctgttagtagttagtcctctcttgaatttttggtattggtaatttgtgtcttctctttttttctctctgatggtttttatcattaaaaaaactttttaaaaaattaagcttttggtttgacttttttgtcatccttctactttctttcaacttaatgtcctgtctttatctagtttcctaagggggaaacaagcatctgactggagatctttcttttcaaatataatttttttaaagacagagtctcactctgtcacccaggctggagtaccgtggctcactgcacctccacatcccgagttcaagcaattctcctgccccagcctcctgagtagctgggattacaggtgtgcaccaccacactcggctaacttttgtatttttagtagagaaggggtttcaccatgttggtcaggctggtctcaaactcctgaccttgtgatccacacacctcagcctctcaaagtgatgggattacaggcgtgagccaccgcatctggccaaaaaaatttaagccccaaatttatctatgtgtactgccttagctgcatccacaaatttctgtattctaagttgttttgtttacattcacttcaaaatatctcatttgagaattctttcacccatgggttaattaggaatgtataacttacagttcttttgtatttctccagataaatttgtgtttactgatttctggtataatttctctgtggcccaagatcatcctctgtataatttatttcttctatatttctgaaggtttgtcttacagtctagaatatagtctgttttgatgattgttccatgtgcatttcagaagaatgtgaattcagctgttgaatgcattgtgtcttcaggtttgaagccatggttattgcaagtgctactttatcttatctcttctgcttgagtattgggtctactgtgtattcctgcctctcctcttacttctgtgcttctttttttcttgtttccttcccatagctgctatgagttcctgtcagtgccctaaaacaacttactatattcttgcccttgcagattaagacatttgttccataaattagataataatttggttctaggcagaattttggtagtggctgctgtgaccgtctcccagcatatcctaagaatggaactttctcaggattcttcatggctcatggaagaaaacatataagagcatgcagatcctgtgtatctacggcagggaacattagctccctgctcagcctccatggaaccacaggattgtatcattttggtttggcctgagcatgagaaaacatcaa

SEQ ID NO: 41875 - DNA, 2300 bp, Homo sapien
gcacctccacatcccgagttcaagcaattctcctgccccagcctcctgagtagctgggattacaggtgtgcaccaccacactcggctaacttttgtatttttagtagagaaggggtttcaccatgttggtcaggctggtctcaaactcctgaccttgtgatccacacacctcagcctctcaaagtgatgggattacaggcgtgagccaccgcatctggccaaaaaaatttaagccccaaatttatctatgtgtactgccttagctgcatccacaaatttctgtattctaagttgttttgtttacattcacttcaaaatatctcatttgagaattctttcacccatgggttaattaggaatgtataacttacagttcttttgtatttctccagataaatttgtgtttactgatttctggtataatttctctgtggcccaagatcatcctctgtataatttatttcttctatatttctgaaggtttgtcttacagtctagaatatagtctgttttgatgattgttccatgtgcatttcagaagaatgtgaattcagctgttgaatgcattgtgtcttcaggtttgaagccatggttattgcaagtgctactttatcttatctcttctgcttgagtattgggtctactgtgtattcctgcctctcctcttacttctgtgcttctttttttcttgtttccttcccatagctgctatgagttcctgtcagtgccctaaaacaacttactatattcttgcccttgcagattaagacatttgttccataaattagataataatttggttctaggcagaattttggtagtggctgctgtgaccgtctcccagcatatcctaagaatggaactttctcaggattcttcatggctcatggaagaaaacatataagagcatgcagatcctgtgtatctacggcagggaacattagctccctgctcagcctccatggaaccacaggattgtatcattttggtttggcctgagcatgagaaaacatcaaaagtgtttcctgttctgttagaccaccattttctcagacctctggctggaagaagcaggcttttctttgtgctctttttgtctgtgcctgtcagtgcaggattgtaggtttcttcagcacccagtctaggatatagaatagccttggaattccatactgtgtcatttcttaagtcctgaagtccactttctttccattttgtagtattcgtatatttgtatatttgttaatctttttttgttgttttgttttttctctagggatttttaattgtaagagggaagatgtgggaagaaaggggttactactccaccttgactggccccggaaataatacctgttttataaacagcatggatgaggagagaatctgtctgtgtgcatgaagtatttaatatttggaaacatgaccagaaacaatagaataaaatacataacaaaacaggggccgggcacagtggctcatgcctgtaatcccagcactttgggaggtcaaggcaggaggatcgcttgagctcaggagtttaagatcagcctgggcaatgtagcaagaccctctctccactaaatataaaaaaaattaacaggacatggtggcatatccctgtagtcccatctagtagggaggctgaagtgggaggatcacttgagcctaggagttcaaggctgcagtgagctatgatcatgccactgcactccagcctgggtgacagagcaataccctatttcaaaaaccaaaaccaaaaccaaaatatgagtataagttcttctccatgagaaatgtaagatttatactatattttcaatttttctcattttaggatattttaaagttgatcacatcaaagggatccgggaaaaacaagaaaaacctctgtggcaagaaatattcatcagtgatgctgacaaaacattgagtaaagaaggacagaaagttttagaaaaactatttaatctggaaatagctccagagctttcagaaaaaatatcctgtaaatgtgactcacacagaatgaatttgccagttgcttctcaattaattataagtgaaagaaaatattcaagaaagaagactgaatacatgaatgtgtgtgagaaactgcagcttgatattaagcatgagaaagctcatgctgaagagaaatcttatgaacatggtgaaaatgctaaagctttcagttataagaaaggtcagcattggaaatttcaaactttggaggaatcttttgaatgtgatggatctggacaaggtttatatgataagacaatttgtattacacctca

SEQ ID NO: 41876 - DNA, 2300 bp, Homo sapien
cgtctcaaaaaaaaaagaaaaagaacgtacaggagatcatggaataagaacaagaagagattactttccagggctctcagaaagtttctaaaaagaggtgccattgaccctgaccttagcattgtgatggagacattacagagctggtaggaaggagaagaagaaggaacggctggaacacacttggggtgaaatgagcagcatttcagtgtgggagctgcagactcagttttggtggaagagttaagagccaggatcttgtcaggaataattctgtgtccaagtgcagaatcgtggtttgctccactactgccagtaactccatttctcaatcatgatggtgatgctttttttttttttggctcccaatcccggagagtggccatactgaagtcacattacaacaattaacttttcaactattagatgattaatttttaccaagtagcaagaacagctgtttggcacgtagcagtgtggcatgagtatcttgtaaatgaattaaacaaaatatctctccaacacacacacagtcattcttgctgcatgtcagcctccacttctccctccattatttgatgctgtgaagctgaggcagccagcttgagcgaaagctttcagatctcactccaacaaagagctttgattgattcatttagtataaggtgttttatctggctagagaaatccaagctgagttttattaattactaagaaaagtatgaaatagattaatctttgatcaaaactatgtgtgaagtagaaacatattacacatatggagagcagttttatggaataaaaacaatctatgtgtggcataactgacattgtctttatatttttgggggggtgtgtgaggacggagtctcactctgtcgccaggctggagtgcagtggcacaatcttggctcactgcaatctccacctccttggttcaagcaattctcctgccgcagcctcctgagtagctgggattacaggtgcctgctgccatgcccagctaatttttgtatttttagtagagacggagtttcaccatgttgtcgaggatggtttcaatctcctgaattcatgatcctcctgcctcggcctctcaaactgctgggattacaggcgtgaaccaccttgcctggcctatacataatttttaaaacagatacagaatatatagatagcttaacaattataaaattgtatttatcaagtaggtcacgaggtaaacattttacgctatgcaaaagggagcaaacctccgaatttgtcatgcagggtcactagtggaactcacagcaacaggtctgataaagcagaggagggaaccgggcttccgtgtgctttagagagagtgaaacatgaggagtcacaggcagagaaaactgtttttcagaaagaaaagaaaggggacatgacagcccagcagtagggtgaagagggcctctccgtgggtgccgctggcttgagctgctgtaagtggctgtgccgggaacagaggatctgtataggagaatggggaagggagtgctggaaccgggggtgggcaggagcagcagtctggagaccagaatgacctagggtttcctctcatgctcccattcccagtgtttcacgtgtgtaaagtagcaagcatgcatatactgcttagaggcatctacacttaacatactacactcatatacaacacttgcatcgaacaaagtacacatagtaggtgtggcatgtaataagttaccctcctatattttcttctaaaagatttttaaatatttgcatctcaaatttaagtcctttgtccatttagatctggcctttgtgtgatagcgatccatttttgggatagagatccattctgatattttcccatatggataccaactgctcataccatggattatatagaccctttctgactgttctgtaatgttagccagggcatacatcaagatttcacacaagcatacactttcacaatagcaattcctgctgtggtaattataacttcacagtaaatctggtacgtgatagactcacataagctccacctcccaccttcacacactttagtcttctatgggattgtcttagttatactgggcccttttatcttccgtataagctttggaagcagtttagtgacaatggtactcttgtctttttcttgattttaaaaggagtgatttcgatatttttaatcacaaaacatgataggtgctgtaggttatttgttgactccttttatcaggttaaggaaattaccctttattcataggtggaaatatcatgaattatttaatttttgt

SEQ ID NO: 41877 - DNA, 2300 bp, Homo sapien
ccctaacctacaagcttttgatgagtttgatttaataactccacctcctgtgtggtgtggctggcttcacatcaattaaattcttcctttactgcaatgccctggtctctgtgaattgattttttttgtgcagcaggcgggaagaacccatcaggaggttacagtatggttgttgaacttttcgatttatggagttttaaaatataattaccaatatgtgtcttcataaaatacttttacactatgacactatacaatatttttattagatcttatttgttattcatgatttttcatcctaatttttaaaactatgatttttattagacttttatttacaatttttattatgaaaattttcaaacatacatggaagtagagacaaaagtaataaaacccaatgtattccttacactctacttcaataattataaatatatggagtagtcttaaaatttcatatatatccctcccacaaacacacactcaagcataattttagcacaaaccccagacatcatattatatcattttaaaatatatagctatgtatctttaagggaaaggacttttaaaatacatgatagtagtaccattaacacaactaaataaattaacagtaattccttaatatcatctaatgtttggtgttcaggttttcatgattgtctcacagatctctttttcagtgagaatccaaacaagtccacgcacactgcatttggttgacagaggtttttgacagagcaggagcatcgccatcatggacaagtaccaccattctaaagttccccttgatccacctaaaaaccacctaaatccaaagggcatcagcctaatggctaaggtcagcatgaccataaaccacaaatgacatgtccaaccagaaacattccaaccataggataaacccctccctgaccagagacatgccagcccccagataacctcccctccagctggagagatgtcagccccaagaaaacctcccctctgaccatagacattccaaacccgccatgagcttctcccccatacagaaacattccaagcctgtgataagctctctcaccaataaatactcttactctggaagagagagtgttcctaaccgaaatcggccagaagcccctctcaggtttattctccaaaataaacctgtctttgactcttaagccacttttcatgtttctttcctctttctttaactttaacagttttaattgatcacaatatcttcttcccacctgactccatgtatttgcagaaaaaactaggtcattcgcctgtagaatttcccacattttgtgtttggcttagtgcagccttatggtataatttaacacatataaactgatagttagaacaagaggttgatttaagttcttttagttttatattcttttggcaagaatacttcaaaggtggtgcagtgtgcttcctattgaatcatattcagaggcatgtaatgttggattttctttctcttatcagacttcttaattttagttgttccagtacataaaaattagtatgttatcatggtctgtgattactaatcatttaagagtttatggggatgtaagttacttgctcctgctttgctgtctgccacgagtaaaagccccctgaagactccccagaagcagatgctgccatgcttcctgtacagcctgtggaacgtcattgaaattataagactatcattcaaatggaagcattacagttctttggaaacattattatttcaaaatgaaggagaatgatacagatacactggctgaggtgttttgaggtgcattgaaaagttccaagctgttacttaccttaacatgttcttgaggtaccatggcatggattaaaaggaaatttggtaagtggcctccatttaaacgacttactagggaagctatgtgaaattatttaaaagggtaaggggatcaaatagtacttagccttcatgcaaaagttgtacagaagtcatatggaaatgaaaaaaggttttttttgccctcccccttgtgtatatcttatgggcagtggatggaagaaaataaaataacaaatgaaatgcgatggttgttctgaacaagggtctcaaccaagtgcatttattggcataggaaatagtgaccaagaaatgcagcagctaaacttggaaggaaagaactattgcacagccaaaacattgtacatatctgatttagacaagcaaaagcacttcatgttgtctgtaaaggtgttctatggcaacagtgatgacattggtgtgttcctcagcaagtcgtccaaaccttcca

SEQ ID NO: 41878 - DNA, 2300 bp, Homo sapien
tgcaggtgagggcaaagggcaaagggcaaaagggcaaagggcaaagcccgagttaccttcttcaaggcaactctgccacaacttgaaaacatcttaggcctcagtttgaaatgcttctcctactttcgggactcttcagcatcaaaatttctcccagataacctgacaaaactgtagaacatcagacctggaatgactgaaagaccaccaggctcagtgtttacctgaggtgggcaagtggctgagcagctcaggagtgggccccctgagtcttgtcccatcttactttgtactacactgttctttagagaaagcttccttttggagaccaaccaggactccttagaagcagaggtgacaaagcaagctttctaaatgatttgtggaaaaggacaagtcttcctttcacatttttggaaggaaatatttttaataaggcagggattctccaatgaactggtctaaaccactgcttgcggcctcatgcctggcctgcttcacccactcaacagaatcacctcgtctctgaaggtggttgtgtttgaaacacctgctttacagagcagctgcttacaggcttaaaagggaatcagaggtgtcggttcaatcaatctgcccccctgtaagcttcatgaggactataactctgtctccctgatgcacgtgaacctagcaccggcaccctggagcagagcaagtgctcaatactgatcatgtttgcttaattgataagccattagtgtgcgctctaataaactgctttagaagaatgctttaggagtaggaagtatagatctgcctaacatacacttagaaaaaattaggcagatcttttaaatgcttacattttagtaaggaaaacaattgatcattagggtgaatgctgcatcattattttacaatctacaaagtaacaggaagtgtacagatttggcaaaccacagaattaaccattgtatctgacttacattactcatttgctcatggatgagattctaatagagatgcgtttggcattttcacaaatgccctgcgtttcaaagagtagatcagctgattttgcgctgaaacccttaaacttaatggggacaatgtatctcacctcaaatcttcaatcagatgtgctgatcaaacccacatgaagcacatttattcttggaaaatattttgttttactatttactattgtaattcccactcataaaatagccagcatttgccattatattttacagagacatttttaacaacttcttaaaagaatgactgcaatattttaggttatcagtgaactggtgtggaaaatgcagcattcttaaaagttagtcatggcactagtgcattaattatgcattagaacaattcgccttaaagagattatagatttataaattgtaaattatgccaaatgtattttgaaatcaggtacctgtgagttatgaccctgtgtttcaaaagaacaacttgtaactatattgctgatatcttggttataatattttacatcaacattatgttaaaatataatatcccattataaaagttccagagacaagccacaatatgtaaatatttctgtattttaatttacaaagcttactttttcatttgtcctgataactgaattaacattgtcgagggaaattcatatgaatcaaaaaatgcaataaattagacccttaaaataattcatatttcatgagtttcccattttaaggtcaaaatatttagcaaaatctcacatctcctatggcactatcttttaggtacagtttaaaactttgaatatgctttgttttcaagtgtttatgaataatttcttcaataataaaaaaatcatatactttgaagaaagggcctatctcattcttcttgcctggccacatagtctcatgggtacaattcaatattttaataatttctactattcctgagatagtcaaacaatttctcatcatcatctcaccatcacaatcttaatgacaaatctcagtttctgagtgtcagccagggagcagataccaggaattgtgctctaatcctcataacaaaacttcaagatctctcggcaaagaaaagtcaaaccaagactcaaaaccaggccgggcgcggtggctcacgcctgtaatcccagcactttgggaggccgaggcgggcggatcacgaggtcaggagatcgagaccatcccggctaaaacggtgaaaccccgtctctactaaaactacaaaaaatagccgggcgtagtggcgggcgcctgtagtcctagctacttgggaggctgaggcaggagaatggcgtg

SEQ ID NO: 41879 - DNA, 2300 bp, Homo sapien
cctgtattttggtctcttggtagccttgctcctgggaagctcttccttgaatctagtcaccattccattccaccaggccacatatgtcttcaggcaacaggcaacatcaattgtcagccgtgtaggtgagtttcagatgactgtggccccagctaatgcttgactatagcacatgtgagagccccatgcagaaccccctagaaccatggagagcagtcaccctgcagaaccatgagtaagttaagcttaggggtggttaattacacagaaataagtaaacagagcactccaacaggtattaaagattattacaaagattatgtaattaaaacaatacagaacagaccagggttgactacaagatcaatgggacagaataaagttacatatccaatgcctgctgctgaccacagggatttgtcacagatctcatcacttagaaaccctacagcggtttccccggtcaccttccagtcaccactacaccttggctccttttagcactcctccctagcttatcactatatgaaattgctttatctctttgtattgtctgtcacctgccaccataatgtgaatttctagacctccatagcatgtaaagctctagaacagttcttagaacacagaaggtgcttgacaaatattttctgaaagaaaaagaagatacttcaatgcctcagtttactaatgaggtggggctaccatatggctgcctgaacaaatacagcttgacattcactttcttgctagtgattgaagtgtattaacttgtgtaatcacacaactaccctacggggtaggtgcccttatttctccatttagcagaaaggggctaagtatcttaaccaaggtcacacggctttcaagtgccagagccaggactcagatctacacaggtctggctccagagcccccagtctaacctcttaacctctctgctttactgggctaaaccttcaccacctatcatatggaaaaagaaattcaatagaaatttatatggaaaaaatacaactctgtgttaatattaaaaaatccatagtaacatgtacaatgaggaagcttcctcaagcccaactatacaggtcagatcggttgaaaaaataaaactaacacatttttacatgtcaaaatatgcaatatttgaaaatccaaggctaatatctttaaataggcaaagatttattaataccccttgacacagaaacaggaagtgagaaaatgggcaactgacacaaatcaataattaactgtgcggacataggtggtggagtctctcctaatcctctattcttggagatctggatgcctgccatttgcgtatgggaagaacagagacggtcatggagaacagcatttaatctagaaaggaccacaatgaggtcaaagggcagtctcagggcagtcttaagagctccccatccccaaagaactggcaaggactctccaggtgctcgtaagcgactgctgcccaactcccatcacgaactcagaagacctgtcattttctgaaattttcatgactcctaagacactagttattggggaaaacttcaaattatttaaataacgagaggcgaataacattgctaaactcatgaatactctgtatttaaaacctctactggcgatcagagcacatagaatctctactactgatccctgacgctggccatcccccaacccgtcggcccacggaccccagccctgatcccacctcctcccagcatcttacacaaggattctcaccatactccccagagactcgcctgcccagggcccctctctcaccccatatagctcaggtctctgaccccgagacagcatcaccgacctctcccactacctatttccagattagagtccctgatcccagaggcattgtctaaaataactagctcttacaactacgtccacttcaggaaccgccctgtgatgtcagaactttgaggccgcccggccagggctgcacatgctcagtgaggccggcgcccgccagtaacaaacatggctccctgaagccgctcaggctcaagagcaacatggaggtctgcacttaatcgctcctctccggggacggccatactgaggaggcatctcttccgtgcaggcaggctctcctggggacctcagagattctctccagtggcagcggaaaatgagcaatgggtggattcgggtccagattctggcaggagggagtttgggatcgagatctggaaaaaagcactagactggaagaggacgcgatggagtcggagccgctggcggggacaaaaaccagaggcccgggaagg

SEQ ID NO: 41880 - DNA, 2300 bp, Homo sapien
agcactttggaaggcagaggtgggccaatcaacagaggttgggaccagcctgaccaacatggagaaaccccatttagaactaaaaatgcaaaattagctgggcgttgtggcgcatgcctgtaatcccagctactcaggaggctgaggcaaaagaatggcttgaacccgggaggtggaggtggcagtgagccaagatcacaccactgcactccagcctgggcaacagagcgagactccatctcaaaaaaccaaaccaaaccaaaccaaagcaaaacaaaacaaaacaaaaaaaccctgaaatcatatcaattattttttctgaccggagtggaaaagtattaaaaaatcagtaacaggaggaatttttttgccgaccgtctttggctccctctcttgccaccctttttcttcctccatctaccccaaaactttttccccaccattttttccccactgtctttttgcaaagccttctatactttaccactcacttccgttttccccacccatctactccaaaacttttccccaccgtcttttctccctctccctggccacccttttttccgcctcccgttctcatcatcctcttttgctccttcatctccccaaaaacatttccctcatcttctcccaaagccttctccccactcctgctgctcgccaccctctttccccttccatctacccaaaaactgtttccctattgtctttttctcccttcctccttgccaccctttcccttctccatctacccaaaaacattttcccgccatctttttgcaaagcctcttctctactcctgctcaccacgctcttttaacccagctacctccccaatttttccctgccatcttttcacaaagccttccccgcttcccgctcgccctcttctttcctctatcctgcttgccaccctctttttgccctccatctaccccaaactattttccccatcgcctttttcccagtcctctttccccactccctttggccacactttctattctcctcccacttgctaccctcttttccccctccatctacccaaacactttttacccactgtcttttctttctacactttcttttctgcctatcgtcttttcgcaaaaccttttctctttcccactcgccaccctctttatctttctcccaatggccaccctcttcccccctccatctacctaaaagcttctctcctcactgtcttttcgcaaaaccttctctccctcctgctcgccactctctcttccccctccctctctgcaccctcttttctcctcccacttgtcacccttttcccccctccatccactcaaaatctttttacccacagtcttctttccctttcttttctccccaccgtatttttgcaaaccttctctccttcctgctcatccctgttcccccctcacgaccctctcttacccccttccatctacccaaaaactttttccccactgcctttctgtgaaaccttctctccctcctgttcaccaccctgtttttccccctccatctaccccccattttttccccccaacatcttttccttactgtctttatgcaatgccttctccggctcaccatccttttttccttttggcactaaccaccctctttacccttccatctatcccaaaagtattttccccttcttaccgctccagccacactacagtctctgtcgccaccaactgcagggaggccaagccacagtgctgcaggctacagcctccagtctgtcctggtcctctaagccgggcttggagcagctcagtgagcagacacagaagaacctggagtggcctgactcttcttcagcaccacttatgtactgaagttatgcatatgccgttcctggactacacgttccaggactggataagagaaagcctggaggcctactctgattggactttgttatgttctgattggatgaaagaaagtcttaggacaaccaatcagagtatgaaaataaagtccaatcagagaaggcctagaggttttctctcacccaatcagaacatgtagtccagaaaccacccacgtaaccccatgtgcatgttgaggaggcctcacgccagtttaggctctccagtatctcctgccgagctgctctgttcccggcttagaggaccaggagaagggggagctggaggctggagcctgtaacaccatggctcgtctcgctctggatggtggtggcaacagagatggcagcgcggctgaagtcttaggagggcggcctgagcggtaggagggtagtctgagcagtaggaggggggctggagcag

SEQ ID NO: 41881 - DNA, 2300 bp, Homo sapien
cgtctcaaaaaaaaaagaaaaagaacgtacaggagatcatggaataagaacaagaagagattactttccagggctctcagaaagtttctaaaaagaggtgccattgaccctgaccttagcattgtgatggagacattacagagctggtaggaaggagaagaagaaggaacggctggaacacacttggggtgaaatgagcagcatttcagtgtgggagctgcagactcagttttggtggaagagttaagagccaggatcttgtcaggaataattctgtgtccaagtgcagaatcgtggtttgctccactactgccagtaactccatttctcaatcatgatggtgatgctttttttttttttggctcccaatcccagagagtggccatactgaagtcacattacaacaattaacttttcaactattagatgattaatttttaccaagtagcaagaacagctgtttggcacgtagcagtgtggcatgagtatcttgtaaatgaattaaacaaaatatctctccaacacacacacagtcattcttgctgcatgtcagcctccacttctccctccattatttgatgctgtgaagctgaggcagccagcttgagcgaaagctttcagatctcactccaacaaagagctttgattgattcatttagtataaggtgttttatctggctagagaaatccaagctgagttttattaattactaagaaaagtatgcaatagattaatctttgatcaaaactatgtgtgaagtagaaacatattacacatatggagagcagttttatggaataaaaacaatctatgtgtggcataactgacattgtctttatatttttgggggggtgtgtgaggacggagtctcactctgtcgccaggctggagtgcagtggcacaatcttggctcactgcaatctccacctccttggttcaagcaattctcctgctgcagcctcctgagtagttgggattacaggtgcctgctgccatgcccagctaatttttgtatttttagtagagacggagtttcaccatgttgtcgaggatggtttcaatctcctgaattcatgatcctcctgcctcggcctctcaaactgctgggattacaggcgtgaaccaccttgcctggcctatacataatttttaaaacagatacagaatatatagatagcttaacaattataaaattgtatttatcaagtaggtcacgaggtaaacattttacgctatgcaaaagggagcaaacctccgaatttgtcatgcagggtcactagtggaactcacagcaacaggtctgataaagcagaggagggaaccgggcttccgtgtgctttagagagagtgaaacatgaggagtcacaggcagagaaaactgtttttcagaaagaaaagaaaggggacatgacagcccagcagtagggtgaagagggcctctccgtgggtgccgctggcttgagctgctgtaagtggctgtgccgggaacagaggatctgtataggagaatggggaagggagtgctggaaccgggggtgggcaggagcagcagtctggagaccagaatgacctagggtttcctctcatgctcccattcccagtgtttcatgtgtgtaaagtagcaagcatgcatatactgcttagaggcatctacacttaacatactacactcatatacaacacttgcatcgtacaaagtacacatagtaggtgtggcatgtaataagttaccctcctatattttcttctaaaagatttttaaatatttgcatctcaaatttaagtcctttgtccatttagatctggcctttgtgtgatagcgatccatttttgggatagagatccattctgatattttcccatatggataccaactgctcataccatggattatatagaccctttctgactgttctgtaatgttagccagggcatacatcaagatttcacacaagcatacactttcacaatagcaattcctgctgtggtaattataacttcacagtaaatctggtacgtgatagactcacataagctccacctcccaccttcacacactttagtcttctatgggattgtcttagttatactgggcccttttatcttccgtataagctttggaagcagtttagtgacaatggtactcttgtctttttcttgattttaaaaggagtgatttcgatatttttaatcacaaaacatgataggtgctgtaggttatttgttgactccttttatcaggttaaggaaattaccctttattcataggtggaaatatcatgaattatttaatttttgt

SEQ ID NO: 41882 - DNA, 2300 bp, Homo sapien
acttcggtctcttggtagccttgctcctgggaagctctttcttgaatctagtcaccattccattccaccaggccacatatgtcttctccaggcaacagccaacatcaattgtcagccgtgtaagtgagtttcagatgactgtggccccggctaatgtttgactgtagcacatgtgagaggccccatgcagaaacccctataaccatggagagcagtcatcctgcagaaccatgagtaagttaagcttaggggtggttaattatgcagaaataagtaaacagagcactccaccaggtattaaagattattacaaagattatgtaattaaaacaatacagaacagaccagggttgactacaagatcaatgggacagaataaagttacatatccaatgcctgctgctgaccacagggatttgtcacagatctcatcagttagaaaccctacagtggtttccctggtcaccttccagtcaccactacaccttggctccttttagcacgcctccctaggttatcactatatgaaattgctttatctctttgtattgtctgtcacctgccaccataatgtgaatttctagacctccatagcatgcaaagctctagaacagttcttagaacacagaaggtgcttgacaaatattttctgaaagaaaaagaagatacttcaatacctcagtttactaatgaggtggggctaccatatggctgcctgaacaaatacagcttgacattcactttcttgctagtgattgaagtgtattaacttgtgtactcacacaactaccctacggggtaggtgcccttatttctccatttggcagagaggggctaagtatcttaaccaaggtcacacggctttcaagtgccagagccaggactcagatctacataggtctggctccagagcccccagtctaacctcttaacctctctgctttactgggctaaaccttcaccacctatcatatggaaaaagaaattcaatagaaatttatatggaaaaaatacaactctgtgttaatattaaaaaatccatagtaacatgtacaatgaggaagcttcctcaagcccaactatacaggtcagatcggttgaaaaaataaaactaacacatttttacatgtcaaaatatgcaatatttgaaaatccaaggctagtatctttaaataggcaaagatttattaatactccttgacacacaaacaggaagtgagaaaatgggcaagtgacacaaatcgataattaactgtgaggacataggtggtggagtctctcctaatcctctattcttggagatctggatgcctgccattcgcgtatgggaagaacagagacggtcatggaaaacagcatttaatctagaaaggaccacaatgaggtcaaagggcggtctcagggcagtcttaagagctccccatccccaaagaactggcaaggactctccaggtgctcgtatgcgactgctgcccaactcccatcacgaactcagaagacctgtcattttctgaaattttcatgacttctaagacactagttactgggggaaaacttcaaattatttaaattatgagaggcgaataacattgctaaactcatgaatactctgtatttaaaacctctactggcgatcagggcacatagaatctctactactgatccctgacgctggccatcccccaacccatcggcccacggaccccagccctgaccccacctcctcccagcatcttacacaaggattctcaccacactccccagagactcgcctgcccagggcccctctctaaccccatatagctcaggtctctgaccccgagacagcatcaccgacctctcccactacctatttccagattagagtccctgatcccagaggcattgtctaaaataactagctcttacaactacgtccacttcaggaaccgccctgtgatgtcagaactttgaggccgcccggccagggctgcacatgctcagtgaggccggcgcccgccagtaacaaacatggctccctgaagccactcaggctcaagagcaacatggaggtctgcacttaatcgctcctctccgggggcggccatactgaggaggcatctcttccgtgcaggcaggctgtcctggggacctcagagattctctccagcggcagcggaaaatgggcaatgggtggattcgggtccagattctggcaggagggagtttgggatcgagatctggaaaaaagcactagactggaagaggacgcgatggagtcggagccgctggcggggacaaaaccagaggcggtggaaggc

SEQ ID NO: 41883 - DNA, 2300 bp, Homo sapien
tgcaggtgagggcaaagggcaaagggcaaaagggcaaagggcaaagcccgagttaccttcttcaaggcaactctgccacaacttgaaaacatcttaggcctcagtttgaaatgcttctcctactttcgggactcttcagcatcaaaatttctcccagataacctgacaaaactgtagaacatcagacctggaatgactgaaagaccaccaggctcagtgtttacctgaggtgggcaagtggctgagcagctcaggagtgggccccctgagtcttgtcccatcttactttgtactacactgttctttagagaaagcttccttttggagaccaaccaggactccttagaagcagaggtgacaaagcaagctttctaaatgatttggggaaaaggacaagtcttcctttcacatttttggaaggaaatatttttaataaggcagggattctccaatgaactggtctaaaccactgcttgcggcctcatgcctggcctgcttcacccactcaacagaatcacctcgtctctgaaggtggttgtgtttgaaacacctgctttacagagcagctgcttacaggcttaaaagggaatcagaggtgtcggttcaatcaatctgcccccctgtaagcttcatgaggactataactctgtctccctgatgcacgtgaacctagcaccggcaccctggagcagagcaagtgctcaatactgatcatgtttgcttaattgataagccattagtgtgcgctctaataaactgctttagaagaatgctttaggagtaggaagtatagatctgcctaacatacacttagaaaaaattaggcagatcttttaaatgcttacattttagtaaggaaaacaattgatcattagggtgaatgctgcatcattattttacaatctacaaagtaacaggaagtgtacagatttggcaaaccacagaattaaccattgtatctgacttacattactcatttgctcatggatgagattctaatagagatgcgtttggcattttcacaaatgccctgcgtttcaaagagtagatcagctgattttgcgctgaaacccttaaacttaatggggacaatgtatctcacctcaaatcttcaatcagatgtgctgatcaaacccacatgaagcacatttattcttggaaaatattttgttttactatttactattgtaattcccactcataaaatagccagcatttgccattatattttacagagacatttttaacaacttcttaaaagaatgactgcaatattttaggttatcagtgaactggtgtggaaaatgcagcattcttaaaagttagtcatggcactagtgcattaattatgcattagaacaattcgccttaaagagattatagatttataaattgtaaattatgccaaaagtattttgaaatcaggtacctgtgagttatgaccctgtgtttcaaaagaacaacttgtaactatattgctgatatcttggttataatattttacatcaacattatgttaaaatataatatcccattataaaagttccagagacaagccacaatatgtaaatatttctgtattttaatttacaaagcttactttttcatttgtcctgataactgaattaacattgtcgagggaaattcatatgaatcaaaaaatgcaataaattagacccttaaaataattcatatttcatgagtttcccattttaaggtcaaaatatttagcaaaatctcacatctcctatggcactatcttttaggtacagtttaaaactttgaatatgctttgttttcaagtgtttatgaataatttcttcaataataaaaaaatcatatactttgaagaaagggcctatctcattcttcttgcctggccacatagtctcatgggtacaattcaatattttaataatttctactattcctgagatagtcaaacaatttctcatcatcatctcaccatcacaatcttaatgacaaatctcagtttctgagtgtcagccagggagcagataccaggaattgtgctctaatcctcataacaaaacttcaagatctctcggcaaagaaaagtcaaaccaagactcaaaaccaggccgggcgcggtggctcacgcctgtaatcccagcactttgggaggccgaggcgggcggatcacgaggtcaggagatcgagaccatcccggctaaaacggtgaaaccccgtctctactaaaactacaaaaaatagccgggcgtagtggcgggcgcctgtagtcctagctacttgggaggctgaggcaggagaatggcgtg

SEQ ID NO: 41884 - DNA, 2300 bp, Homo sapien
agccccagggcttttagaagcagggcaggccactgctctttctaaggaggagggcattgaaaaacacacccccaagcaatccctgaggctgtgatgttctgctctctacgagaaggaccctcgggtgagagagcagcccaggggcatgcaggctgacctgtcgtagagatcactgacggaggcatgacttttggggagactcaccccaaccaacaccgtccggtcaggcctgaggctgggatcccgtgctgcttcccccgtctccgctgggctttcctcatggtagtcggccttttgcgactcctggcatctggggacattcccgttgaccccaagaagacgttaggccggagcctcagagccccgaaacccaagtactgccacggagggctccttcttcgccaagcctcggtgactggtttctaagacaaccgtgggaaccactgtgactggagaagccgctcccgcctcgcgcatgtgcattggctgagccgactcgcgctccgctcctggcagtcaggctgggtcccctttaaatactgccacatctgagcgtggcagcagcgaggctcctgctagccccgcggcggcggctagatccggggtccagtttggggcggcgtgggagagggggccgtgggtgtcttctcctgtcccagggccaaaccccgaggagtcctcacctcaggacctgcttgagccgacttccactgagggagggggagcttcaggacgcctgctgtgttctccgtcctcctgttcagatccaattttggcccccttcgagtgaaataggatgggctcaccacatctggtgaggcaggcagggcctcgctgcagtgcagaatgatcccataggtctcaaggcctagtgtcagctgcaaattcacttatccatcagccctctgcctccctcctcctttgaaagagcagtggcctgccccgcttctaaaagccctggggttccggaaagcccaccgcgctttacaggacacctgcatagaggaacaggggcgaatccgaggtggagaccatgtgaccacgcgtggcactggcctatcccacagcagttggtgttaatgtgtgtcaccggaggcatacggggcgacggcgaaacaaagggtggtgtccaggcatgtgccggttgaatggggaaacagttgacctttccatcaatgccagggaaaatcgaagaacacctaggacccggggggtgggggtcctgtgcctgacccaagccacgttttcacatgcctaccagaggagcaaagaggtttctgcaaaattcgccccacccccaaccctccaccgccctggtagccctgacgcaacttaggctgcgcccagccacagccccagccccagccccagccccagcccagtccctttggttcccttacattcgtttcagccagaagatcaagggagtcagtccacccaggagcagaggagaggatgtccctcatgaatgagacaggaagtgcagaggaaatgcgacactacctttcctggaagacaaggccagtcatggtcgcctagcgctcattctaggcaatccacccaccatgaggggaaacgtggagaagaaggaagcttccctgcctgagacacgaatggaagccaggagctcccaggtcatgcgacctgcccaatcaagcagaaacaggtttggagagagaaacaatcacgacacggatctcgaagaaatgtctccctgacggactgggaagtcatctttgttgaagacattgggcgtcagcgagaggcattgaggcacttgagaaacaggtgaggcagagcaggagggaggacagggcagacgccggcggccaggcgggatatatcaccgttccactgccagggtcataagggatggggttccaaaagggtggcttgtccagagaggccagcattccagtgacagggactgttgccatctcccattcccggcttcctcttccagaccgtattgtggtgtggcttcatttctcagagaagagccgtgaaaagatacaagcatcttctctgacgtgggtccgctggtctccggcgggacaaagagctcctgtggggctcgtgtcctcgtctgcagtgtgttcatcttgatcctagaaaagagaccgctcaggatggggatatttcaattgctccgggaccgaagaatctcctcacgtgggccaggccttcacacacccaaagcggaaacgcgtcggcgaaaaggattgacaaccggtctcatgacccaggcagagaggcagaaacaggctcaccaaagacaggccgccatgcgagaaacagct

SEQ ID NO: 41885 - DNA, 2300 bp, Homo sapien
tccgggcaggcctgaggctgggatcctgtgctgcttccgccgtacccccctggggcttcctcatcctggtcggccctttgtgactcctggaatccggagacgttcacgtcgaccccgtggagaggtcaggccggagcctcacagccccgacacccaagcactgccacggagggctcctgctttgccaagcctcggggactggtttctaagacaaccgaaggaaccactgtgaagggagaagccactagagcctcgcgcatgcgcattggctgggacgactcgcgctcagctcctggcagtcaggctacgtcccctttaaatatcgccactgtcgcctggcggccgcgatgctcctgctgccgccatggcggcagctggatcctgggtcctgtttggggtggcgtgggagagggggccgcaggagtctcgtcctttcccaggcccaaacccccaggggtcctgtcctcaggacctgcttgagcccacttccaccgatggagggatggagggggagcttcaggactcctgctgtgttctccggactcccgttgagatccgattttggccccctccgagtgagataggatgggctcacaaaaactggtgaggccggcagggcctcgctgcagcacagaatgatctcataattctcaaggcctagagacagctgaaaattcactgatccatcagccctctgcctccctcctcctttgaaagagcagtggcctgccccactgctaaaggccctggggttccagaaagccgaccacgctttacaccacacctgcaaagaggaaaacaggcgaatccgagggggagaccatgtgaccacgcgtggcactggccaatcccacagcagttggtgtgaatgcgtctcaccggaggcatacggggcgacggcgaaacaaagggtggggtccaggcatgtgccagtggaagggggaaacgggtgacctttccatcaatgccaaggaaaatcaaagaacacctgggacccgggggtggggggccgcctgtgcctgacccaagccacgttttcaaatgtctaccggaggagcaaagaggtttctgcaaaattcgcaacacccccaatcctccaccgacctggtagccctgacgcaacttcggctggcacaaacccacagagagtgggaaagaaacacacagagactgagagacagagagagaagagagaatgggagacacacacacacacacgcagagtcatacagcagaggcattgaaacacacacccccaggcaacccctgaggctgcggggttctgctctggaggagaacgaccctcgggtgagagagcagcccaggggcacgcaggccgacccgtcctcgagatcacggacggcggcacgacttttagggagactcaccccaaccaacaccgtccgtgcaggcctgaggctgggatcccgtgctgcttcccccgtctctgcctggggtttcatcatcatggtcggccctttgcgactcctggcatccggagacgttcccttcgaccccgtggagaggtgaggccggagcctcagagcctcgacacccaagcactgccaccgagggctcctgctctgccaagcctcggggtctggtttctaagacaaccgtgggaaccactgtgacgggagaaaccgctcgcgcctcgcgcatgcgcattggctgagccgactcgcgctccgctcctgacagataggctgcgtcccctttaaatatcgctgccgccgcggcggcggctggatcctgggtcctgtttggggcggcgtgggagagggggccgcgggtgtctcgtcctgtcccaggcccaaacccccaggggtcctgtcctcaggatctgcttgagccgacttccaccgagggagggggagcttcaggacgcctgctgtgttctccggactcccgttgagatccgattctggccccctcccactgagataggatgggctcaccacatctggagaggccggcagggcctcgctgcagcacacaatgatcccataggtctcaaggcctagcgtcagctgcaaattcactgatccatcagccctctgcctcccacctcctttgaaatatcagtggcttgccccgcttctaaaagcccaggggctccggaaagccgaccgcgctttacaggacacgtgccaccaggaacaggggcgaatccgaggtggagaccgtgtgaccacgcgtggcactggcctaccccacagcagatggtgtggatgtgtgtcgccggaggcatacggggcgacggcgaaacaaagggtggtgtccaggcatgtgctggtgga

SEQ ID NO: 41886 - DNA, 2300 bp, Homo sapien
actgcaacactaataataaatggatcaattcaccagtaaacataacaattccaaatatatatgcaccaaataacaaagtcttaaacaacatgaagagaaaaattatagaactaaaaaataataaattatagttgtgggttttaacagccttatctcagcaattgatagaattattggacaaaaatttgacaatcagcaagcatgtagaagatctgtacagcacaatcaaccaacaagattttattcacacacacaaactcacacacacacacacacagacacacatatacagataaatatatgtcaattatatatatatctctctctaaatatagaatcagtccacaaaaaacagcagaatatacagtttttcaggagctcatgaaatattaactaaaatactagatgatttcttgcaccataaaacaaaccctgatacatttaaaagaatttatgtcatatagagtatgttctctgaccatagtggaattaaaataaaagtcagtaacagaaagagagcaggaaaatgtttaaatgcatttcaattatgcaacacagttccaaatgatctatggattaaatataaagtcttaaataaaaatctaaaaatatatttcaacaaatgaaagaaaatacaacatatcaaaatataggaaatacagctaaggctgtggtgggaaagaaatttatagtactaaatgcttcattaaaaataagaaaagatctcaaatcaataacttacacttgtatctcaagaaactagaaaaagaacagagtaaactgaaagcaggcagaagaagaaaaataatcatcacaataacaaaaattcatgaaattgaaaacagaaaaaaatgtgaaacaaaaagctggtttattgaaaaaatcaatcaattgataaacatctatcaaaaccgacaaaaataaatagagatgacacaaaacacaacagcaaattttttaaaaaatgcaaatgatccaattaggtaatggacaaaagacatcaatggacgttttaacaagaaaaatattcagatgtcaaataatccatgaaacatgttcaatattattaatcatcatggacatgtcaaataaaaccatagtgagatatttctacacacctatcaaaatgacttttaaaaattgtgacaatagcaaaagctattcaggatgtaaaaaatacgatcactcataagttgctagtggaaaagtaaaataatagagccactctgaaaaatagctgacagttttttaaaaagacagatatgttattcattctttccacattttttttctgtgtgtgctgattaaccttctctacctcctctccaatgccccagtatccttactagcttctgtgggcactcagtgtacccataaaattttaagaaaataattaaaaattttttaaagtaaaataaaaaccagatatgcatagaccatagatcccagcaattgcagttgtgggtgtttaatttggagtgatgaaactgtggtcccacaaaaacttgttcacgaatgtctacaacagcttaatttgttacagttgaaaaggtcaataagcccaggtgaatgtttaatttgtggtgaatttataccagaaaccatgaaatactactcagtcatcaaaggaacaaaatattaattaatgcaatcatttggatgtatttttaggaaattttgtcgagtgaataaaagtcaattatatacattatgtacaacagtacaagtaggccttgagacctacgggatcattctgtgttgcagcaaggccctgcctgcctcaccagatgtggtgagcctatcctatctcactcggaggggtccaaaatcggatctgaacgggagtctggagaacacagcaggcatcttgaagctccacctccctccgtggaagtcggctcaaggaggtcctgaggacaggactcctaggggtttggccctgggacaggacaagacacccgcggccccctctcccacgccgccccaaactggaccccggatccagccgccgccgtggcggcaggaggaacctcgctgccgccgcgcggcggtggcggtatttaaaggggacgcagccatactgccaggagcggagcgcgagtcggctcagccaatgcgcatgcgcgaggcgggagcggtttctcccgtcacagtggttcccatggttgtcttagaaaccagtccccgaggcttggcaaagcaggagccctctgtggcagtgcttgggtgtcggggctctgaggatccggcctcacctctccacggggtcgacgggaacgtctccggatgccaggagtcgc

SEQ ID NO: 41887 - DNA, 2300 bp, Homo sapien
accatcaaaatcccaaaggcatttctgcagaaagaaagaaactcattctacaattcatacaaaaattcaaaggatctgacagacaaaacagtcttgaaaaagaatattagaaaactcacatttttcagtttcacagcctactacaaatctacagtaatcaagagagtgtggtactggcataagactaatagacttttagaccaatacaacagaacagatttaagatcctacaaattagcgctcacatatatggtcaatgactgttcaacaagctgtccaagtctagtcaagggaggaaagaacagtctcttcaacagctggatgtcagtgcacaagagagaagttagacccctaccttgcagtatacacgaaaattaattctaaattaataaaagacttacatgtaaggactaaagtatgtaactcttagaagaaaacacaaggtaaacctttatgacctttgagttttaagtgtattttgaaatatgacagaaaagcacagataacaaaagaaaatacacgtaaattagatttaatcaaaataaaaaacctttatgcatcaaaggatactatcaagggagtgaaaagacaacccatagtatgtgagaaaatatgtatctgataaaatcaaagtgcgtatctgataaaagcttaatatcccacaactcaacatcagaatttctaacatcccaattaaaaaataggcaaaggacttgaatagacatttctccgaagaagatacacaaatgtgtaagacggataagaaaagatgctaaacactgttattcattaataaaatgcaagacaaaacccaaatgagataccactttgcatccactagtaaggctttcataacaacgacacagaaaatcaatgttgctaaggaggtggagaaattggagccctcatgaactggctgctaggaatagaaaatgatgcacttgccgtggaaaacaatttggtggttcctcacagaatcacacagagaaacaagagctgctggcttccgggttctcctgggctggcgcggtacgtcccggaatcgcaggcgcgcatcccttcccgcctgagggcctgcctggccgtgactcccgcccctcttctcctccgaagagacgtcggggccgctccaggggccgtccgcagccaccggggatggggctgagggtcggttcctgccccggtgcagccgccgccgagcagaccgcctggcttggccgcagccacggcgacatccatgcccgggtctgcgaggctgggcgcgccagccagcttgggagttgcctggcgcctgtagctgggcgcccaggtggtgagcatggcctgggcggcctctggatcgcaagtgcccctggcctgagagccccccagaccctgcccccgcccggctcctcctatgccagagctcgacacctctagccaagggccctctgcagccacgggggatagggctgagggccggttcccgcccccgtgcagctgctgcagggcagaccgcctggcttggccgcagccacagggacatctggccctcgttccgagatgtgggaagtgagggcggactcgggagttgcctggaggttgctgcctgcacacagaaggcggctgcagcttgggtgcccaggcgggctggaggtgcatggcctggtcggcctcgggatcgccagcgcgcccagcctgagggcccccaggctgtgcctcccgcccagtcctccacctgagggagatcggggccgttggtatgggccctcagcagtcaccccgtgtggggttgagcggcggcttctcagttctcgctcctgtgcagccgccaccgccgccggtcagaatgcctggcttggccgcagccactgggacacctggccctggttctgcgatgctgacagcgcgagcgagctcgggggttgccaggcagctgctgcctgcacacagagggcgactgcagcttgggcgcccagtcggcggagcatggtctgggtggccgctggaatgcgtgcgctcgaggcctgagggacccactcttggtgccatctgccctgctctgcgccccctctgcgcctgcgccccctccgcgcctgcgccggggctctgcgcctctctgcctttgcgaagggcgctctgcctttgctagggcggagctgccttctcctcagcacagaccgggagagcatcgcgagggcggagctgagttctcctctgcacagacttcggagatacagcgaaggcggagcagtgttcgcctcagcacagacccgggcgggcgggccgggggtaccgcgagggcggagctgcgttctgct

SEQ ID NO: 41888 - DNA, 2300 bp, Homo sapien
tgacccctaacccctgacacaaaccctaaccactatccctaaccccaaccctcaccctaacccaaccctaacccctaatccctaacccctaacatctcttaaaccctaactctaaacgttgactcctaacccctaactctgaccccaatccctatctccaacctctaaccctaaacttaacccctaacccctaaccctaacaccaaccttaaccctaggttcattactaagtttgtattgactatgtcaatgttgattattatgatggctgtctttggactgcacggcagcgaggggattgcggatcttatattaatatttttgtattgaggcagcgcattagcattacaggtgcttgttacatgagcaatgggggtgtcatattttgggtgtcatgtctgcattaggaatgccgcatttgtcttccgaggctgcggtgtggatctcgcactgcggccgcctcgccttggctggggagaacctcggtgggcaggattcagaggggcttttggtttcccgttttccacactgaacccttctaactggtctctgaccctgattattcagggctgcaaacaggaaggattttattcaccgttgatgcggccccgagttgtcccaaagcgaggcagtgcccccaaggtctgtgctgaggagaacgctgctctgccttcgcggtgtctcccgggtgtgtgctgagcagaacgcagctccgccctcgcggtacccccggcccgcccgcccgggtctgtgctgaggcgaacactgctccgccttcgctgtatctccgaagtctgtgcagaggagaactcagctccgccctcgcgatgctctcccggtctgtgctgaggagaaggcagctccgccctagcaaaggcagagcgcccttcgcaaaggcagagaggcgcagagccccggcgcaggcgcggagggggcgcaggcgcagagggggcgcagagcagggcagatggcaccaagagtgggtccctcaggcctcgagcgcacgcattccagcggccacccagaccatgctccgccgactgggcgcccaagctgcagtcgccctctgtgtgcaggcagcagctgcctggcaacccccgagctcgctcgcgctgtcagcatcgcagaaccagggccaggtgtcccagtggctgcggccaagccaggcattctgaccggcggcggtggcggctgcacaggagcgagaactgagaagccgccgctcaaccccacacggggtgactgctgagggcccataccaacggccccgatctccctcaggtggaggactgggcgggaggcacagcctgggggccctcaggctgggcgcgctggcgatcccgaggccgaccaggccatgcacctccagcccgcctgggcacccaagctgcagccgccttctgtgtgcaggcagcaacctccaggcaactcccgagtccgccctcacttcccacatctcggaacgagggccagatgtccctgtggctgcggccaagccaggcggtctgccctgcagcagctgcacgggggcgggaaccggccctcagccctatcccccgtggctgcagagggcccttggctagaggtgtcgagctctggcataggaggagccgggcgggggcagggtctggggggctctcaggccaggggcacttgcgatccagaggccgcccaggccatgctcaccacctgggcgcccagctacaggcgccaggcaactcccaagctggctggcgcgcccagcctcgcagacccgggcatggatgtcgccgtggctgcggccaagccaggcggtctgctcggcggcggctgcaccggggcaggaaccgaccctcagccccatccccggtggctgcggacggcccctggagcggccccgacgtctcttcggaggagaagaggggcgggagtcacggccaggcaggccctcaggcgggaagggatgcgcgcctgcgattccgggacgtaccgcgccagcccaggagaacccggaagccagcagctcttgtttctctgtgtgattctgtgaggaaccaccaaattgttttccacggcaagtgcatcattttctattcctagcagccagttcatgagggctccaatttctccacctccttagcaacattgattttctgtgtcgttgttatgaaagccttactagtggatgcaaagtggtatctcatttgggttttgtcttgcattttattaatgaataacagtgtttagcatcttttcttatccgtcttacacatttgtgtatcttcttcggagaaatgtctattcaagtcctttgcctattt

SEQ ID NO: 41889 - DNA, 2300 bp, Homo sapien
ctcaaccccttttacaatagctgcaaaaaacaaacaaacaaaacttaggaatatacctagcaaagtaatcaaaagacctctacaatgaaaattacaaaacactgctgaaagaaatcatagatggagccaagcacgttggcgcatgcctataatcccagctactcgggaaactgaggcaggagaatcgcttgaacccgggaggcagaagttgtagtgagccgagatcacaccattgcactcccacctcagcgacaagagcgaaactacctctgaaaaaaaaaaaaaaaaaaacaagaaagaaaagaaatcatagatgacacaaacaaatggaaacacatccccatgctcatggatgggtagaaccaatattgtgaaaattaccattctgttaaaggcaatctacgaattcaatgcaatccccatctgaataccaccatcatccctcacagaattacaaaaacaattctaaaattaatatggaaccaaaagaatgccatgtagccaaaccaaggctaagcaaaaagaacaagcctggaggcatcacactacttgatttcaaactgtacaataaggccatagttaccagaacagcatggtactggtttaaaaataggcacatagaccaatggaacagaagagagaactcagaaattaacccaaatacttacagccaactgatctttgacaaagcaaacaaaaacataaagtggggaaaggacacccttttcaacacatgaagttgggataattggcgagccacatgtaggggaataaaactggattctcatctctcaccttatacaaaaatctactcaagatggattaagaacttaaacctaattcctgaactgtaaaaattctagaagataacactggataaacccttctagacattggcataggcaaggatttcatgaccaagaacccaaatgcaaatgcaataaaaacaaagataaatagctgggacttaattaaactaaagagcttttgcatggcaaagggaacagtcagcagagtaaatagacaaatcgcagagtgggacccctgaccctgacccctgaccctgacccctaaccactgaccctgacccctaacccctgacacaaaccctaaccactatccctaaccccaaccctcaccctaacccaaccctaacccctaatccctaacccctaacatctcttaaaccctaactctaaacgttgactcctaacccctaactctgaccccaatccctatctccaacctctaaccctaaacttaacccctaacccctaaccctaacaccaaccttaaccctaggttcattactaagtttgtattgactatgtcaatgttgattattatgatggctgtctttggactgcacggcagcgaggggattgcggatcttatattaatatttttgtattgaggcagcgcattagcattacaggtgcttgttacatgagcaatgggggtgtcatattttgggtgtcatgtctgcattaggaatgccgcatttgtcttccgaggctgcggtgtggatctcgcactgcggccgcctcgccttggctggggagaacctcggtgggcaggattcagaggggcttttggtttcccgttttccacactgaacccttctaactggtctctgaccctgattattcagggctgcaaacaggaaggattttattcaccgttgatgcggccccgagttgtcccaaagcgaggcagtgcccccaaggtctgtgctgaggagaacgctgctctgccttcgcggtgtctcccgggtgtgtgctgagcagaacgcagctccgccctcgcggtacccccggcccgcccgcccgggtctgtgctgaggcgaacactgctccgccttcgctgtatctccgaagtctgtgcagaggagaactcagctccgccctcgcgatgctctcccggtctgtgctgaggagaaggcagctccgccctagcaaaggcagagcgcccttcgcaaaggcagagaggcgcagagccccggcgcaggcgcggagggggcgcaggcgcagagggggcgcagagcagggcagatggcaccaagagtgggtccctcaggcctcgagcgcacgcattccagcggccacccagaccatgctccgccgactgggcgcccaagctgcagtcgccctctgtgtgcaggcagcagctgcctggcaacccccgagctcgctcgcgctgtcagcatcgcagaaccagggccaggtgtcccagtggctgcggccaagccaggcattctgaccggcggcggtggcggctgcacaggagcgagaactgagaag

SEQ ID NO: 41890 - DNA, 2300 bp, Homo sapien
gagatacagcgaaggcggagcagtgttcgcctcagcacagacccgggcgggcgggccgggggtaccgcgagggcggagctgcgttctgctcagcacacacccgggagacaccgcgaaggcagagcagcgttctcctcagcacagaccttgggggcactgcctcgctttgggacaactcggggccgcatcaacggtgaataaaatccttcctgtttgcagccctgaataatcagggtcagagaccagttagaagggttcagtgtggaaaacgggaaaccaaaagcccctctgaatcctgcccaccgaggttctccccagccaaggcgaggcggccgcagtgcgagatccacaccgcagcctcggaagacaaatgcggcattcctaatgcagacatgacacccaaaatatgacacccccattgctcatgtaacaagcacctgtaatgctaatgcgctgcctcaatacaaaaatattaatataagatccgcaatcccctcgctgccgtgcagtccaaagacagccatcataataatcaacattgacatagtcaatacaaacttagtaatgaacctagggttaaggttggtgttagggttaggggttaggggttaagtttagggttagaggttggagatagggattggggtcagagttaggggttaggagtcaacgtttagagttagggtttaagagatgttaggggttagggattaggggttagggttgggttagggtgagggttggggttagggatagtggttagggtttgtgtcaggggttaggggtcagggtcagtggttaggggtcagggtcaggggtcagggtcaggggtcccactctgcgatttgtctatttactctgctgactgttccctttgccatgcaaaagctctttagtttaattaagtcccagctatttatctttgtttttattgcatttgcatttgggttcttggtcatgaaatccttgcctatgccaatgtctagaagggtttatccagtgttatcttctagaatttttacagttcaggaattaggtttaagttcttaatccatcttgagtagatttttgtataaggtgagagatgagaatccagttttattcccctacatgtggctcgccaattatcccaacttcatgtgttgaaaagggtgtcctttccccactttatgtttttgtttgctttgtcaaagatcagttggctgtaagtatttgggttaatttctgagttctctcttctgttccattggtctatgtgcctatttttaaaccagtaccatgctgttctggtaactatggccttattgtacagtttgaaatcaagtagtgtgatgcctccaggcttgttctttttgcttagccttggtttggctacatggcattcttttggttccatattaattttagaattgtttttgtaattctgtgagggatgatggtggtattcagatggggattgcattgaattcgtagattgcctttaacagaatggtaattttcacaatattggttctacccatccatgagcatggggatgtgtttccatttgtttgtgtcatctatgatttcttttctttcttgtttttttttttttttttttcagaggtagtttcgctcttgtcgctgaggtgggagtgcaatggtgtgatctcggctcactacaacttctgcctcccgggttcaagcgattctcctgcctcagtttcccgagtagctgggattataggcatgcgccaacgtgcttggctccatctatgatttctttcagcagtgttttgtaattttcattgtagaggtcttttgattactttgctaggtatattcctaagttttgtttgtttgttttttgcagctattgtaaaaggggttgagttcttgatgtgattctcagcttggtagctgttgatgtatagaagagctactgatttgtgtacattaatctcgtatctggaaactttgctgaattcttttatcagttctaggagctttctagaggagtccgtagggttttcaaggcgaaagatcatatcgtcagcaaccagtaacagtctgacttcctcttcaccgatttcgatttcctctatttccttcttttgtctgattgctctggctaggacctccagtactatgttgaaaaggagtggtgagagtaggctcttcgtcttgttccagttctcaaagggaatgctttcaccttttccccattcagtattatgttggctgtgggtctgtcatagatggcttttattacattaaggtatgtcccttgtatgcctattttgctgagagctttaatcata

SEQ ID NO: 41891 - DNA, 2300 bp, Homo sapien
gagacggacagtgatgtccaggcctgcgcccgggggccactggagacctgcccctcaaagcggaggaaacgccaagctcacctgaaaacctgcgagacagggcctgtgcacgagtccagtactcctacttcgccaagtctcagggacccatccccgagcaacggtggcggcgcagagaagagcacggcgccggcgcaggtgcagagagacaggaggctgatggggggaagttgaggcacctggggcagagaaaaaaatgcattgccaagaggtttctgggtcatctactgacgaaaatgtcttcccatcagcccttgcgctggtccccagggaccctggcatccgtcgttggcgcccagggtgcgcgtcgggccactaggggtaccccaactcggacagaaggcccatgagttgaatttgaagtttgtgggaatagaggtgaggcaccaggggcagaaaaaaaacaggagacctcgcctcagacaagcggggcctgggtcccccatggatgaaagtgccttcccattatgctgtaccctgggcagagtggacagtgacgaccctggttcgagcccagggtgcgcttcgggaccgcttgcggttaccagaaagtgaacaaatggtccatgagcggaaggtgaggcacctgaggcagagaaagtaaagaaacgcgccgccgagaagcagtgcctgggtccctcacggaggaaattgtcttctccttagcccgttcgcttggcagtgaggtccctggcgtccctggtttgatcccagggtacgcctcgggccactagtgttaccccaaggtgggcagaaagcccataaggggaaggcgaggcacctggggcagagaaaaaaaaaacttcgccgcagagaagcgcggcctgattccccacggacgaaagtgtcttcccatcagtccctgcactgggacccggggaccctggtgtccctggttcgagctcagggtgtgcctcagccgctacgtgcaccccaaggggagctttgggagcacaaagcccatgagggaaagtgagttttgagggaggagtggtgaggcacctgtcacagaaaaagaaaaaaaaacaacccgcgccacagagaagcagggcctgggtcccccacgatgaaaatgccttcccatcagctcctgctctgggccctgtggaccctggagaccctggttcaagccacgggtgggcctcgagcccgctaggggtacccccgtgcgcctctctgcgcctgcgccggcgccctgtgcctttgcgagggcggagctgccttctcctcagcacagacccggagagcattgccagggcggagctgagttctcctctgcacagacttcggagatacagcgaagcggagcatgttctcctcagcacagacccgggagggcgggccaggggcaccgcgagggcggagctgcgttctgctcagcacacacccgggagacaccgcgaaggcagagcagcgttctcagcacagaccttgtgggcactgcctcgctttgggactactcggagccgcatcagtggtgaataaaatccttcctgtttgcagcccttaataatcagggtcagagaccagttagaagtgttcagtgtggaaaacgggaaaccaaaagcccctctgaatcctacccaccgaggttctccccagccaaggcgaggcggccgcagtgcgagatccacaccgcagcctcggaagacaagcgggcagaaatcccatgaggggcagttgaggtttgaggaaggcgaggtgaggcacctgtggcagaaaaaaaaaaaaaccgcaccacggagaagcagagcctgggtccccaacggacaaaagtgtcttcccattagcccttgcgctgggcccaggtgaccctggcattcctggttcgagaccagggtgcgcttcaggccgctaggggtgcccaaaagcgggcagaaggcccatgaggggaaggtgatgcacctggggcagagaaaaaaaaaaaaaaaaaaaaccgcgccgcctataagcggggcctggctcccccacagaagaaactgtcctcacatcagcgcttgcgctgcgccccagggaccctggtatccctggctcgagcccagcgtgcgcctcggcctgctaggggtaccccaaggcagacagaaggcccatgagggaaaggtgagacacctggggcagagaaaaaaataaaaaaactgcgccgcccagaagtggggcctgggtcccccacagacgaacgtccctacccatcagccctgaactgggccccggagaccctagcgtccctggctcgaaaccag

SEQ ID NO: 41892 - DNA, 2300 bp, Homo sapien
atgcgcactggcgaggccgactcacccgccccaccccccttactcggcagagtcaggctgcggaccctttaaaaaatggcggcgacgcggcggctgcggggactggtgcggcggtgctggaggttgcggcggcggctgcggcgcagccccgggcggcgggtgggaagaggactaccagaggggcctgcgggagacccagggtcggacccataggagtcctgtcgtcaggacctccttgatcggtcttctgcttgggttctcggtgaaggaggagcttcgggtgttggctgggctgcgcggactcctcttgggatccgatgatggatcccacccggtgatcgggaatggggttacaatgcagtgaggcggaaaggctctcgccggggcacagaaagatccccagggccgcaaggcgtgctgtcgcctgcaaaggcactgacccacgagcccactgcctccctccttcctgggtggagcaggggcctgccttcatctccaaggcccgggggctccggcatctcgacgcggcttctggagacacgggcaaagagagacagaggctagtccgagccggagccagtgtgaccacacgtggcactgacgtcccccaagagcacatgcagtgagcctgtgtctctgaggccgtagtgggcgacgacgagacggacagtgatgtccaggcctgcgcccgggggccactggagacctgcccctcaaagcggaggaaacgccaagctcacctgaaaacctgcgagacagggcctgtgcacgagtccagtactcctacttcgccaagtctcagggacccatccccgagcaacggtggcggcgcagagaagagcacggcgccggcgcaggtgcagagagacaggaggctgatggggggaagttgaggcacctggggcagagaaaaaaatgcattgccaagaggtttctgggtcatctactgacgaaaatgtcttcccatcagcccttgcgctggtccccagggaccctggcatccgtcgttggcgcccagggtgcgcgtcgggccactaggggtaccccaactcggacagaaggcccatgagttgaatttgaagtttgtgggaatagaggtgaggcaccaggggcagaaaaaaaacaggagacctcgcctcagacaagcggggcctgggtcccccatggatgaaagtgccttcccattatgctgtaccctgggcagagtggacagtgacgaccctggttcgagcccagggtgcgcttcgggaccgcttgcggttaccagaaagtgaacaaatggtccatgagcggaaggtgaggcacctgaggcagagaaagtaaagaaacgcgccgccgagaagcagtgcctgggtccctcacggaggaaattgtcttctccttagcccgttcgcttggcagtgaggtccctggcgtccctggtttgatcccagggtacgcctcgggccactagtgttaccccaaggtgggcagaaagcccataaggggaaggcgaggcacctggggcagagaaaaaaaaaacttcgccgcagagaagcgcggcctgattccccacggacgaaagtgtcttcccatcagtccctgcactgggacccggggaccctggtgtccctggttcgagctcagggtgtgcctcagccgctacgtgcaccccaaggggagctttgggagcacaaagcccatgagggaaagtgagttttgagggaggagtggtgaggcacctgtcacagaaaaagaaaaaaaaacaacccgcgccacagagaagcagggcctgggtcccccacgatgaaaatgccttcccatcagctcctgctctgggccctgtggaccctggagaccctggttcaagccacgggtgggcctcgagcccgctaggggtacccccgtgcgcctctctgcgcctgcgccggcgccctgtgcctttgcgagggcggagctgccttctcctcagcacagacccggagagcattgccagggcggagctgagttctcctctgcacagacttcggagatacagcgaagcggagcatgttctcctcagcacagacccgggagggcgggccaggggcaccgcgagggcggagctgcgttctgctcagcacacacccgggagacaccgcgaaggcagagcagcgttctcagcacagaccttgtgggcactgcctcgctttgggactactcggagccgcatcagtggtgaataaaatccttcctgtttgcagcccttaataatcagggtcagagaccagttagaagtgttcagtgtggaaaacgggaaaccaaaagcccctctgaatcct

SEQ ID NO: 41893 - DNA, 2300 bp, Homo sapien
ggcccgccctcccgggtctgtgctgaggagaacatgctccgcttcgctgtatctccgaagtctgtgcagaggagaactcagctccgccctggcaatgctctccgggtctgtgctgaggagaaggcagctccgccctcgcaaaggcacagggcgccggcgcaggcgcagagaggcgcacgggggtacccctagcgggctcgaggcccacccgtggcttgaaccagggtctccagggtccacagggcccagagcaggagctgatgggaaggcattttcatcgtgggggacccaggccctgcttctctgtggcgcgggttgtttttttttctttttctgtgacaggtgcctcaccactcctccctcaaaactcactttccctcatgggctttgtgctcccaaagctccccttggggtgcacgtagcggctgaggcacaccctgagctcgaaccagggacaccagggtccccgggtcccagtgcagggactgatgggaagacactttcgtccgtggggaatcaggccgcgcttctctgcggcgaagttttttttttctctgccccaggtgcctcgccttccccttatgggctttctgcccaccttggggtaacactagtggcccgaggcgtaccctgggatcaaaccagggacgccagggacctcactgccaagcgaacgggctaaggagaagacaatttcctccgtgagggacccaggcactgcttctcggcggcgcgtttctttactttctctgcctcaggtgcctcaccttccgctcatggaccatttgttcactttctggtaaccgcaagcggtcccgaagcgcaccctgggctcgaaccagggtcgtcactgtccactctgcccagggtacagcataatgggaaggcactttcatccatgggggacccaggccccgcttgtctgaggcgaggtctcctgttttttttctgcccctggtgcctcacctctattcccacaaacttcaaattcaactcatgggccttctgtccgagttggggtacccctagtggcccgacgcgcaccctgggcgccaacgacggatgccagggtccctggggaccagcgcaagggctgatgggaagacattttcgtcagtagatgacccagaaacctcttggcaatgcatttttttctctgccccaggtgcctcaacttccccccatcagcctcctgtctctctgcacctgcgccggcgccgtgctcttctctgcgccgccaccgttgctcggggatgggtccctgagacttggcgaagtaggagtactggactcgtgcacaggccctgtctcgcaggttttcaggtgagcttggcgtttcctccgctttgaggggcaggtctccagtggcccccgggcgcaggcctggacatcactgtccgtctcgtcgtcgcccactacggcctcagagacacaggctcactgcatgtgctcttgggggacgtcagtgccacgtgtggtcacactggctccggctcggactagcctctgtctctctttgcccgtgtctccagaagccgcgtcgagatgccggagcccccgggccttggagatgaaggcaggcccctgctccacccaggaaggagggaggcagtgggctcgtgggtcagtgcctttgcaggcgacagcacgccttgcggccctggggatctttctgtgccccggcgagagcctttccgcctcactgcattgtaaccccattcccgatcaccgggtgggatccatcatcggatcccaagaggagtccgcgcagcccagccaacacccgaagctcctccttcaccgagaacccaagcagaagaccgatcaaggaggtcctgacgacaggactcctatgggtccgaccctgggtctcccgcaggcccctctggtagtcctcttcccacccgccgcccggggctgcgccgcagccgccgccgcaacctccagcaccgccgcaccagtccccgcagccgccgcgtcgccgccattttttaaagggtccgcagcctgactctgccgagtaaggggggtggggcgggtgagtcggcctcgccagtgcgcatgcgcgaggcccgagccgccgctttggtcacagtgaccgccaccgttgcccgggtatgggtccctgagacttggcgaagtaggagccctgtgtgatcgtgcgtcagagtcggggctgagaccagccctggccagggcagttaccaggacggtctccggaggccgggattcgcggagggtccaccagcaggaagaaaccccaggaggaagaaacctcagacagatcgccggggaggcag

SEQ ID NO: 41894 - DNA, 2300 bp, Homo sapien
atcccagtgtctaagacctgcaaaaggataaataaaattgcttgtaccatctatgtttattttgttcccaatcacaaaggaaatatttgaacattccattgttaagtgttataatttcaatagaacttttgaaaacaaatgttatcagttaaactagattctcttttaatttcgggttgttaaaatgtatgactttttaagaaaataaaattaaatatgcttataatattgttaagttatttgttgtggtgtatcatattaattgatacctttacatgaggccattattgcttcccagggtttcttagaataaacattggctgtgatgtcttacattttaatgcattgcttatttctgcatggaacttttttaagttttccttcaatattttcataaattacattggtgtttaatttactttccctttactatccttgtcaggttataatatcagagtcataatagcataataaaataaaatagagtatgttctttcctgtttcatgctcagaaagaattgtatgtaagattggaattattgttttgtttcatgtttgaaacaacttgccagtaaagtcatcatggcttgaaattatctttatgatatgatttctgactactgattacatgcatttgttgtagcacaattcagatttttcttttcactttaggttacttttggaaaaatgcatgtttcaagtaattgtacacattttacatatatttccaaatttattgaattaaacgttttcatactacactaatttaccttcttgatatttgtattatttataacaaaactcaataaactgtggcaaataagccagacagtatttataaataaagtattactggaacactgtcatgctcattcattgacatactgtcaatttatgccacaacaatagaattgattagttgcaacaaaccatatagcccaaaaacctaaaataattaccaacagatcctttccaaaaaacaaaaaaaattcttgacacctgatgtataattatttcctattttgattcctgagatggcatacttgtttcttctcttaattttatcaagccatttctccagagttttgttattgtatggctcctacaacaactaacaaacttttggccatatttcttgacttttctttccctgtattcttaatcactatgcatgtatttattatttccttttatttctgttgatatttctaacttctaccaataaattcaaaacattttaaaaattaatttgttgtcctcataaaataagaatttaaggttctacattttcctctaaaatgacacattttataatgtagtatacattttttaattaaaaatattttataatttccattatgatttgctcttgggtgttgagttactaagaagtatatttctgaggtttttcttcaatatgactgactatagatatttgactctagttattctcagaaagagaaagcaaagttatggataaataatcgttaattccaatatctatatagacggaagtgtgctagagcaccacaagaagaaatttgaacacagaaaaataaggaagcaagaacccagcagacattatactctgagggacttgatgttccatggaaaagcacaggtgggggtgtcttttgctcttctcacctctgcggcagactgcttgtttctgaactgttggagagccctccattctcacaagcccaagcactggtgtgggccgcaatcttggaacaaattgaggacagagaacaaggctactatttcctgcagtgccacttgcccttcacccagccccaagatgaggtggtgggcaccatactggatatgcctctgtggtggacttctatactgcctttgagtgagagagaggcttgccccatccccttgccggcttccttctccgtccctgcgtcgagctgtggctagatttctccatgagggcagagggcagggcaagaggcgtgagaagcatcttctggaaggtctgcgggcaccctcctgcgggtggacaatgagcgcctgggaggccgttgtccttggttggggagcggtcgtctggatctagcctagcaaagaggctgctccggatggggagggaatgaaaacccctgcggctccgacgcagatgcccacgttgcccaggccttcacagacccccaagccggaaccgccgggaaaacgattgccaaccggccacaacacccaggcagagacgcggggagaggctgaccagaagaaaggccgacgtgcaagaaacccagcctccggcgcacagggaacatgtgtcccaaggcgca

SEQ ID NO: 41895 - DNA, 2300 bp, Homo sapien
aagttggattgtagagatggctgcacaactcagtaaatgtactaaaaatcttttaacttaaaacagatacattctatagtatgtaaattatatttcaacaaagctgttttaataaaaaaaggaaaaatgtgtttactatatcggcttagaaacatgcctcatttctaggaaataaaagatagaggtgagagatgatttactttgagaaaagacattgtgtcacctatgaaattttattaggcacagagtcatattttaaggtagatagttctgtattgctgaaatagtaattttaatgtctttatgttgccacatgttaagaccataatgtagttataaatggaaatgtttacacctgaagtgagtattttcaaattaaaatttaattaagtgattttcttcgacacttaattctagattccccagatgaattgaagtgtattgctgtgtcttgtaataccttgctttaactagctttttatgtattttagttggtatagctttgttattattcatattaacaaatctgaaaatatgtcaaattacgtgtttttatgaccatgtaatgttttaaaggcacctacttgttataaaatcataatttaggataaatgtggtaaaacttagcaaaactatatttggtttagttttcccactggtatttatagtttactttgaatatttatattaataattagctcataatttttattgcaaggctcaatgactgtcattggaatataattttgttcagtacaaagatacttgtagctgtctgtgatttacgagttaggcactacatctccattttcagactgaggggtggcaggcttcacatacagtgggaatggagtaattacaggagggagttgtaggagctttgaagtcagagagggaggtagaggcctttttacctagggcctcaaaggccattggaattttacttttattctgagataggaatctgttggaaggatttgaacaggtgattgaatatgttaggaactttgaggctgagttgagcttctgagatgattgaatgttggaatgaatctgttgtgtaagtaagagaataccaatttggcaggaagagaacatattctgcatccctcactgaattcagtaataaataaaaatgtgtacatgtgattaaaagaaggtgaattgatatgtgtggtgataattttcaaagtagatatgttagaattaaacattattaacataatttaataaggcagtttataaaatcagtaacaaatattttatcaggtggttgtgagacaacttcaacaagaagtggctgacagcgtaaaaaaattaacgacgttagagtctccactggaaggtatatcacgttgtcacattaatttggatgagacacaggcctcaaataagaaattatttcaagtgaaaagtcaaatatgtatggaatttaacatgtcaacagttattctgtagctagttgaattatataacgtgttttaggatactaattttggcagaagcttgattttttattttcattataatgaatgatttccattttactatctttataatgtactatttttttatattgtgactttcattataccattttgaaaaaccattgcataccttttctcttacaatatgtacccttggaaaagttgagaattatacatcattcctcatagaaaattgacttttttcctgttaaacagtatttttaagtaatttgtgtattgctctgatgaggcaagccagattaaatcagaggagaatgtttcatggaatgttccagaaaattgtcttatttcttcacttttgtgaatggacacagaatctgtgtctatttgtttcacagattctaggttaacttgtacagaaaggccattatactattctttgaaatgtgcatgttttaggttaatttacaaactatttgaaaagttaggcattttctttatcttttatttaaaatatactgtaaaactgtagaaatatttagatttgatatagcatgtacatcaaaaattaagagttgagaaaattatcttgatcctgcctttggattttaaaaagattcactgagatgtcattcacatatcagacagttcaaccatttaaaatgtacaactcagtgtctattagtatgttcacagcattttcgtcaccctgaaaagtgaccccacatctcctaggcatgactgcagccttcctccatgtccctccacctacccctgttgtaggcaaccaccgtctacttttgtctccatatgtttgcctgttctgcatatttcatatacatagagttatac

SEQ ID NO: 41896 - DNA, 2300 bp, Homo sapien
ccggcaggcagaggttgcagtgagccaagattgtgccattggacaccagcctgggcaaagaagcgagactccgactcaaaaaaaaaaaaaaagaatataatgaattccctataaaatgaaaacatacttttcatctgaaaaaatatatatatataatatagtaaatatttttcaagtaagctctcttatctgagaacttttcgcccactgaaacaactcacggttatttttgataggggaacaagtactctcattaggcacctcctataatgtatataaaccatgttttaaacgtgtacgttaaaaataacaacgctgtatatgcttaactttgtgagttaaatcactcaaattctccaactgctccagccagggaattatgagggatggaaaacagatgagagtccgtttggctccgccgctccgagggtgcccggcgccctgcacggccccgtcccagggtctgcggggaagccgggcctgggggccccctcccacccccggctgagcccccgctacctgtgctgcttgtccagggcgtccaggtctccgctcctgcgcgccaggcagcgctccacctccgcggcgtcgcctttgacagctgccctgtggatcttctgcagttcggagtcccggattcggtatccggaacccgtgtagacgtggtctatggagccctgggccgtctggcccctgcggctcccgaagccgaataacttcatattggtgacttcttctcagacccccaaccaccggctcttgagcgagggcagctccctgtcaccttttcaccacccccctccccgaccccggccgacccagccccaaatcccctatccaaccccaaagccccgatccaaccccaactccgctatttcaaatctataatctactccacaatccgcgatccagcccggtccaccacagccttcagcagcgacactcgcagcctccgacctctcagaccgagtgagcctcgcaaagccgttgggcgcgcgcctgcacggcagttgctgccgggctcccagaagacgctccctggcggcgcgcgcctgcaccgcggttgctgccgggctcccggaagacgctccctagaggcgcgcgccagcaggtggggctgcagctccgggcgtgcgccgatgggctcgccggttctcctgggatcgcccgggcggccccaggatcgcaggcgcgcagccagcccggcctgagaaggagggcctgtctggccttgcagcccgccccgctcctcctcggaagggagatacggtgctggcaagggcactccgcggccacctgagtggcttcgcggattggctgaacgctgaggctctggccctgaaatctgtgtggctagtgtcaggtagctggagagggatggaggcagagtcaggggctgctccttcccccacccgccctcactgctgccagtgccacacgcgcggtttgcagctgcagatctggcactggcgcaggttggcggagcttcctttggatggcctcagggccgcagagcgcacagcccacctggcctcaaggtccgctcctcttggacatctttctggatcctgggccctggcgctgggcactctgtgtccacacggatgaaacagcggctgctggcggggccggttgcctgattttgccgcctgggggtctggcctcaggatccacgctactgcggggcgggcctggtctggagtgtccagtcacttgctgccggtgcaccacgtctagactgcagctgcggctccgatgccggcgtgagctggcgggcctggtacctgatgtcctcagggtcaagtgcatcgccctcccacttgagaggttgctctgacttggcctcctccaagaacgcaggggccgccgggactggctcttcgtggtaaccgggatggtaccgagcagcaggttttcaccctggtgccactgctgtgcggactgcctgacttgggcgcccaggcacccgccccagggtccgcgcggcaggtgtgcaggtagggtgagtggcgcggagggttgggggttgctccgtcatctctgcccgtgtgcaacttgcagttttgcagttttctgcagcagctgaggcgctggcgcgggaaggcggagctcccctggatggcgtcaggtttgcgggcacagagcacagcccaccaggcctgaaggtccgctcaggggccatagtggttgagttctctgtggaactgggatggggtgaacagccagttcccgtcctttggccgcctggccaactgccagacttaaccgctgccgcccaggcatctgtctctagcgttgcc

SEQ ID NO: 41897 - DNA, 2300 bp, Homo sapien
tgtctatcaatagtggaatggattaaaaacaaaacaagcaaaggcctcaaacctgtggtatagtcataaaattgaatattacaaaataatgaataatcaataggagcaaaatgatgtgtcacaagcatgtttagtgagtgaacataaaaattatataatttatagtttcacttacataaatggtgaaaacagacaaaactaaccttttgtggaaagaatcaaaaccgtggaagcctctgtgttcaaatactgactggaaatgagcaggagaaaacatgtttctgccagatcttctatatgcctgatgtgcattcactcgatgtattttgcgtatactatttttgcaaataaaactgagataaaggcaaaataactcaagagaaaataggtagaaataggtagagttgggatagaagccttggaagctacccctgtaccttgcccacctggcacaggccgaggaagtcctgggacaatgctgtgagcgacctgagggccgtccaggggagccccgccagcccatgctggcgcccgagctgcccgccgccatctgaatatgttgcaaagacagtgctggcttggcaaccggtgacgctccacgccccaccccgacccccacttctacccaagtagtggcaacgctagagacagatgcctgggcggcagcggttaagtctggcagttggccaggcggccaaaggacgggaactggctgttcaccccatcccagttccacagagaactcaaccactatggcccctgagcggaccttcaggcctggtgggctgtgctctgtgcccgcaaacctgacgccatccaggggagctccgccttcccgcgccagcgcctcagctgctgcagaaaactgcaaaactgcaagttgcacacgggcagagatgacggagcaacccccaaccctccgcgccactcaccctacctgcacacctgccgcgcggaccctggggcgggtgcctgggcgcccaagtcaggcagtccgcacagcagtggcaccagggtgaaaacctgctgctcggtaccatcccggttaccacgaagagccagtcccggcggcccctgcgttcttggaggaggccaagtcagagcaacctctcaagtgggagggcgatgcacttgaccctgaggacatcaggtaccaggcccgccagctcacgccggcatcggagccgcagctgcagtctagacgtggtgcaccggcagcaagtgactggacactccagaccaggcccgccccgcagtagcgtggatcctgaggccagacccccaggcggcaaaatcaggcaaccggccccgccagcagccgctgtttcatccgtgtggacacagagtgcccagcgccagggcccaggatccagaaagatgtccaagaggagcggaccttgaggccaggtgggctgtgcgctctgcggccctgaggccatccaaaggaagctccgccaacctgcgccagtgccagatctgcagctgcaaaccgcgcgtgtggcactggcagcagtgagggcgggtgggggaaggagcagcccctgactctgcctccatccctctccagctacctgacactagccacacagatttcagggccagagcctcagcgttcagccaatccgcgaagccactcaggtggccgcggagtgcccttgccagcaccgtatctcccttccgaggaggagcggggcgggctgcaaggccagacaggccctccttctcaggccgggctggctgcgcgcctgcgatcctggggccgcccgggcgatcccaggagaaccggcgagcccatcggcgcacgcccggagctgcagccccacctgctggcgcgcgcctctagggagcgtcttccgggagcccggcagcaaccgcggtgcaggcgcgcgccgccagggagcgtcttctgggagcccggcagcaactgccgtgcaggcgcgcgcccaacggctttgcgaggctcactcggtctgagaggtcggaggctgcgagtgtcgctgctgaaggctgtggtggaccgggctggatcgcggattgtggagtagattatagatttgaaatagcggagttggggttggatcggggctttggggttggataggggatttggggctgggtcggccggggtcggggaggggggtggtgaaaaggtgacagggagctgccctcgctcaagagccggtggttgggggtctgagaagaagtcaccaatatgaagttattcggcttcgggagccgcaggggccagacggcccagggctccatagaccacgtctacacgggttccggataccgaatcc

SEQ ID NO: 41898 - DNA, 2300 bp, Homo sapien
gtgtgacaagcatgaagaataccctcagcagaaactgactatgtgtatgctgatcgtgtacttcttagcctccaaactatgcggaaaacattttgttgtataagacaccaagtttattgcattttattacggcagcctgagcagtctaacaagaaagcaataaaaagtataagtaattaagatgaaactaaatttatcatccaaattctcaccataaagaaataaccattttcaaaataggtagaacaagattttacatattttcctaaagtttatagacagagataattgataaagattttatacaaactgactattaagaaatgattgtatttaattataacagaagataaaaataattttgtatagagaaactgattaacgtttatgcatatttgttcctaaagtacattcaaagttaagagaacagattataaaatcataacttagagttcttatagtataggtttcttacaagaagggaagaaagcaaaataaatttaacacaactaaagcagatcttgcagaatgtgattcatatatggacatgagtcagcttcctaaacttgaatctcagtgttatatagatgaacccactcagacagaaacaacattgaactagaacagaactcctttgacaggcaatgcacatgtttttaggagagcagactgtaagctttctctgagcctcagagaggcagaaggtaagaatgattctggggtatgcatcctcaagtttttgtttaaactctctgaataagtacctcataccattttgccggggcaaagtgagtggatggggaaagcaggccaagggcattatgtgaatgggtcacttcaaagggaaaaacatatctgaaacatggtagaagcaccccataactaactactttttcatgcctttggcctattggacttaaccattatagcaatgatgactcaaaaactacattaaagcagtgttaagaggaacattgacggtgctaaatgcattcatcagggggacaaaaaggtctcaagttaatgacctaacatagcaactaggggaattagaaaaaaagcaacagaaaagacccaaccccaaagctagtagaagaaaaaaaataactgaagtcagagaactgaaaaaaaattgttatctaaaagtccacacaaaagatgaagccaagagttttttttaataaacaatactgatagatcattagctagattagcaaagaaaaagagaagatccaaataagtataatcagaaattataaagattatattaaaattgatcccatgaaaatacaaaagatatgcagagactattatgagcacctctctgcacacaaatctagaggaaatgaataaattcctggaaacacacaatctcccaagactgaatcaggaagaaagtgaaaacctgaacggaccaataggaagtttggaaatggaattagtaataaaaacctacgaaaaaaaataaaataaaagccccgtaacaggtggattcacagctgagttctatcagaggggcaagggagaaatgataccaatcctactgaaatgtctccaaaaaatcaaggaggaggggcttctatctaactcatactacaaagccagcattaccctgttaccaaatctggcatagaccacggaaaaagaaaagagaaaactacagatcaatatctctgatgaaaatacaagcaaaaattgtcaaaccaaatccagcagcacatcaaaaagttcattcactatgaccaagtagggtttattcctgggatataaagttgattcaacatatgcaaattgataaatgtgattcaccacataaacagaatcaaaaacaaaaaacataggatcatctcaatagatacagaacaagccatcaataaaattcaacattccagccaggcgcgggggctcacgcctgtaatcccagcacttcgggaggccgagacgggcggatcatgaggtcaggagatcgagaccacggtgaaaccccgtctctactaaaaatacaaaaaattagccgggcatggtggcgggcgcctgtagtcccagctactttggaggctgaggcaggagaatggcgtgaacccgggaggtggagcttgcagtgagctgagatctcgccactgcgctccagcctgggcaacagagtgagactccatctcaaaaataaataaataaataaataaatgaaattcaacgttccttttatgataaaaaccctcaacagattaggcattgaaggaacatacctcaaaataataaaactatctatgacaaacccacagtcgccatcaaactgaaca

SEQ ID NO: 41899 - DNA, 2300 bp, Homo sapien
atcccagtgtctaagacctgcaaaaggataaataaaattgcttgtaccatctatgtttattttgttcccaatcacaaaggaaatatttgaacattccattgttaagtgttataatttcaatagaacttttgaaaacaaatgttatcagttaaactagattctcttttaatttcgggttgttaaaatgtatgactttttaagaaaataaaattaaatatgcttataatattgttaagttatttgttgtggtgtatcatattaattgatacctttacatgaggccattattgcttcccagggtttcttagaataaacattggctgtgatgtcttacattttaatgcattgcttatttctgcatggaacttttttaagttttccttcaatattttcataaattacattggtgtttaatttactttccctttactatccttgtcaggttataatatcagagtcataatagcataataaaataaaatagagtatgttctttcctgtttcatgctcagaaagaattgtatgtaagattggaattattgttttgtttcatgtttgaaacaacttgccagtaaagtcatcatggcttgaaattatctttatgatatgatttctgactactgattacatgcatttgttgtagcacaattcagatttttcttttcactttaggttacttttggaaaaatgcatgtttcaagtaattgtacacattttacatatatttccaaatttattgaattaaacgttttcatactatactaatttaacttcttgatatttgtattatttataacaaaactcaataaactgtggcaaataagccagacagtatttataaataaagtattactggaacactgtcatgctcattcattgacatactgtcaatttatgccacaacaatagaattgattagttgcaacaaaccatatagcccaaaaacctaaaataattaccaacagatcctttccaaaaaacaaaaaaaattcttgacacctgatgtataattatttcctattttgattcctgagatggcatacttgtttcttctcttaattttatcaagccatttctccagagttttgttattgtatggctcctacaacaactaacaaacttttggccatatttcttgacttttctttccctgtattcttaatcactatgcatgtatttattatttccttttatttctgttgatatttctaacttctaccaataaattcaaaacattttaaaaattaatttgttgtcctcataaaataagaatttaaggttctacattttcctctaaaatgacacattttataatgtagtatacattttttaattaaaaatattttataatttccattatgatttgctcttgggtgttgagttactaagaagtatatttctgaggtttttcttcaatatgactgactatagatatttgactctagttattctcagaaagagaaagcaaagttatggataaataatcgttaattccaatatctatatagacggaagtgtgctagagcaccacaagaagaaatttgaacacagaaaaataaggaagcaagaacccagcagacattatactctgagggacttgatgttccatggaaaagcataggtgggggtgtcttttgctcttctcacctctgcggcagactgcttgtttctgaactgttggagagccctccattctcacaagcccaagcactggtgtgggccgcaatcttggaacaaattgaggacagagaacaaggctactatttcctgcagtgccacttgcccttcacccagccccaagatgaggtggtgggcaccatactggatatgcctctgtggtggacttctatactgcctttgagtgagagagaggcttgccccatccccttgccggcttccttctccgtccctgcgtcgagctgtggctagatttctccatgagggcagagggcagggcaagaggcgtgagaagcatcttctggaaggtctgcgggcaccctcctgcgggtggacaatgagcgcctgggaggccgttgtccttggttggggagcggtcgtctggatctagcctagcaaagaggctgctccggatggggaggaaatgaaaacccctgcagctccgacgcagatgcccacgttgcccaggccttcacagacccccaagccggaaccgccgggaaaacgattgccaaccggccacaacacccaggcagagacgcggggagaggctgaccagaagaaaggccgacgtgcaagaaacccagcctccggcgcacagggaacatgtgtcccaaggcgca

SEQ ID NO: 41900 - DNA, 2300 bp, Homo sapien
tgtatatctgatttgttcgtagcaggtttattcatgatagcctcaaatcagaaactgcttttgtgtctatcaatagtggaatggattaaaaacaaaacaagcaaaggcctcaaacctgtggtatagtcataaagttgaatattagaaaataatgaataatcaataggagcaaaatgatgtgtcacaagcatgtttagtgagtgaacataaaaattatataatttatagtttcacttacataaatggtgaaaacagacaaaactaaccttttgtggaaagaatcaaaaccgtggaagcctctgtgttcaaatactgactggaaatgggcaggagaaaacatgtttctgccagatcttctatatgcctgatgtgcattcactcgatgtattttgcgtatactatttttgcaaataaaactgagataaaggcaaaataactcaagagaagatagatagaaataggtagagttgggatagaagccttcgaagctacccccgtaccttgcccacctggcacaggccgaggaagtcctgggacaatgctgtgagcgacctgagggccgtccaggggagccccgccagcccatgctggcgcctgagctgcccgccgccatctgaatatgttgcaaagacagtgctggcctggcaaccggtgacgccccaccccgacccccacttctacccaagtagtggctacgctagagacagattcctgggcggcagcggttaagtctggcagttggccaggtggccaaaggacgggaactggccgttcaccccatcccagttccacagagaactcaaccactatggcccctgagcggaccttcaggcctggtgggctgtgctctgtgcctgcaaacctgacgccatccaggggagctccgccttcccgcgccagcgcctcggctgctgcagaaaactgcaaaactgcaagttgcacacgggcagagatgacggagcaacccccgaccctccgcgccactcaccctacctgcacacctgccgcgcggaccctggggcgggtgcctgggtgcccaagtcaggcagtccgcacagcagtggcaccagggtgaaaacctgctgctcggtaccatcccggttaccacgaagagccagtcccggcggcccctgcgttcttggaggaggccaagtcagagcaacctctcaagtgggagggcgatgcacttgaccctgaggacatcaggtaccaggcccgccagctcacgcctgcatcggagccgcagctgcagtctagacgtggtgcaccggcagcaagtgactggacactccagaccaggcccgccccgcagtagcgtggatcctgaggccagacccccaggcggcaaaatcaggcaaccggccccgccagcagccgctgtttcatccgtgtggacacagagtgcccagcgccagggcccaggatccagaaagatgtccaagaggagcggaccttgaggccaggtgggctgtgcgctctgcggccctgaggccatccaaaggaagctccgccatcctgcgccagtgccagatctgcagctgcaaaccgcgcgtgtggcactggcagcagtgagggcgggtgggggaaggagcagtccctgactctgcctccatccctctccagctacctgacactagccacacagacttcagggtcagagcctcagcgttcagccaatccgcgaagccactcaggtggccgcggagtgcccttgccagcaccctatctcccttctgaggaggagcggggcgggctgcaaggccagacaggccctccttctcaggccgggctggctgcgcgcctgcgatcctggggctgcccgggcgatcccaggagaaccggcgagcccatcggcgcacgcccagagctgcagccccacctgctggcgcgcgccgccagggagcgtcttctgggagcccggcagcaactgccgtgcaggcgcgcgcccaacggctttgcgaggctcactcggtctgagaggtcggaggctgcgagtgtcgctgctgaaggctgtggtggaccgggctggatcgcggattgtgtagattatagatttgaaatagcggagttggggttggatcggggctttggggttggataggggatttggggctgggtcggccggggtcggggagggggttggtgaaaaggtgacagggagctgccctcgctcaagagccggtggttgggggtctgagaagaagtcaccaatatgaagttattcggcttcgggagccgcaggggccagacggcccagggctccatagaccacgtctacacgggttccggataccgaatcc

SEQ ID NO: 41901 - DNA, 2300 bp, Homo sapien
tggcacctgcctgcaatcccagctacttgggaggctgaggtaggaaaattgcttgaaccgggcaggcagaggttgcagtgagccaagattgtgccattggacaccagcctgggcaaagaagcgagactccgactcaaaaaaaaaaaaagaatataatgaattccctataaaatgaaaacatacttttcatctgaaaaaatatatatatataatatagtaaatatttttcaagtaagctctcttatctgagaacttttcgcccactgaaacaactcacggttatttttgataggggaacaagtactctcattaggcacctcctataatgtatataaaccatgttttaaacgtgtacgttaaaaataacaacgctgtatatgcttaactttgtgagttaaatcactcaaattctccaactgctccagccagggaattatgagggatggaaaacagctgagagtccgtttggctccgccgctccgagggtgcccggcgccctgcacggccccgtcccagggtctgcggggaagccgggcctgggggccccctcccaccccgggctgagcccccgctacctgtgctgcttgtccagggcgtccaggtctccgctcctgcgcgccaagcagcgctccacctccgcggcgtcgcctttgacagctgccctgtggatcttctgcagttcggagtcccggattcggtatccggaacccgtgtagacgtggtctatggagccctgggccgtctggcccctgcggctcccgaagccgaataacttcatattggtgacttcttctcagacccccaaccaccggctcttgagcgagggcagctccctgtcaccttttcaccaaccccctccccgaccccggccgacccagccccaaatcccctatccaaccccaaagccccgatccaaccccaactccgctatttcaaatctataatctacacaatccgcgatccagcccggtccaccacagccttcagcagcgacactcgcagcctccgacctctcagaccgagtgagcctcgcaaagccgttgggcgcgcgcctgcacggcagttgctgccgggctcccagaagacgctccctggcggcgcgcgccagcaggtggggctgcagctctgggcgtgcgccgatgggctcgccggttctcctgggatcgcccgggcagccccaggatcgcaggcgcgcagccagcccggcctgagaaggagggcctgtctggccttgcagcccgccccgctcctcctcagaagggagatagggtgctggcaagggcactccgcggccacctgagtggcttcgcggattggctgaacgctgaggctctgaccctgaagtctgtgtggctagtgtcaggtagctggagagggatggaggcagagtcagggactgctccttcccccacccgccctcactgctgccagtgccacacgcgcggtttgcagctgcagatctggcactggcgcaggatggcggagcttcctttggatggcctcagggccgcagagcgcacagcccacctggcctcaaggtccgctcctcttggacatctttctggatcctgggccctggcgctgggcactctgtgtccacacggatgaaacagcggctgctggcggggccggttgcctgattttgccgcctgggggtctggcctcaggatccacgctactgcggggcgggcctggtctggagtgtccagtcacttgctgccggtgcaccacgtctagactgcagctgcggctccgatgcaggcgtgagctggcgggcctggtacctgatgtcctcagggtcaagtgcatcgccctcccacttgagaggttgctctgacttggcctcctccaagaacgcaggggccgccgggactggctcttcgtggtaaccgggatggtaccgagcagcaggttttcaccctggtgccactgctgtgcggactgcctgacttgggcacccaggcacccgccccagggtccgcgcggcaggtgtgcaggtagggtgagtggcgcggagggtcgggggttgctccgtcatctctgcccgtgtgcaacttgcagttttgcagttttctgcagcagccgaggcgctggcgcgggaaggcggagctcccctggatggcgtcaggtttgcaggcacagagcacagcccaccaggcctgaaggtccgctcaggggccatagtggttgagttctctgtggaactgggatggggtgaacggccagttcccgtcctttggccacctggccaactgccagacttaaccgctgccgcccaggaatctgtctctagcgtagcc

SEQ ID NO: 41902 - DNA, 2300 bp, Homo sapien
tgaagcaaaacaacttgaaccaactgttcagtcactagagatgaaatcaaagactgcaagaaatactccaaatcgggtaaatcaatctttggtaaaaattctatattttaaactttatcttatcactgttacttataatatccacttgatttaatatatattgtttaggtctaaaaccataaatgttatctcatttttaaaaatgaatgatgacacttacaggtacaattattaatatttattataaatcttggcatccacataggatattattttattacaaagagcttttgaaaacaataatatgccataatttatacttagtgataacctattgataaaaattttgttccaggtaaaatttttccttgtactttcccctatttcatattgattactgcacctaatattataaagaggaaacagaaattattgcaatcgcaaataatctcatgatattctaagaagagctctataaattttatcttatttactattggcgttttgaaataaaagttttctttcgtattgatgtatttacaccacagaagtaactgtgatctgttggagaactagaagtagagtcagaagtcctggggaaaatcctgtagcttgcttatatttttaacatttctttttcaaaattatggtaactagatgagttcatcaatgaatgtatataggagtgactagtataatgtctagtttatgatttagtgaatgtaattcttataactgactataaaagtgttaaaagagtcaaactgaaatagaatgttatcagtgaaacagaactgtaataactctgggaaattttatctgtccaaatatgtgtgaacaaaagttcttactatagggtggtgtatgggttaggtatcaaagtgtaaatgcaattttttgatatatcttaatttagtcaaatttgttaatgctttaatttatgcttttgagtttgttgtaattcagggaaaggcttttccaattctgatattcttaaaaattctctggtgtgtgtgtgtgtgtgtttacttttataaattcattgactctaaatacatttctgaactttctggaatttatgctctataaggttcaaagttttgcttcaactttttctccaggtggatatccacttatggtaaactttttagtggtacggatgtgcaggttattctttaacttcagaggtaatcatgatatgttattttattgagtactagctaaaactttcttttgttttatttaggattttcataatcatgaagaaatgaaaggtctgatggatgaaaattgcattttgaaggcagatattgctatactcagacaggaaatatgtacaatgaaaaatgacaacttggaaaaagaaaataaatatcttaaggacattaaaattgttaaagaaacaaatgctgcccttgaaaagtatataaaactcaatgaggaaatgataacagaaacagcattccggtatcaacaagagcttaatgatctcaaggctgagaatacaaggctcaatgccgaactgttgaaggaaaaagaaagcaagaaaagactggaagctgacattgaatcttatcagtctagactggctgctgctataagcaaacacagtgaaagtgtgaaaacagaaagaaacctaaaacttgctttagagagaacacgagatgtttctgtacaagtagaaatgagttctgctatttccaaagtaaaagatgagaatgagtttcttactgaacaactttctgaaacacaaattaaattcaatgccttaaaagataagttccgtaagacaagagatagtctcagaaaaaagtcattggctttagaaactgtacaaaacgacctaagccaaacacagcagcaaacacaggaaatgaaagagatgtatcaaaatgcagaagctaaagtgaataattccactggaaagtggaactgtgtagaagagaggatatgtcacctccaacgtgaaaatgcgtggcttgtacagcaactagatgacgttcatcagaaagaggatcataaagagatagtaactaatatccaaagaggctttattgagagtggaaagaaagacctcgtgctagaagagaaaagtaagaagctaatgaatgaatgtgatcatttaaaagaaagtctctttcagtatgagagagagaaaacagaaggagtagtaagtatcaaggaagataaatattttcaaacttctagaaagaaaatttaaacatttggttctggatacatgttgaacttagttgaatataaaaatctagattaaaagtgtgtttaccatactgtataat

SEQ ID NO: 41903 - DNA, 2300 bp, Homo sapien
tgagaagcagagctttgaagtttgatttacagcctgcccaagaggtcaaaaagaaaagctgatttttagtgggaaaattcaagaaggcttcagaaatgtgcataaaatggagcccagtgctaatagctaagacaatgttaaaaaggccttgaaggcatttcagagacctttgcagcagagcttgctgtcaaaggccctgagttctaggaccaaagaatggtttcctgggtcagtcccatggtcgcgctgctgtgtccatcctcaggacagtgccgcctgcatccctgcagctccagctccagctccagccatggctgaaagatgcacaggtacagcttgggtcactgcttcagagggtgcaagctgcaagccttggtggcttccacatagtgttaagccagcaggtgcacaggcttgggagcctttgtctagactcaagagtatgtaaggaaaaacctcagtgtccagctgggcagaagcttttccaagaggcagagcctcatgggaaacctttactagggcagtgcagaaggaacatacagggttgatgcccccatacagggaggaaccattttccagaccccagattcatagacccaccaactgcttgcaccctcagtgtgggaaagccacaggcactgaccaccagcccagcccacgagggcagctgtggggaaagaccctgcacagccacagaagctgagctgcccaaggccttgggagccccgccatccactcttgtgctctagatgtgggatgtagatcctttcaggaaagatgatttggagctgtaggatggaatgactttcctgctgggtttttgacttgcatggggtctgcaagtcccatctgtgttttgtgcttccctctgacaaatttcttccttttggctgggaatgcttacccaatgtctctacaatcattgtaccttggaagtagttaacttgctttgtatttcagaggctcgagtagaagggatggcagcgttgtctcagatgagactgggctttggacatttcagtaaatgctggaatgagttaagactttgggggactgtagagaaggcatcattgtattttgcagtgtgacaacgatatgagatgtggggggacctgggtgagaataatatgatttggccctgtgtcactaccaatactctcgtgaaattgtaatggggaatgttaaaggtggggcctggtgggagatgatttaatcatggagaagagtgggggttggaggtgggggagtggggagaataggagagattattttgtgggtgggggtgaaaaatgaggggggacggattcttcacaactggtgaaacactatctccttaatactgtctgcgtgatagtgagttctcttgatgattatggagcttaaagattgagtgaatattgtcctgctggggtttggactgacatttttgtcatttttctggggaatttcttccctttggattgagaaaccttacttaatgcttgtactatcattgtatcttgaaagaaaagaaatgccttttgaactcagggactgataggccgaagggactgtagccttgtctcagatgagactttgaattttttatatttggaatgagttaagaattttggaaacttttgaacatgcatgactgtgttttgctgtgtgagaaggacatgaggttctggggtatctgggtcaaataatatggattgactgtgtgtccatataaaactcatatggaattgtaatccttaattttggggcctggtggtaggcgatttaatcttgaatgggagggggttcggggtggtaggaaaaggaggggtagggtggggaggagtaggttgtcagtagggtggtaggaggatggggggtagtaggaagggggagtagccttctgcagaggcagaggctcatggaaaacctctactagggcagtgcacctgtggctttgcaggctttagccccatggctgctctcatgggctgggctggtgttgagtgcctgtagcttttccatactgagggtgtgagctgttggtgggcctatgaatccgggatctggaggatggtggcctcctttttgggggctccaagcccatattttccttctgcactgccatagtggaagtttctcaagaggcttggcctctgcaggaggcttctgcctggaaacagtgggcggtggtgtgggtgcaggatcttcttgatgctgatctcctgatagtgagacctcatgtgatctggttgtctaacagggtgtggtacctctttcctctctctgtcttgctcctacccctgccatatgaaacatct

SEQ ID NO: 41904 - DNA, 2300 bp, Homo sapien
gctcctacccctgccatatgaaacatctcattgccacttggccttctggtatgattaggaagggcctggtcagtgtgggcctggtcagtgaactagtcagttgggacttggtcagtgaggcctatttactgggggaatggtcagccagggtctgcttagagagggtctcattagagggatcgagtagtgcaggtcttggtgagtggggacctagtggcagacaaatgtttggtgtctggtcagtgcaaacctgggctgcagggcttggtgagtggagacctggtcagctgtggcttagtggtagccttgtcagaatgggctgggtcactggtgacccggtcaaggggtgctattcagtggaggcctggtcacatggcacctagtcagcagggcatgtcctcatcagtgagacccttgtcagtgggaccctggtcatggcagcctggtcaggtcagtggaacctaatcagtgggggcctggtcagagaggacttgatcagtggtggcttttgtagcactggtctatggggtgacctggtcaacgggggtctgagcggtacatgcctgttcagtggtgcctagtcactaggttcctggtcggggcatctggtcaccgcaggcctggttagtagggacctggtcactggcagcctgttccctggagacctggtcagtggggcttcatctgtggggccaggcaatggggtcatgattggtggaatgtggtcagggaggccttgtcagtgaggccctggtcagtgaggccttgtcagtgaggtccttgtcagtggggtcctggacactgtgggcctggcagcgggaatctagttagtggggcctggtgatgggggcctaatcagtgagagtgtggtcagggaggacctgatgtgcgggatctggtcagcagggacctggtcagtggggctgctgagcactgctgggaggtgtcaggggaaatgcatgttatcaggggccctatggacagctgggatggcccagtggtgtccaatggcccagtcaaaagtggacaaagcaggtgtttggatggacctgggagatcttgctcagagattctgaaagaacaaaggtaaaggaagggccagagtggctagagagatggtaacagtctatgggctgcacaggatggaggaagccagggaacaggcagggtgggcagtaggggtgcagggagaggcaggtgcatgctgggaggtcggaccctgtgagggctgtgggggcgtcaggtggggtgggctccaggtgcactctcagtgtgcactgggcaggtctcggtccaggctctctggaccctggtcgggtgatgtggtcactccctgggggactgctgtcaggcctagccacccacccttggcagcactgtcccatctcaggactggactttctcagatcctgcagagggcacagcctccagcccaggaggggcagccccttggtgcagcctaagctctccatgggcctggagcatccctgccagccctgcgctccctctactcccaggtcccgcttttcaagtgtcagccagcagagaggctccgtcctcccttccctatgtgtctcctgggctaaaacttggggcgcattgggacagggatggtgctttcctcaggcccatttagggaggggactggctcccagcctggcacaggtcctcagctctgccttggttgccttagagtgacatggatcagtcagtgccctgaaggtaaatggaagagactgtccctgctgtgtgggaggctggtctagggatggaggacttggcaggtcctcccagtctgtcaggcctggacagcactgtcctgtctcaggactcagaaaatccggtcttgggatgggacggtgctgcccagggtgggtggccagggcttgacagcagtcccccagggagtgaccacatcagccaaccagggtccagggagcctggcctgagacccacccagtgcattgagggtgcacctggagcccaccccacctgatgcccccacagccctcgcagggcctgacctcccagcatgcacctgcctctccctgcaccccagatgtccaccctgccttttccctgatttcctccatcctgtccagcaggatgggctggtcagtgggatagcctctgtgcacattttgtggcaagtaggagtgacacatcattcctgggaggccccgtggttcctgccaaacccaaccccagaattctccctgaggtggttttaccaaacccataacccagaactgctattgtggtttgggggtcagcacccaccagtgccagggcactactgg

SEQ ID NO: 41905 - DNA, 2300 bp, Homo sapien
tgccagagcttggaccatccctagcttgggggttaggggttgtctcttggtgacctaaatgaaaaaataggtccagatcagagttcgtgatgcatagcactcacccactctttgaatcatgggaggggaggcctagtcctaggtaaacctaaactctttgaggaaccacagagcccaaggctggaaacctccagaatcctccagcccctgatcccccccccccccggggacctctgtggcctgtctcaccagagcactcttctgtctgtagaggtctcaggtgctctacaagggagtcccatttcaggtgtggggctgggtatggtcactcctgctggatgtctagaaggtgaaaaccaaggacctaggaaaataccagatacagcctttccaccgtcatccagagcaggacaaacacgccaggtggtgtcaggagcccaggtctccagctggagggaatgtcaaccctgcagtgggagcccatcatgcatcctaggcacagatgctaacgtaggcaccgcaggtaagctgggtttggtaccccttcctggcttcagaaagaagccaaacaaggagctttctgcagaatgaaacctcttttccatccagaagcactgctgactgtttggtggttgctgttagggcagtgagccttttgtccattctgagattaggctggtttctcctcttggccctggcctacagaccataaaggaaaacagcaagaggtccccagcaaacatctacagatggccctggacatcagccacattcagagaaacgtgtcatgttctgggagggctaaggcatcgagtaaggcctatggggctggaggatcacagggcaggtggggcaatccagagctgtgggggcttccatgggaattgggaggtcccaaggcagaggtaggggttccacaggaggagtcacagagccaccaagggctctcctggcccagggagcagtcaacaccatggactgaacacccactgggctaagccctgggccaggctggggcatgtggggccaggaggcagctcagagtgggagacagagagacaagtgtgctcagagggcacccatatctgcatataacgtggtcctgaatttctggctgggaagtgcttccagggtttcatatgtgttatggagatgcttcctctctccaacctcaccgtgcaggaatcccagtgaatatattgccaccatcttggagctcagtgccctcatagtgtaacagcaccagcagatctgcctgtgcacagacttcctgtactacctcactcctgaggggagatgcttctgcagggcctgcgacctggtgcacaactttagacaccatcatcctggagcggcactgcaccctcactagccagggtgttgatgacttcctcaatgccaaggccacgttcaagattttcgacttcagtgatgcgtttgtgctgagcaaggtgggcttctccgggatcttaattcaggaggtagaatgcagcttgagatctagtgtctgatcaaagaacttgaacttgacctggagggctctggggagccatggaaggtgctggataaaggaagggacagtcatatatattttagagatgactgtggaaggctgcctggaaggagtgaacaagagccaggagaccagggagggagtttgtggggcaggtctggagatggcaagggagggatcctgcttggatgaaaggtcttcagggactgtctcaggttacactcaggtgccctcagagctactgtgttcagggttcttgtctccaggatgaaaataaggaggagttgtcagacaaggacatatacatggaggctggcatcttcatgagtgccaatcgtggtcctggtgtggactactgtgggagcaggggtctctccatccagggacatggtggatggaccctacatcactccattctgcccttcctttccctcccattctcctgagggactcaatgcatgggcactgtccaacctctggtgctgaagcagccaagagacccaagcctgccttgctgccacttaggatatgacagcacagccagtggcctctactggatcctggtacccctcagaagacacccagacactgggagtgctgccacctcgtggtgcaagagttctgagggacggcaattctgaagacattgaatggtgggtgctgggcctcatggctgttccccagcccctctcattggctctgctccaggtggagaagggggatgatgtctctgtcagttctgctgttttagcctagaaggaaaagaagcagagcccagaagcagggc

SEQ ID NO: 41906 - DNA, 2300 bp, Homo sapien
acaaggtcttgagattatatctgcaatgtgttgctgctggctgttgatcaagataggctgggagaagatcattttcaggtgtgaaaaactgtcacctttatcaaataattcttcttgcatatttcccaagacgttgtagcctgtctaaacttgggaggttaattttgtagcattcattatgaccgaaaatgtagttcacacaatcatgatgctctctttattaggtgttactgttaaacaatattaaaatacacacaatgtggctggtcttttgtaagctacatggcatgtttacttctttgccaggtttcttaattgcatctcttcatctttccgaataccagtgtcactgtcacccacaatatttgctgttttgagcacatggtttaccttttattttgcccaataatagaatatgatggggacatcttatctgagtgtttcatagtatgctgtagtttgaattcttggctgttggtttcccagagtcccagctcctgccactgcattctgcctttgtaaatggagaataatggctctaaaaaaaattcacctaagaatgtcatgatagtggagagggaggaccatggaaatgctaaagccacccactcggcttctgtaaatcatgcagaggatcaggaaaatgattgaaagtaacgtatcccaaacaaagcagtcagctgtacaattcaagacctgtgtctggctgtaaaaaaaaaaacaaaaaacaaacaaaaaacacaaacaaacaaaaaaatggaaagaataaccttgctactcatcttgttcaaaaaactggagcagattgagtatctagactcagtttcagaagaaatgttaaatattgacaggggcatattcaagatctttaggattttttggggggaggagaggggaacataaaaaagcaataataaagataaatttgaatgcaggaaaaatacacataatccatgaatctaacacctgttttcgcatgtttatcatctttgtccctatgtagatctatgttttctttcacagttgcagtcatagaatatattctattctctaagcttttatccttcaacattataggagaatgttgttccatgttaccacatagccaactgtttcaaaacttgtctagtaaattctgtgctgttgttttcacagggagaaacatgcacatgtatattacttttttttttctgttgaatcatactcttggaataaacttttttcagtgaggtttttggttccaaaaagtataaacattttggtgatctttagtaagttgtattgctttccaaagaagtgataggaattatacttgccaccccaacagtgaaagaattgcaatttaatttcaatgtaaaagaggatgctactgttgctattatattttctattataatgaaaaccgttaaagatttaaatcaagctggattgtctttcaggagctgctgttaaatgaacaccttgatattttcgttcttggagagaaatgagccaaggaggaagaccatctaaaaaaaaccactagacaatttgtgctcactggagtggtctctgctgggcaaaaggtctttagaatgactcgtggattttctggcaagtggcaaaccatacaagtgctatgtcaggccagggagacaggtgcagccctgtcagtgtcaaagaagaacactggtagcagaagagctaagagtgaatgaaaattgaattatctttatttctaggacttgtctattgagaaacaacagtgctggcaaccatttactaccaacaagaggcagttccaagagaagaatataaaatatgctctgctcaatcccacgaaactcagagtgtctcacaatggccaatttcttatttttaccctgtccagagacaaggaaggatgcatcagggagctgctagcctctgcgatgaataacttgagtcaggctgcaacatgtgaaagaattcagctgatcaggatttataacactagctggattttttgctttctttggggttcatgaagcatggtgttgtgagataccacaggagtcccagagtaaagttacatacctatttctcttccttatttttatttttttggcatgttcatactattttattaccaacatcgttggcatccctgagtatgagagttcagaagaaacttagaggctattgtctgattcaatccttgcagcttacaaaaagaaatgtggggagcagtcactgtgtgactagcctgaggtcactcaggaagttagaggcagaactgcagccagggtcacctctctttactgctactagtgtgctccttc

SEQ ID NO: 41907 - DNA, 2300 bp, Homo sapien
tttaatcctggctcaccatgtacaggctgtgtgaccttggacaagccattcaagttctctaagcttcagattacccatctgtcaagtgggggagaataatagtgcttaactatcatttgcaacatctgagtttctggctcggccaacggggatggggaacatagagtgaggagcaggtgtgctgtgagatggcgaaccttcaacagagcctgagacgtccgcggaacaccaggagagttgcagtggggatttgcaaataggcatctggctcccccacggagatgacgggaatttcagcgcatcaggcatagctgagactgtctacgtggtaaaaccatgcctgaaaagacctttggaaaatcaggaggttgctggagcccttggagagagctttggtgtctgtgacatgtggaaatggaagccagattgaggagggggtgcgagggaaggggtgaagcagctggccagtgtgttctctcctgcagcctgactgaaacagggagggggcaaccaggaacccacagctggagaaggacactgggcaggggtgggacagtttgctgggaaggatgagactccagtgtgtgggaaccgatcaatgggaggatggaaggtatgggggagacggaggcctctgcagagggagaggatagcacaggagccagggctgaagggaacagtggctctagactgagggtaatgggcctgaaggtaggccccttcccctgtgaaggcagcattatctgaggagccgtgagggatgggcaagaagcagcagcttgggaatgccgcctgaggtcagtggaaatgaagctgagggcaagacagttaggggcccactgttccagcattgtgggaattgcggtggagtgtgtgtgtgtagggaggggttcctggcagagtcaggcatggatggatttggaggtcccttgaagaaacttccttcaggtcagcctgaagtgtgagggactctgagggggtgcaatgcatgccagccatcccctcctcgcagccctgcctcaccccaaaacttcaggtgggcctggggctgaggtgcttggatgtttgtagtaagagcttctaactctgccgctccacccggctctcagtggctcaggtctgagaggcctcagcaggggcaaggagaggaggcagtgaggagggaaggctctggaggaagagggcatggcagagggtcttcgaggcaacgccagggaggcccagggcatgagggtgaggagctagaactgagctctgagccctcctctgaggttggggcttctgggcaggcagcccccttagaggccctcccttgtaggtattcggccttggttccgtggcccatatgcttctaaataaaacatttgggagctaccttggtgtcaacttgggttttggcttcggagtcaccatgggagtgcacatggcaggccgcacctctggtgagtgagcccaggccctgccggaccgggcaagaccaggtgtccccaacaggctctttcctgcccgcctcagccagctcctttgccagcacagccagtgcctcagcctggccaccgggcgggaggaagtctcctctgaaccccgtgcctatgacgtgtctgccccagattcttcctggcccccccgacctaccattttcactggctgggtcatcttaggcaagccatcgcctctgtgttcctcagtttccttaagagtgaaaggaagacggtggcccctgcctcacggggtggttgtgagggctcaaggagagaactctgtcacggagcatgctgtcatacacactagccatcgttgttctcatactgtttgtcactgttgtttgttctgctctcactccctgacacacttgcctgctgcccgcaggagcccacatgaacgcagctgtgagcctcactaactgtgcactgggccgtgtgccctggaggaagtttccagtctatgtgctggggcagttcctgggctccttcctggcagctgccaccatctacagtctcttctacagtgagcgtcctgcccgggtgtccgcctctggcctcagctgcctcctatgaaatatgggcagattggacctcagtgtcctgatttgtaaaaaatagctgggagaaaaaagccttggaggtctcccaccctctaacctataacctaatttccgggaccctggtggggcttagctggggacaggttcgcatgatagtctgtgtctccacagcggccattctccacttttcgggtggagagctgatggtgaccggtcccgttgctacagttggcatttttgccacctaccttcctga

SEQ ID NO: 41908 - DNA, 2300 bp, Homo sapien
gcattgcaattcatgcaaatctgactccgcagctctactccaaaggatagtttcaacgttctgggctgagtgggagggatgaaagatcacacatcacctacaaacagggataccacccatatcagacacatttatagtcacagaagtaaatgatgcatggatcagaggatacatgcctcaccataaagttctaaatatagtttacactctacccgaggatattgctttcatctttgttaaccagaaaatagattaagcaaaggttagctggtgagacatgtacaaatcctcaagtcaagctgagtattctgagagcctaaggtgaattttttcttttcccctaaaagtacaacttttacctgctgagtgtaacgatctattttgacttgtgcctcaggacagagttcgatatctttggctccatagacagcctgggcaatggtccttatcttgtccacaattggaagctgcagaaacacaaattataaaaaaattgtgtaagtttaatctggttaaagatttttttaaaagtttagtgacacttactgtaattgcttaaaattcccttatcagggtaccccctcagcaactgcaggattccttgcaaaccctcttttttccttttagcaccctaaagcactgaaattttcagtgtcagaatagatcggatgtcaactagcaaataagccttaggtgttcaggcaatttagaggctgcctagagcccatgtagaatctgcagagggaggccgggcacagtggctcacacctataatcccagtactttgggaggccgaggcgggtggattacctgaggtcaggagttcgaaaccagcctgatcaatatggtgacaccccgtctttactaaaaatccaaaaaaactagctgggcttggtggtgcatgcctgtaatccgagctacttgggaggctgaggcaggagaatcacttgaactgggaggcagagactgtggtgagacaagattgtgccactgcactccagcctgggtggagtaggactccgtctcaaaaaaaaaaaaaaaaaaaatctgcagagggaagagggaagttagtgccttacagagggcttctgactaggaagccccagaactgcggccgaccccttcctctccctgcctcacccctgcagaaagatctgcagaaaaagctggaaggggtgggatggtgtgtgtgggggtggggactggggctatgcagtttccagacctggtctttggcaccctctacaggacagttccattcccacacctgagctttggacaactgaatcctatgccccttcccacccagggaacctggtgccagaaattcccaggacttacccaccatccaccacgccacatagcaagtgtcctcagtgtctgcagaccagaaacaactcccttgtgtctcagcactgggccacctgctgaaaccccaaactgcctgccccattgtttgagacccagtcaggccttggctccaaaagtcctcttggactgccactggcccccagggtctctcctgactgcacctcggtcccggagctcccacaccgctgggccccgagccccatgccccgatccagctgtggctcctttacgggggccttgctggcctttcctaagggaggtgttttcccgagggcaggtggactgctcctcagactaggggccctcggagggccaggcctgggcttctacctcctctcgcaggctggtgtttctctgcaaatatggctcgtgtgtcctccttcctctcagactgggggcccctgaggactgggcctgagtttccctctcccccttcagaatgggggttccctgaggactgacccagggcctccccccgtcccctccatctggctgttaatctccaacacttccacctccagtcctattctgcacagcgctccccagcgctgggagctcagaggcctcttcagccttccccagggctggggctcagggagggcttcctcaggcgctggccccagagtcaggctgcacattggcttggaggacaggcctttcctctgggactgtgaggcccagagtgcccacccagaactccacctctgacctcacaaaggcctgcttcagaactcagtctccactgcactgctggccagacgagggaagttattttgggcagtgcatctggacttggttcaagtggcaccagccaaatccctgccttactgacctctcccctggaggagcaggagcagcgctcaaggccgccttgggagggctgagaggcaggctctggactggggacacagggatagctgagccccagc

SEQ ID NO: 41909 - DNA, 2300 bp, Homo sapien; identical to SEQ ID NO: 41906

SEQ ID NO: 41910 - DNA, 2300 bp, Homo sapien
catgccagagcttggaccatccctagcttgggggttaggggttgtctcttggtgacctaaatgaaaaaataggtccagatcagagttcgtgatgcatagcactcacccactctttgaatcatgggaggggaggcctagtcctaggtaaacctaaactctttgaggaaccacagagcccaaggctggaaacctccagaatcctccagcccctgatcccccccccccccggggacctctgtggcctgtctcaccagagcactcttctgtctgtagaggtctcaggtgctctacaagggagtcccatttcaggtgtggggctgggtatggtcactcctgctggatgtctagaaggtgaaaaccaaggacctaggaaaataccagatacagcctttccaccgtcatccagagcaggacaaacacgccaggtggtgtcaggagcccaggtctccagctggagggaatgtcaaccctgcagtgggagcccatcatgcatcctaggcacagatgctaacgtaggcaccgcaggtaagctgggtttggtaccccttcctggcttcagaaagaagccaaacaaggagctttctgcagaatgaaacctcttttccatccagaagcactgctgactgtttggtggttgctgttagggcagtgagccttttgtccattctgagattaggctggtttctcctcttggccctggcctacagaccataaaggaaaacagcaagaggtccccagcaaacatctacagatggccctggacatcagccacattcagagaaacgtgtcatgttctgggagggctaaggcatcgagtaaggcctatggggctggaggatcacagggcaggtggggcaatccagagctgtgggggcttccatgggaattgggaggtcccaaggcagaggtaggggttccacaggaggagtcacagagccaccaagggctctcctggcccagggagcagtcaacaccatggactgaacacccactgggctaagccctgggccaggctggggcatgtggggccaggaggcagctcagagtgggagacagagacaagtgtgctcagagggcacccatatctgcatataacgtggtcctgaatttctggctgggaagtgcttccagggtttcatatgtgttatggagatgcttcctctctccaacctcaccgtgcaggaatcccagtgaatatattgccaccatcttggagctcagtgccctcatagtgtaacagcaccagcagatctgcctgtgcacagacttcctgtactacctcactcctgaggggagatgcttctgcagggcctgcgacctggtgcacaactttagacaccatcatcctggagcggcactgcaccctcactagccagggtgttgatgacttcctcaatgccaaggccacgttcaagattttcgacttcagtgatgcgtttgtgctgagcaaggtgggcttctccgggatcttaattcaggaggtagaatgcagcttgagatctagtgtctgatcaaagaacttgaacttgacctggagggctctggggagccatggaaggtgctggataaaggaagggacagtcatatatattttagagatgactgtggaaggctgcctggaaggagtgaacaagagccaggagaccagggagggagtttgtggggcaggtctgcagatggcaagggagggatcctgcttggatgaaaggtcttcagggactgtctcaggttacactcaggtgccctcagagctactgtgttcagggttcttgtctccaggatgaaaataaggaggagttgtcagacaaggacatatacatggaggctggcatcttcatgagtgccaatcgtggtcctggtgtggactactgtgggagcaggggtctctccatccagggacatggtggatggaccctacatcactccattctgcccttcctttccctcccattctcctgagggactcaatgcatgggcactgtccaacctctggtgctgaagcagccaagagacccaagcctgccttgctgccacttaggatatgacagcacagccagtggcctctactggatcctggtacccctcagaagacacccagacactgggagtgctgccacctcgtggtgcaagagttctgagggacggcaattctgaagacattgaatggtgggtgctgggcctcatggctgttccccagcccctctcattggctctgctccaggtggagaagggggatgatgtctctgtcagttctgctgttttagcctagaaggaaaagaagcagagcccagaagcagggc

SEQ ID NO: 41911 - DNA, 2087 bp, Homo sapien
gtggcagacaaatgtttggtgtctggtcagtgcaaacctgggctgcagggcttggtgagtggagacctggtcagctgtggcttagtggtagccttgtcagaatgggctgggtcactggtgacccggtcaaggggtgctattcagtggaggcctggtcacatggcacctagtcagcagggcatgtcctcatcagtgagacccttgtcagtgggaccctggtcatggcagcctggtcaggtcagtggaacctaatcagtgggggcctggtcagagaggacttgatcagtggtggcttttgtagcactggtctatggggtgacctggtcaacgggggtctgagcggtacatgcctgttcagtggtgcctagtcactaggttcctggtcggggcatctggtcacctcaggcctggttagtagggacctggtcactggcagcctgttccctggagacctggtcagtggggcttcatctgtggggccaggcaatggggtcatgattggtggaatgtggtcagggaggtcttgtcagtgaggccctggtcagtgaggccttgtcagtgaggtccttgtcagtggggtcctggacactgtgggcctggcagcgggaatctagttagtggggcctggtgatgggggcctaatcagtgagagtgtggtcagggaggacctgatgtgcgggatctggtcagcagggacctggtcagtggggctgctgagcactgctgggaggtgtcaggggaaatgcatgttatcaggggccctatggacagctgggatggcccagtggtgtccaatggcccagtcaaaagtggacaaagcaggtgtttggatggacctgggagatcttgctcagagattctgaaagaacaaaggtaaaggaagggccagagtggctagagagatggtaacagtctatgggctgcacaggatggaggaagccagggaacaggcagggtgggcagtaggggtgcagggagaggcaggtgcatgctgggaggtcggaccctgtgagggctgtgggggcgtcaggtggggtgggctccaggtgcactctcagtgtgcactgggcaggtctcggtccaggctctctggaccctggtcgggtgatgtggtcactccctgggggactgctgtcaggcctagccacccacccttggcagcactgtcccatctcaggactggactttctcagatcctgcagagggcacagcctccagcccaggaggggcagccccttggtgcagcccaagctctccatgggcctggagcatccctgccagccctgcgctccctctactcccaggtcccgcttttcaagtgtcagccagcagagaggctccgtcctcccttccctatgtgtctcctgggctaaaacttggggcgcattgggacagggatggtgctttcctcaggcccatttagggaggggactggctcccagcctggcacaggtcctcagctctgccttggttgccttagagtgacatggatcagtcagtgccctgaaggtaaatggaagagactgtccctgctgtgtgggaggctggtctagggatggaggacttggcaggtcctcccagtctgtcaggcctggacagcactgtcctgtctcaggactcagaaaatccggtcttgggatgggacggtgctgcccagggtgggtggccagggcttgacagcagtcccccagggagtgaccacatcagccaaccagggtccagggagcctggcctgagacccacccagtgcattgagggtgcacctggagcccaccccacctgatgcccccacagccctcgcagggtctgacctcccagcatgcacctgcctctccctgcaccccagatgtccaccctgccttttccctgatttcctccatcctgtccagcaggatgggctggtcagtgggatagcctctgtgcacattttgtggcaagtaggagtgacacatcattcctgggaggccccgtggttcctgccaaacccaaccccagaattctccctgaggtggttttaccaaacccataacccagaactgctattgtggtttgggggtcagcacccaccagtgccagggcactactgg

SEQ ID NO: 41912 - DNA, 2300 bp, Homo sapien
acaaaggtactgatggacatccagacacaccccaccacaatcactagcaaacccactcccaaacacacagacacacacgggcgcacgcgcgggaacacaagcacacacacagacacacaaagacacagacaacttgaaggagagcaagggacagagggatgagaaatagaaacggaaggagagaaacagcgatggagagagagacagagaggaactggggagattgagagagagagagagagagagagcaaggtggagagggaagtagagaaagggaaagggtgagggagctagagagggagagcaacagagccttggagagggaggctctatctggtagacaggggcccctttggccagggtagggtggagggtgcctgggctgggctggaacatgggggcagggccgcccacgcgggaaaaccaacggagccctgagacgtgtttttacttggatttgttggttgctttgggggtgcttttcgtagcgtcattcctttgttggctcctccctgtcctcttggtgctgtgggccctgaaagttgtagagtgcgcccctcactgtggcaggagcagtggcgctgagcgtgcccacgggccgcggcttgggtctctctcattttccaggtggtatggccgtggacaatggcagtggcgcctggctggcccaagagcccagtccagctacgcctgcctgattccaggcgtcaccaccaacccgggggccgcgaggctgggatcaggcaccccggagccgcttgcctgtggccgggctgctctccccctctacgcccaagcaccaccatcgccgcgctgcgctttccgccgacctcccagagcgtcccgatgtcgccggcggccagaccatgcgcgagacagcccaggcgccagagacctccatcccctgccagggctctggactctccaggcggccaccctctcgctgggactccaggccttccccaggctcttgagctcccgagcttccaacacctggggcccgcttaggacggggtgtgctccgaggcgtcagggcccagggcccacggtcctggggtcccctccggtcctccgccttgccgcggaaaaattattttggattcctcaccgcccctcctgcaaggccccctcttgccccacacacccagagccgccagggctgcccaggggcgaacagccggcccagccccacaggccctttttctcacaatgctcacaccatcgtcgcttgttctgaggaggacccgccatggccaaaggggcaagaaggctctgctttgccccgccctggcactagagccccggcagcctcatcccgggaaagaggggctgacggacacccagacacaccccaccactaccacgagcaaacccaccctgacacacccacggatacacacgggtgcatgcgcgcagacacacacacacaccacacccgggcacacacacacggacacacaaagacacagacacagatagctcaaagggagacctcccctcatattgtcttatgcccaatttctgcctccaaagaaagaagaagtaaaatctaaaaggcagaaatgaaatccacaggcagacagccccgcgccacaccctgggcctggtagttaaagatcgatccctgacctactcggttatgttatctatagattacagacattgtatagaaaagcactgtgaaaatccctgtcctgttttgttctgatctaattacctgtgcatgcagcccccagtcacgtaccctctgcttcctcaatccatcaagaccctctcacgcggacccccttagagttgtaagcccttaagagggacaggaattgctcactcggagagcttggtttttggagacgtgagtctgcggatgctcccagctgaataaagcccttccttctacaactcggtgtctgaggggttctgtctgcagctcctcctgctgcagaaggagagcaagggagagagggatggagaaatagaaccagagggagagagagagacagcgatagagagagagagagagagacagaaaaggggggaggagagagagaggggggaagagagagcaccacagtagagcgcgaggtggagggggaagtagagaaagggagagggtgagggagttgtggagcgacagcgacagagccttggagagggaggctctgctcaggtagacagggcacctttcagcaggccggggtgtggtggagggttcttgggccgggctagaacagggggtcagggccccccacccaggaaaaccaatggagccctgagacttgtttttttccttggattggttg

SEQ ID NO: 41913 - DNA, 2300 bp, Homo sapien
acaccccaccactaccacgagcaaacccaccctgacacacccacggatacacacgggtgcatgcgcgcagacacacacacacaccacacccgggcacacacacacggacacacaaagacacagacacagatagctcaaagggagacctcccctcatattgtcttatgcccaatttctgcctccaaagaaagaagaagtaaaatctaaaaggcagaaatgaaatccacaggcagacagccccgcgccacaccctgggcctggtagttaaagatcgatccctgacctactcggttatgttatctatagattacagacattgtatagaaaagcactgtgaaaatccctgtcctgttttgttctgatctaattacctgtgcatgcagcccccagtcacgtaccctctgcttcctcaatccatcaagaccctctcacgcggacccccttagagttgtaagcccttaagagggacaggaattgctcactcggagagcttggtttttggagacgtgagtctgcggatgctcccagctgaataaagcccttccttctacaactcggtgtctgaggggttctgtctgcagctcctcctgctgcagaaggagagcaagggagagagggatggagaaatagaaccagagggagagagagagacagcgatagagagagagagagagagacagaaaaggggggaggagagagagaggggggaagagagagcaccacagtagagcgcgaggtggagggggaagtagagaaagggagagggtgagggagttgtggagcgacagcgacagagccttggagagggaggctctgctcaggtagacagggcacctttcagcaggccggggtgtggtggagggttcttgggccgggctagaacagggggtcagggccccccacccaggaaaaccaatggagccctgagacttgtttttttccttggattggttggttgctttgggggtgcgtttcataaggtccttcctttgtttgcttctttctgtctccttgatgcggtgggccccgagatttgtagagtgtgctcgtgtgtctggcaggagccgtggcgccgagcctgtccacggggcgaggcctgggtctctctcctgtcctccggactggagtttacacgaagtcggtggcattgggaaacagggtgcacagggacggatttcctcgtggctggcgaagaaaatgtccttcctctggggaaagcagccctcgggttctggagcggaggtcttggctggggtctgtggcacccgctgcccctgctcgcccctcccaccggcttggacggttgcagtgacgctgaatgaatgaatacaattgcctgggagtccggggagcgtgaagagacccgggacctcagggaacccgcgcctgcaccctcggggtcggtcccgtcccgcccgggttgggtggggctgccgcgagtcggaagaggtgggatgctgctgcctggcggtgctgcagtggcggatcttcaggaggaggtcctgggcttcggctggggcacgggggcggtcaacggggagcagaggcggggcgcagttgggaagcacggagacaaaagggggaaagaaggagggagcgggaagccaaaagcctacggtaccgctattaccaggcggaatcccatccaagtactaaccagtcccgaccctgcttagcttcaacagatcagaggcgagccgggcgcgttcagggtggtgtggcctagacgccagcagcggcgcctggctgccccaagagcccggcccagccaagcccgcatgactccaggcgtcatcgccaccccggggccgcgggtctcggatccaggacccccagaggcgctcgcccgtgcccccgggcagctgtctccctctacacccgaggaccgccggcctcccagagagtcccgccgtctccggcggccaggcctggctcaggaccaatgtggcaccgccctgctgttgttggggggcgccgccggaggcctctgtcccctgcgcaggcttccggctctaggggcggcctcctttccgcccacgctccagtccttccgggagctccggagctccggggcttccaccacatctgccggctcaggacgggtcgtgctcatcccttaactttttaactttttgttgtttctatttatattttattgtgctatgtcttgaaatgttgttgtagctattacttttgattggatattacttagtattcctactttaaataagagtagtttgcacaccacacagctatagtgttataatattctgttttgttttgtatcctattagcagtga

SEQ ID NO: 41914 - DNA, 2300 bp, Homo sapien
cctagagaaagacatccatatccaactacaaaaatgttatagaacattaagcagatttaacccaaaaaacactacttcgaagcattcaatagtcttccaaaagtcaaagataaaagttcttaagcaagaaagagaaaagaaacaaataacctactggggagctccaacatgtctggcagcagactttacagtggaaactctactggccgggagagagaagcaataaatatttaaagtactaaaggaaagaaacttttaccttagaatagaatatacagtgaaaatgttcttcaaaaaaaaagaatactgactttttcagacaaacaaaagctgaagtattttatgaataccatacctgtcctaaaggaatgctaaagggagtacttcaatcaggaagaaaaggacattaatgagtaataaatgatcacctaaaggtaaaaaaaaatcctcactgctaataggatacaaaacaaaacagaatattataacactatagctgtgtggtgtgcaaactactcttatttaaagtaggaatactaagtaatatccaatcaaaagtaatagctacaacaacatttcaagacatagcacaataaaatataaatagaaacaacaaaaagttaaaaagttaagggatgagcacgacccgtcctgagccggcagatgtggtggaagccccggagctccggagctcccggaaggactggagcgtgggcggaaaggaggccgcccctagagccggaagcctgcgcaggggacagaggcctccggcggcgccccccaacaacagcagggcggtgccacattggtcctgagccaggcctggccgccggagacggcgggactctctgggaggccggcggtcctcgggtgtagagggagacagctgcccgggggcacgggcgagcgcctctgggggtcctggatccgagacccgcggccccggggtggcgatgacgcctggagtcatgcgggcttggctgggccgggctcttggggcagccaggcgccgctgctggcgtctaggccacaccaccctgaacgcgcccggctcgcctctgatctgttgaagctaagcagggtcgggactggttagtacttggatgggattccgcctggtaatagcggtaccgtaggcttttggcttcccgctccctccttctttcccccttttgtctccgtgcttcccaactgcgccccgcctctgctccccgttgaccgcccccgtgccccagccgaagcccaggacctcctcctgaagatccgccactgcagcaccgccaggcagcagcatcccacctcttccgactcgcggcagccccacccaacccgggcgggacgggaccgaccccgagggtgcaggcgcgggttccctgaggtcccgggtctcttcacgctccccggactcccaggcaattgtattcattcattcagcgtcactgcaaccgtccaagccggtgggaggggcgagcaggggcagcgggtgccacagaccccagccaagacctccgctccagaacccgagggctgctttccccagaggaaggacattttcttcgccagccacgaggaaatccgtccctgtgcaccctgtttcccaatgccaccgacttcgtgtaaactccagtccggaggacaggagagagacccaggcctcgccccgtggacaggctcggcgccacggctcctgccagacacacgagcacactctacaaatctcggggcccaccgcatcaaggagacagaaagaagcaaacaaaggaaggaccttatgaaacgcacccccaaagcaaccaaccaatccaaggaaaaaaacaagtctcagggctccattggttttcctgggtggggggccctgaccccctgttctagcccggcccaagaaccctccaccacaccccggcctgctgaaaggtgccctgtctacctgagcagagcctccctctccaaggctctgtcgctgtcgctccacaactccctcaccctctccctttctctacttccccctccacctcgcgctctactgtggtgctctctcttcccccctctctctctcctccccccttttctgtctctctctctctctctctatcgctgtctctctctctccctctggttctatttctccatccctctctcccttgctctccttctgcagcaggaggagctgcagacagaacccctcagacaccgagttgtagaaggaagggctttattcagctgggagcatccgcagactcacgtctccaaaaaccaagctctccgagtgagcaattcctgtccctcttaagggcttacaa

SEQ ID NO: 41915 - DNA, 2300 bp, Homo sapien
gtgaacaacctatagaatgaggaaaaaatatttacaaactatgtatctgacaaagatctaatattcaatatgaggaacttaaatttacaagagaaaaacaaaaaaccctattaaaaagtggccaaagccctgacttctgaatagcacttctggacccagccagggactgagggatctcactgccctaaaggaaagaacacaggcctgtctggctttgccacctgctaattgtagagaccaaaggccttgagtgaacatagggagtcgtcagaaattgcatgcagcaggacttgagcaagacctgtgctgtgctagcttcaggtctgatccagggcagtcatagtggtggtggccagaggtgcttgtgtctttcttctcccagctttaggtggcttagaacagagagaaagactctgtatctttgagagaaaataagggtagggaaagagtctgtggctagtaatccagaaaattctcctggatcttgttgaaggctgtcaaggtggtacttctctgagtctggaagaattacagcattattgggtataaggtgctccataaagcagatatggcttagatcacaacacccaactcttttcaaatatgtgaaaagccttcccaagaaagatagctacaaataatcccagacagtgaagactacaataaatactcaccttttctctctttaaattttattttttaaacttctcatatggtgctgcatgcccaagattttaatgtccagacactgaagaacatctactagcatcaacaccatccaggaaaacatgacctcaccaagtgaactaaataaggcactggggacaaatcctggagaaaaagagatatgtgatgtttcagacagagaattcaaaatagctgtatttaaaaaaaaaaaactgaaagaaatttaagataacaaagtaaggaaattccaaattttatcagctaaactcaacaaagagattgaaatagttacagtaaattaagcagacattctgagctgaaaaatgcaattggcatgctgaagaatgcattagagccatgtaatagcagaatggatcaagcagaagaaatagtgagcttgaagacaggctctttgaaaatacatagaagagacaaaagaaaaagaataaaaacaacaaatcatgccgacaggatctagaaaatagcctcacaaagacagatctaagagttatttgttttaaagaagatgtaaagaaagaggcaggggaggatctagaaaatagcctcacaaagacagatctaagagttattggttttaaagaagatgtagagaaagaggcaggggtagaaaaatttattcaaagggataataacagagaactttccaaacctagagaaagacatccatatccaactacaaaaatgttatagaacattaagcagatttaacccaaaaaacactacttcgaagcattcaatagtcttccaaaagtcaaagataaaagttcttaagcaagaaagagaaaagaaacaaataacctactggggagctccaacatgtctggcagcagactttacagtggaaactctactggccgggagagagaagcaataaatatttaaagtactaaaggaaagaaacttttaccttagaatagaatatacagtgaaaatgttcttcaaaaaaaaagaatactgactttttcagacaaacaaaagctgaagtattttatgaataccatacctgtcctaaaggaatgctaaagggagtacttcaatcaggaagaaaaggacattaatgagtaataaatgatcacctaaaggtaaaaaaaaatcctcactgctaataggatacaaaacaaaacagaatattataacactatagctgtgtggtgtgcaaactactcttatttaaagtaggaatactaagtaatatccaatcaaaagtaatagctacaacaacatttcaagacatagcacaataaaatataaatagaaacaacaaaaagttaaaaagttaagggatgagcacgacccgtcctgagccggcagatgtggtggaagccccggagctccggagctcccggaaggactggagcgtgggcggaaaggaggccgcccctagagccggaagcctgcgcaggggacagaggcctccggcggcgccccccaacaacagcagggcggtgccacattggtcctgagccaggcctggccgccggagacggcgggactctctgggaggccggcggtcctcgggtgtagagggagacagctgcccgggggcacgggcgagcgcctctgggggtcctggatccgagacccgcggcccc

SEQ ID NO: 41916 - DNA, 2300 bp, Homo sapien
tctgcagaaagaaagaaactcattctacaattcatacaaaaattcaaaggatctgacagacaaaacagtcttgaaaaagaatattagaaaactcacatttttcagtttcacagcctactacaaatctacagtaatcaagagagtgtggtactggcataagactaatagacttttagaccaatacaatagaacagatttaagatcctacaaattagcgctcacatatatggtcaatgactgttcaacaagctgtccaagtctagtcaagggaggaaagaacagtctcttcaacagctggatgtcagtgcacaagagagaagttagacccctaccttgcagtatacacgaaaattaattctaaattaataaaagacttacatgtaaggactaaagtatgtaactcttagaagaaaacacaaggtaaacctttatgacctttgagttttaagtgtattttgaaatatgacagaaaagcacagataacaaaagaaaatacacgtaaattagatttaatcaaaataaaaaacctttatgcatcaaaggatactatcaagggagtgaaaagacaacccatagtatgtgagaaaatatgtatctgataaaatcaaagtgcgtatctgataaaagcttaatatcccacaactcaacatcagaatttctaacatcccaattaaaaaataggcaaaggacttgaatagacatttctccgaagaagatacacaaatgtgtaagacggataagaaaagatgctaaacactgttattcattaataaaatgcaagacaaaacccaaatgagataccactttgcatccactagtaaggctttcataacaacgacacagaaaatcaatgttgctaaggaggtggagaaattggagccctcatgaactggctgctaggaatagaaaatgatgcacttgccgtggaaaacaatttggtggttcctcacagaaacacacagagaaacaagagctgctggcttccgggttctcctgggctggcgcggtacgtcccggaatcgcaggcgcgcatcccttcccgcctgagggcctgcctggccgtgactcccacccctcttctcctccgaagagacgtcggggccgctccaggggccgtccgcagccaccggggatggggctgagggtcggttcctgccccggtgcagccgccgccgagcagaccgcctggcttggccgcagccacggcgacatccaggcccgggtctgcgaggctgggcgcgccagccagcttgggagttgcctggcgcctgtagctgggcgcccaggtggtgagcatggcctgggcggcctctggatcgcaagtgctcctggcctgagagcccgccagaccctgcccccgcccggctcctcctatgccagagctcgacacctctagccaagggccctctgcagccacgggggatagggctgagggccggttcccgcccccgtgcagctgctgcagggcagaccgcctggcttggccgcagccacacggacatctggccctcgttccgagatgtgggaagtgagggcggactcgggagttgcctggaggttgctgcctgcacacagaaggcggctgcagcttgggtgcccaggcgggctggaggtgcatggcctggtcggcctcgggatcgccagcgcgcccagcctgagggcccccaggctgtgcctcccgcccagtcctccacctgagggagatcggggccgttggtatgggccctcagcagtcaccccgtgtggggttgagcggcggcttctcagttctcgctcctgtgcagccgccgccgccggtcagaatgcctggcttggccgcagccactgggacacctggccctagttctgcgatgctgacagcgcgagcgagctcgggggttgccaggcagctgctgcctgcacacagagggcgactgcagcttgggcgcccagtcggcggagcatggtctgggtggctgctggaatgcttgcgctcgaggcctgagggacccactgttggtgccacctgccctgctctgcgcctctccacgcctgcgccggcgccccctccgcgcctgcgccccctccgcgcctgcaccccctccgcgcctgcgcctctctgcctttgcgaagggcgctctgcctttgctagggcggagctgccttctcctcggcacagacccggagagcatcgcgagggcggagctgagttctcctctgcacagacttcggagatacagcgaaggcggagcagtgttcgcctcagcacagacccgggcgggcgggccgtgggtaccgcgagggcggagctgcgttctgct

SEQ ID NO: 41917 - DNA, 2300 bp, Homo sapien
aatagctgcaaaaaacaaacaaaaaaaaacaaacaaaacttaggaatatacctagcaaagtaatcaaaagacctctacaatgaaaattacaaaacactgctgaaaggaatcatagatggagccaagcacgttggcgcatgcctataatcccagctactcgggaaaccgaggcaggagaatcacttgaacccgggaggcagaagttgtagtgagccgagatcacaccattgcactcccacctcagcgacaagagcgaaactacctctgaaaaaaaaaaaaacaagaaagaaaagaaatcatagatgacacaaacaaatggaaacacatccccatgctcatggatgggtagaaccaatattgtgaaaattaccattctgttaaaggcaatctacgaattcaatgcaatccccatctgaataccaccatcatccctcacagaattacaaaaacaattctaaaattaatatggaaccaaaagagtgccatgtagccaaaccaaggctaagcaaaatgaacaagcctggaggcatcacactacttgatttcaaactgtacaataaggccatagttaccagaacagcatggtactggtttaaaaataggcacatagaccaatggaacagaagagagaactcagaaattaacccaaatacttacagccaactgatctttgacaaagcaaacaaaaacataaagtggggaaaggacacccttttcaacacatgaagttgggataattggcgagccacatgtaggggaataaaactggattctcatctctcaccttatacaaaaatctactcaagatggattaagaatttaaacctaattcctgaactgtaaaaattctagaagataacactggataaacccttctagacattggcataggcaaggatttcatgaccaagaacccaaatgcaaatgcaataaaaacaaagataaatagctgggacttaattaaactaaagagcttttgcatggcaaagggaacagtcagcagagtaaatagacaaatcgcagagtgggacccctgaccctgacccctaaccactgaccctgacccctaacccctgacacaaaccctaaccactatccctaaccccaaccctcaccctaacccaaccctaacccctaatccctaacccctaacatctcttaaaccctaactctaaacgttgactcctaacccctaactctgaccccaatccctatctccaacctctaaccctaaacttaacccctaacccctaaccctaacaccaaccttaaccctaggttcgttactaagtttgtattgactatgtcaatgttgattattatgatggctgtctttggactgcacggcagcgaggggattgcggatcttatattaatatttttgtattgaggcagcgcattagcattacaggtgcttgttacatgagcaatgggggtgtcatactttgggtgtcatgtctgcattaggaatgccgcatttgtcttccgaggctgcggtgtggatctcgcactgcggccgcctcgccttggctggggagaacctcggtgggcaggattcagaggggcttttggtttcccgttttccacactgaacccttctaactggtctctgaccctgattattcagggctgcaaacaggaaggattttattcaccgttgatgcggccccgagttgtcccaaagcgaggcagtgcccccaaggtctgtgctgaggagaacgctgctctgccttcgcggtgtcccctgggtgtgtgctgagcagaacgcagctccgccctcgcggtacccacggcccgcccgcccgggtctgtgctgaggcgaacactgctccgccttcgctgtatctccgaagtctgtgcagaggagaactcagctccgccctcgcgatgctctccgggtctgtgccgaggagaaggcagctccgccctagcaaaggcagagcgcccttcgcaaaggcagagaggcgcaggcgcggagggggtgcaggcgcggagggggcgcaggcgcggagggggcgccggcgcaggcgtggagaggcgcagagcagggcaggtggcaccaacagtgggtccctcaggcctcgagcgcaagcattccagcagccacccagaccatgctccgccgactgggcgcccaagctgcagtcgccctctgtgtgcaggcagcagctgcctggcaacccccgagctcgctcgcgctgtcagcatcgcagaactagggccaggtgtcccagtggctgcggccaagccaggcattctgaccggcggcggcggctgcacaggagcgagaactgagaagc

SEQ ID NO: 41918 - DNA, 2300 bp, Homo sapien
cagacttcggagatacagcgaaggcggagcagtgttcgcctcagcacagacccgggcgggcgggccgtgggtaccgcgagggcggagctgcgttctgctcagcacacacccaggggacaccgcgaaggcagagcagcgttctcctcagcacagaccttgggggcactgcctcgctttgggacaactcggggccgcatcaacggtgaataaaatccttcctgtttgcagccctgaataatcagggtcagagaccagttagaagggttcagtgtggaaaacgggaaaccaaaagcccctctgaatcctgcccaccgaggttctccccagccaaggcgaggcggccgcagtgcgagatccacaccgcagcctcggaagacaaatgcggcattcctaatgcagacatgacacccaaagtatgacacccccattgctcatgtaacaagcacctgtaatgctaatgcgctgcctcaatacaaaaatattaatataagatccgcaatcccctcgctgccgtgcagtccaaagacagccatcataataatcaacattgacatagtcaatacaaacttagtaacgaacctagggttaaggttggtgttagggttaggggttaggggttaagtttagggttagaggttggagatagggattggggtcagagttaggggttaggagtcaacgtttagagttagggtttaagagatgttaggggttagggattaggggttagggttgggttagggtgagggttggggttagggatagtggttagggtttgtgtcaggggttaggggtcagggtcagtggttaggggtcagggtcaggggtcccactctgcgatttgtctatttactctgctgactgttccctttgccatgcaaaagctctttagtttaattaagtcccagctatttatctttgtttttattgcatttgcatttgggttcttggtcatgaaatccttgcctatgccaatgtctagaagggtttatccagtgttatcttctagaatttttacagttcaggaattaggtttaaattcttaatccatcttgagtagatttttgtataaggtgagagatgagaatccagttttattcccctacatgtggctcgccaattatcccaacttcatgtgttgaaaagggtgtcctttccccactttatgtttttgtttgctttgtcaaagatcagttggctgtaagtatttgggttaatttctgagttctctcttctgttccattggtctatgtgcctatttttaaaccagtaccatgctgttctggtaactatggccttattgtacagtttgaaatcaagtagtgtgatgcctccaggcttgttcattttgcttagccttggtttggctacatggcactcttttggttccatattaattttagaattgtttttgtaattctgtgagggatgatggtggtattcagatggggattgcattgaattcgtagattgcctttaacagaatggtaattttcacaatattggttctacccatccatgagcatggggatgtgtttccatttgtttgtgtcatctatgatttcttttctttcttgtttttttttttttcagaggtagtttcgctcttgtcgctgaggtgggagtgcaatggtgtgatctcggctcactacaacttctgcctcccgggttcaagtgattctcctgcctcggtttcccgagtagctgggattataggcatgcgccaacgtgcttggctccatctatgattcctttcagcagtgttttgtaattttcattgtagaggtcttttgattactttgctaggtatattcctaagttttgtttgtttttttttgtttgttttttgcagctattgtaaaaggggttgagttcttgatgtgattctcagcttggtagctgttgatgtatagaagagctactgatttgtgtacattaatctcgtatctggaaactttgctgaattcttttatcagttctaggagctttctagaggagtccgtagggttttcaaggcgaaagatcatatcgtcagcaaccagtaacagtttgacttcctcttcaccgatttggatttcctctatttccttcttttgtctgattgctctggctaggacctccagtactatgttgaaaaggagtggtgagagtaggctcttcgtcttgttccagttctcaaagggaatgctttcaccttttccccattcagtattatgttggctgtgggtctgtcatagatggcttttattacattaaggtatgtcccttgtatgcctattttgctgagagctttaatcata

SEQ ID NO: 41919 - DNA, 2300 bp, Homo sapien
taattttagttaataataataatgtatcaatgttggctcattaattgtaacaaatataccagacgaatgcaagatatcttaataataggcatgatgagctagggagggtttaaggaactctctgtattgtctgctcaattttcttgtaactgcctcccaaaataatgtctttttattaaaggaaaacatgctgctaccactatatgcttagtgtcctgtgcatttcaagtctgggtggtatgtctagcagaaatatattaacatgtcccaggctgatggtattgaataaaggatttagatggccataaaaaatggattttgtataatggatttctgagttgataagaaagcagtatgagtatatcaccataatacaaaacttagtgatttgaaataaggcaaacatatcatccattttgccagtgtaatgataacacacacactgtataaacggatattggaacatcagtttgtcactgggtgttcaggatgtagaatatacatcaacttaaattttcacatttagtaaagctctagcttcctcttatgctagctccataaataagacaaactttttctttcatcctctctgatggccaatgccggcctaaactcttgcctgttaggaattagtacacatctcctagctcagagacacctacacgagtgactcttggccagtggaacctggttcactgtgccctccagtgtggggccaggcattgttcctctcccttgcttggcatcccagtcttgtgggccctctttcagttgttcattcactccctgcttcctctcttcacaaaaactactctgttgaccttggcttagaattctctacccaccctccacccacctctttatgctgatcctgtccttgtcctgtcttgcaaggctcaacagttaagtctcagggcagccttccctcacccttcagtcctgccgctttatataaccatcctgtagactcctgctattttccatcaatctgagagcctcagttccctggtgtgataatgtgactaaagtcagcctcacctaattaaacagggagcccccagaaagcagggctcactgtcattcggcagtacctgccctgagtctggcccgtccctgctgcagctcaggagaactcagcagcccaagacagcaccttcgtagggctcagcaatacagcttgaactaagggagggagggaaagaaagaggcagagaataaatgaatcaacttagccagaattttatagtcagaagatctacaaagaagtggctttaatttcagcatatatttgcttttaaagacaaaatgacattttaatgctattattagtggtagggaatgggtgaaatgtccatgtgttggtgcttgaggtcactaaacaacttaacatagctctgagtagaggtttcaaagagagttttcaatgaaatgatttgttttacaaaatagggcacattatctcctgttttgttgtggaaacaaaacccatagaataatttcccttttaagcaattctttgtttccattgagggaagctgaactcagaatatgccatgttagatcaggagagattcaggacagacattgggaagaattttctagctggggtgttgttaatcactttcccacagtaaaaaagcctgcacagcagcctttttttgatgagaattaaggcaataagacaattaatagtctaacccaataacagctgaattgaccagatatccttcaagacttctgagagacttcctcagcacatggacttgagctcttacataatgttctcattcacagactgcattgtgcctgcaatctcatgtgttattattattattagtaatagtattttagacggagtctcactctgtccccaggctggactgcagtggcatgatctcggctcattgcaacctccgcctcctgggttcaagcgatcctcctgcctcagcctgccaagtagctgggattacaagcgcctgccaccacacccagctaatttttgtatttttagtggagacggggtttcaccacgttggccaggatggtctcgatctcctggcttcatgatctgcctgtctcggcctctcaaagtgttgggattacaggcgtgagccaccgcgtccggccccatctgttattattcaaggtattttagtgcatcaccgcgcacacgatcttgggtcttgccattattttgttatccctgtacttgaagaagagagacattctgactggcattaactcaacattttgtgtgatggactattacatatggctcagaacgcatttttgtttgctat

SEQ ID NO: 41920 - DNA, 2300 bp, Homo sapien
ccagaaaacaagtcttagcaaatttaagaagattgagatctcaccaagtattctttttgactacagtggcatgaaactgaaaattaaaaacaggagaaaacttagaaaagtgacaaatatgtggaaatcaaccaacacactcctgaataaccagtagatcaaagaaaacatcaaaaaagaaataaaatatcttgagacaaactaaaatgaaagcacgacatactaaaactgatgagatgaagcaaaagccgttctaagagagggaagtttatacagataagtgctaaataaagaaaaaagatcccaaataaacctcaaaaaatagaaaaaaataatcaagcccaaaattagaagaaggaaataacaaagatcatagcagaaataaatgaaatagactagaaaaacaatagaaaagatcaatgaaacgaagagttgattttttgaaaagataataaatattgaccaacctctcactaggccaagaaaaaagaaatctcaagtaaataaaattagaacaaaaaaggagatattaaaattggtaccatagaaatacaaaggataataatagtctactctaaacaactatgtgtcaacaaattgtttaacttagaatagagaaatttctagaaacatacatccactagactgaaacatgaagaaatagaaaataaaaacagataaataatgattaaaaatattgagtcagtagtcaaaaagctcctgaaaaaggaaaatccaagaccagatagcttagtggagaattctaccaaatgtttgaagaagaattaatacgatttcttcacaaactcttccaaaagttgaagaggagggaacacttccaaacattttttatgaggccagcattaccctgataacaaagacagaaaaggacactacaaggatgacagagatttttaaggtacaaatgatgtattgttggaattgaaaatacaggctttgttagtacaaagatttgtgtgtggataggtggatgtgtactggtgtgtgcatgcatacatatacaagcttaacttgttttattgcacttcactttattatgcttctcggatattgcagtttgtacaggttgaaggtttgtggcaaccctgcaccaagcaagtctaccagtgccacttttctggtagcatgtgcttattttgcacctctgtgttacatctttgtaattcttgcaatatttcaaatgttttgttattattatatctgttatggtgatctgttatcagtgatcattgatattactattgtcattgttttggggcatcacaagccatgctccaaaagacaatgagcttaattgatacatatgtgtattcaaatggttccatcgatctgcccttcctccatctcaccctctcctcaggtctgttttctgagacacagcaatattgaaattaggccaattaataactctataaaggcctctatgtgttcaagtgaaagtaagagtcacacatctcttattataaatctaaagtgagaaatgattaagctgagtgaggaaggtatgttaaaagctgagacaggccaaaaggcccaggctggtctcgaactcctgacctcaagcaatccacctgccgcagcctcccaggtagctgagattaaaggcatgagccaccatgtccagcttctatgcattattttaaatggagtattgaagactctgttactgtagaactatttctaacttcaattctgtcaatatttgggtcacaggccttaatgtgattacacgctggtctgatgctcatggccaggacattttgttttcctgttggacataaacaatctcacagaatatcaacttcagaaggttaatctgagaccgtgataagtgcaaacaaaaacaagggcactttataatgttgtctaagtgcagataaaaaacaaggtcttgatgccacccacaaaatacttaataatcatattgctcctgctttctgacagcatccaatctaaagtcttcactttctgagatcctgtccgaaatcaaccaattaaagtccaaatcgtataatagtttctctctaactcctcccactgagatgacccatagtaccccattccttgctgcaatgtaattatatttacttacaagtgtgctcctggtggtctttaactgaagggcactgactgggtcactggtgaagttccccgcaggaactgagtcagaccccatctcagggccctgcacaagataggtacctgctctaaggcgtggaccctcgccacagccctggcccgtcttgacgggcgagggttactgtacttgtcccaaccgt

SEQ ID NO: 41921 - DNA, 2300 bp, Homo sapien
tctcatgaccttgtgatctgcctgccttggcctcccaaagtgctgggattacatgcatgagccatcgtgcctggcccgattttttttttttttttttttttttaagaaactgaagcctctacttcggtctcttggtagccttcctcctgggaagctctttcttgaatctagtcaccattccattccaccacgccacatatgtcttctccaggcaacagccaacatcaattgtcagccatgtaagtgagtttcagatgactgtggccccggctaatgtttgactgtagcacatgtgagaggccccatgcagaaccacctagaaccatggagagcagtcaccctgcagaaccatgagtaagttaagcttaggggtggttaattacgcagaaataagtaaacagagcactccaccaggtattaaagattattacaaagattatgtaattaaaacaatacagaacagaccagggttgactacaagatcaatgggacagaataaagttacatatccaatgcctgctgctgaccacagggatttgtcacagatctcatcacttagaaaccctacagtggtttccctggtcaccttccagtcaccactacaccttggctccttttagcactcctccctagcttatcactatataaaattgctttatctctttgtattgtctgtcacctgccaccataatgtgaatttctagacctccatagcatgtaaagctctagaacagttctttgaacacagaaggtgcttgacaaatattttctgaaagaaaaagaagatacttcaatacctcagtttactaaggacgtggggctaccatatggctgcctgaacaaatacagcttgacattcactttcttgctactgattgaagtgtattaacttgtgtaatcacacaactaccctatggggtaggtgcccttatttctccatttggcagagagggactaagtatcttaaccaaggtcacacggctttcaagtgccagagccaggactcagatctacacaggtctggctccagagcccccaatctaacctcttaacctctctgctttactgggctaaaccttcaccacctatcatatggaaaaagaaattcaatagaaagttatatggaaaaaatacaaccctgtgttaatattagaaaatccatagtaacatgtagaatgaggaagcttcctcaagcccaactatacaggtcagatcggttgaaaaaataaaactaacaaatttttacatgtcaaaatatgcaatatttgaaaatccaaggctaatatctttaaataggcaaagatttattaataccccttgacacacaaacaggaagtgagaaaatgggcaactgacacaaatcgataattaactgtgaggacataggtggtggagtctctcctaatcctctattcttggagatctgaatgcctgccattcgcgtatgggaagaacagagacggtcatggaaaacagcatttaatctagaaaggaccacaatgaggtcaaagggcggtctcagggcagtcttaagagctccccatccccaaagaactggcaaggactctccaggtgctcgtatgcgactgctgcccaactcccatcatgaactcagaagacctgtcattttctgaaattttcatgacttctaagacactagttattggggaaaacttcaaattatttaaataatgagaggcgaataacattgctaaactcatgaatactctgtatttaaaacctccactggcgatcagggcacatagaatctctactactgatccctgacgctggccatcccccaacccgtcggcccacggaccccagccctgaccccacctcctcccagcatcttacacaaggattctcaccacactccccagagactcgcctgcccagggcccctctctaaccccatatagctcaggtctctgatccagagactgcatcaccgacctctccgactacctatttccagattagagtccctgatcacagaggcattgtctaaaataactagctcttacaactatgtccacttcaggaaccgccctgtgatgtcagaactttgaggccgcccggccagggctgcacatgctcagtgaggtcggcgcccgccagtaacaaacatggctccctgaagccgctcaggctcaagagcaacatggaggtctgcacttaatcgctcctctccgggggcggccataccgaggaggcgtctcttccgtgcaggcaggctctcctggggacctcagagattctctccagcggcagcggaaaacggacaatgggtggattcg

SEQ ID NO: 41922 - DNA, 2300 bp, Homo sapien
tatgacatagctattcttgtctaggtatttacccaagagaaatgaaaggatattttcatatgaccatctgtgcataaatggtcatagtagcttatttataacagatgaaaactggacacaattcaaatgcccatcttcaaatgaatgaacacacaaattgagctatattcacacaacgagatactactcagcaataaaaaggaatgaattattgatacatattacacattaatgaatttcaaaataattctgctgaaagaaaaaagccagataaagaaaagtaaatactgtgtggttccatttatatgacattctggaaaatagaaactaatcatgagagagatcagatctgtggttgccagggatttgagggaagcagggaggttatgggggaggggttatcaagagggaggagaatattttgctggggtgatggatatattccttattttaattgtgatgatagtttcatggttgtatacatatgtaaaaatttaacaagtcctgcactttaagcatgtgtgttcatcatatgccaataaagcctcaatatggctgttaaacaaaaattaccgaactgctaaatatgtgtatcactctaggaaatgaaagacacctcttcaactgcttttgtgtcttgacttttttcccaaaggaagacctatattttgcttcatttctttctactctacatttctttttactctgcttgcatttagtttaaaagaaaaagctctctgttggtgatttctaatctattttaaagtaaataattgtactgtccaattagagactgagataactcatgaattatcacacaggttgttctcctgtacaatatatatgattttgagtactaatattacacagtgaattcagaattgtgtgtatgtacatacataccatagtcttataaataacttcaacttgcaataattaacttgcagttaattcttacagtagtatgagtttgggcctcttaaaaaaagaactaaaaccaactccctgcctgagaatagaaacacacacacacacacacacacacacacacacaccaaattgaataatcttgttttctcgcttacaattgtgggcattcatttatggaattcttggcagctatgttagcataaaaccccacctataattatcattcatattagaataatatttcacaaatgtggtcagtattgtcttctgcaacattacagttagttggtggaataagttctagtgttgtacagcactatagggtaaccacagtaaacaacagtgtgttgtcttttttttcagatacctgggagagaggatttttcatgttaccaacacaaagaaatgataaaggtttgaggtcatgggcatgctaattaccctgatttgatcattatacattttatacatctactgaaatatcccactgtaccccataaatatgtacaattattatgtgtcaagtaaaatatgaatatatatagtaaataaataaatgaagtaatttgccattacttaacatttcattaaatgtatgtttccaaaattatatttgttcttgagaccttttgagtgatcacagtttctgctattctccataaggcctcagtttgacagggtgatgaaatcttgaataaaacacaaaggaatgtgtttgtatttgcagtgcttcccttgcaggtgaaatggccaccagacccaggctttctggaatgcattcattttctgcagttgaaagggacaatcccggatctgaaagaaagagccacagtgactccaagagtggagccagggcatgctggacactgcatagctatggccaagtgtgtcacctctgagggagatgtgagagaaacgcagagggatcgcttgtgactgtgccttctcgatgtatgatggactgttctgctcaaatagtaagtgtgaccaaggagccggtgaacataggaaacaaagaatatttcatttgacattataaggaatgcgacaattctagtcacttgaaagtgaactatatctgtcgagaattcctagttttaattgggaagaaatgcgcttctcttcttgaaaagccacaggttattgctgttatgtctaatatcagtcctctctggatttctcaaaagattttctgtatatcctaccattttccttctgttgctgcagtttggaagtagtttgttatcaggattatcaaagcatcattgctatttatgacaatgactttaagaaatgcaagaatatttggaacactgtagaaaaaatattttagcctggaaggcaaatactaatttcaggaaccattgatc

SEQ ID NO: 41923 - DNA, 2300 bp, Homo sapien
tttactaaagatatagctccccctaactttcaggtaaactagtgcaactcaatacaggttattatttcaaaccttcaaagttcttccccttctctaagcgaattcccttctttaagctggttttatgatatgggagctgagttttcagaaacagaccctattggttctttgaaatatgcttcatttctcccctactgcttacagcttcccctaagtcttcttccaaaaactctcacaatgaaactgttgttcctcctccatctaatgagaagaccaaggtagctattgtaaaagttaaagacctaaaacaaactttggcaactgagacaggatatcaagatgtgaatgcctggttggaatggatcaaatactccattcgcactttaaacaaaagcaattgttatgcttgtgcacacagcagaccagaggcccagattgttccctttccactaggatggtccttcagtcaacgaggcatgggctgtatggtagctcttttccagggttccacagcctggtgtaacaagtcatgtcaatctctctctctgctctatcccaaagttcaacaccttgcaggtcagcccccaaggaccatccagcttccttctcctgacactaagttcacttcatgtctctcacaacaaggaggaaacttagctttgcttggaaacctaaaagatgcagtaagcttaagactttccaagagcttaccaatcagtcagcccttatacaatcctgagcagatttatggtggtattgtggtggatctttacaggacactctgtcaagtaactggagcagcgctggtgctctagtccagttggctatacttttcactctggcatttcatcaaccagaaaaagggaaaacacaacatagtaaagcaagggaagtcctttatgggtcttttgactcccacatttatttagatgctattggaatcccatgaggagtaccagatatatttaagcccaagttcaaatagctaccggatttgaattgatattttggtatgtgacaataaaaatgtagattggataaattaaatctataataatcaacagtggtttattaattacaccaggggtgttgtcaaaggaatagcggaacaattgaggcccactagccagatggcctgggaaaacagaatggccctagttatgatattagctgaaaatggtggtgtttgtgttatgattaaaactcagtgttgtacctttatccattgggggcaaacaacactgcccccaatgggagcataacaagggccctacaaggatttaccactttatccaatgaattagctaaaaattctggagtcaataaccctttctcaagatggctagaaaggtggttcagtaaatggaaagaaattgtagcctcaattcttacttctcttacagcagtaattggtgtactcattcttgttgggtgttgtgtcataccatgcatccatgggctagtgcaaaggcttatagaaacaacactttctaaaacctcccttagctgtcctccaccttattcagataggcttttccttttagaggatcaagttgaaaaaaaaaatccaagacatgctaaaaaggtttgaagaggaagggctataaaaattgaaagaggcaattgtagaatacagtgaattactcttcaaaggttttagcctgttaacatcctttaaaattcaagagagggaagattgttaagtacagtgagttctcatttcctcttcaaagagtcaataagtcagtatgttcagcttctctgttctttgttctccatttaaagtttaacttcctcattctttatgcctccttgcccctagtttcagtaaatgaccccctcctagtccctatcacctactctgtccttagtcattcttagtcacttgctctgttcttagtcatccttagtcacctgctctgtaaccatccttcctgaggaaactacccaccccgccactctggcttgcacccctgtcctctttgaagtagccagtcaaaattagcttagagtgtgcagtacaaccctatccaataggggaaagatacagcagtagggactatctgtattaggaataagaaccctttcccctcccttatccagtgtgcccttgccattgctccatctgcaagactcacccttctatagaagtaaatttgccttgctggagtgttaacttgttgttggagtgctaactcttctttgtggcaccaaaaagttatttccaacacgaagctgcacccttggtggagggaacatctgacgaagttcaatgtttggggaaaacaatatctggaaag

SEQ ID NO: 41924 - DNA, 2300 bp, Homo sapien
cttctgtctattttttatgtagagctatttccttttctaccataggccccaaaatgctccaaatgtccacttgcagattttacaaaaagagtgtttccaaactgctaaatcaaaagaaaggttcaattctgtgagatgaatgcacacatcacaaaaagtttcacagaattcttctgtctagtttttatgggaagaaattacctttcccaccattggcctcaaagtgctccaaatgtccacttgcagattctacaaagagaatttcaaaactactcaaaagaaagatttcactctgtgagacgaatgcacatatcacaaagaagttctcaggttgcttctcttgagcttttatgtgaagttatttccttttctaccattgaccgcaaagtgctccaaatgtccaactgcagattctactaagagtgtttccaaactgctcaatcaaaagaaagattcaactctgtgagatgaacctgcacattccaaagaagtttctcagagttcttctgtctagtttttatgtgaaaatatttccttttccaccgtaggcctcaaagcactaaaaatgtgcatttgtagattctataaaaagagagtttcaaaactgatcaatgaaaagaaaggtttcctctttgagatgaatgcacatataacaaaaaatttatcagattgcttctgtctagattttatgtgaagatgtttccttttctaccataagccacaaagcgctccaaatgtccacttgcagattcttgaaaaagagtgtttccaacagctcaatcaaaagaaaagttcaactctgtgagatgaatgaacacatcacaaacaatttctcagaatgcttctgtctagtttttatttgaacatatttccttttccacaataatcctgaaagcgctccaaacatccaattgcagattctacaaaaagagtgtttcaaaactgctcatcaaaagaaaggttcaactctgtgagattaatgcacacatcacaaagaaatttctcagaattcttctgtctagctttaatgtgaagatattttctattccccaataggccccacaacaggcctcgaagccctccaaatatccacctgcagactccacaaaaagagtgcttccaactgctcaatcaaaagaaaggttcaactctgtgagatgaatgcacacatcacaaagaggtttctcagaattcttctgtctagtttttatgtgaagatatttcctcttccactacaggtctcaaagtgccccaaatgtccactttcagattctagaaaaagagagtttcaaaactgttgaatcagaagagaggtttaactctgtgagatgaatgcgcacatcacaaaagtagtttctcagattgcttctttctagattttatgtgaagatatttctttttctaccataggctgcaaagcgttccaaatgtccacttgcagattctacaaaacgagtgtttccaaactgctcaattaaaagaatgattcaactctgtgagatgaacacacacatcacaaagtttctgagcattcttctgtctagtttttatgtgaagttatttccttttccaccataggcctctatgcactccaaatgtccacttgcagattcttgaaaaagagagtttcaaaactgctcaatcaaaaaaaggtttaactctgtgagatgaatgcacacataacagaaatgtttctcagattgcttctgtctagattttatatgaagatatttacttttctaccataggccgcaaagcacacaaaatgtccactttcagatactccaaaaagagtgtttccaaacttctcaatgaaaagaaagtttcaactctgagagacgaacgctcacatcacaaagaagtttcacagaattcttcagtgtagtttttatgtgaagatatttccttttccatcacaggtctcaaagcgctccaaatgtccacttgcagatgctacaaaaagagagtttcaaaactcctaaatcaaaagaaaggttttactctgtgagatgaatgcccacatcgtaaagaagtttctcagattagttctatcgagattttatatgaagatatttccttttctaccataggcagcaaatcgctccaaatgtccacttgcagattctacaaaaagagtgtttccaaactgctcaataagaagaaaggttcaactctgtgagatgaatgagcacatgagaaagacgtttctcaaaattcttctgtctagttcttatgtgaagatacttattcttccaccataggccgcaaaatgctctaaatgtccacttgcagattctaca

SEQ ID NO: 41925 - DNA, 2300 bp, Homo sapien
tttactaaagatatagctccccctaactttcaggtaaactagtgcaactcaatacaggttattatttcaaaccttcaaagttcttccccttctctaaaccaattcccttctttaagctggttttatgatatgggagctgagttttcagaaacagaccctattggttctttgaaatatgcttcatttctcccctactgcttacagcttcccctaagtcttcttccaaaaactctcacaatgaaactgttgttcctcctccatctaatgagaagaccaaggtagctattgtaaaagttaaagacctaaaacaaactttggcaactgagacaggatatcaagatgtgaatgcctggttggaatggatcaaatactccattcgcactttaaacaaaagcaattgttatgcttgtgcacacagcagaccagaggcccagattgttccctttccactaggatggtccttcagtcaacgaggcatgggctgtatggtagctcttttccagggttccacagcctggtgtaacaagtcatgtcaatctctctctctgctatatcccaaagttcaacaccttgcaggtcagcccccaaggaccatccagcttccttctcctgacactaagttcacttcatgtctctcacaacaaggaggaaacttagctttgcttggaaacctaaaagatgcagtaagcttaagactttccaagagcttaccaatcagtcagcccttatacaatcctgagaagatttatggtggtattgtggtggatctttacaggacactctgtcaagtaactggagcagcgctggtgctctagtccagttggctatacttttcactctggcatttcatcaaccagaaaaagggaaaacacaacatagtaaagcaagggaagtcctttatgggtcttttgactcccacatttatttagatgttattggaatcccatgaggagtaccagatatatttaagtccaagttcaaatagctaccggatttgaattgatattttggtatgtgacaataaaaatgtagattggataaattaaatctataataatcaacagtggtttattaattacaccaggggtgttgtcaaaggaatagcggaacaattgaggcccactagccagatggcctgggaaaacagaatggccctagttatgatattagctgaaaatggtggtgtttgtgttatgattaaaactcagtgttgtacctttatccattgggggcaaacaacactgcccccaatgggagcataacaagggccctacaaggatttaccactttatccaatgaattagctaaaaattctggagtcaataaccctttctcaagatggctagaaaggtggttcagtaaatggaaagaaattgtagcctcaattcttacttctcttacagcagtaattggtgtactcattcttgttgggtgttgtgtcataccatgcatccatgggctagtgcaaaggcttatagaaacaacactttctaaaacctcccttagctgtcctccaccttattcagataggcttttccttttagaggatcaagttgaaaaaaaaaatccaagacatgctaaaaaggtttgaagaggaagggctataaaaattgaaagaggcaattgtagaatacagtgaattactcttcaaaggttttagcctgttaacatcctttaaaattcaagagagggaagattgttaagtacagtgagttctcatttcctcttcaaagagtcaataagtcagtatgttcagcttctctgttctttgttctccatttaaagtttaacttcctcattctttatgcttccttgcccctagtttcagtaaatgaccccctcctagtccctatcacctactctgtccttagtcattcttagtcacttgctctgttcttagtcatccttagtcacctgctctgtaaccgtccttcctgaggaaactacccaccccgccactctggcttgcacccctgtcctctttgaagtagccagtcaaaattagcttagagtgtgcagtacaaccctatccaataggggaaagatacagcagtagggactatctgtattaggaataagaaccctttcccctcccttatccagtgtgcccttgccattgctccatctgcaagactcacccttctatagaagtaaatttgccttgctggagtgttaacttgttgttggagtgctaactcttctttgtggcaccaaaaagttatttccaacacgaagctgcacccttggtggagggaacatctgacgaagttcaatgtttggggaaaacaatatctggaaag

SEQ ID NO: 41926 - DNA, 2300 bp, Homo sapien
gatgaaatttataaatgtaaattagttaatttagattaagtgtataaatccctcaaaagatacaaactaaggcaaactcaaaaagaaagcaataaaatgcacatccctatatatctgttttaaatttattaatacccacctagataaacgaactgacaaattttactaatatttaaggagatataatttatacattacacaaaagtttaagaaataaaaaagaggaaacacttttcttttttttttttaataagaggttgctttgtacttttttttttattatactttaagttttagggtacatgtgcacattgtgcaggttagttacatatgtatacatgtgccatgctggtgcgctgcacccactaactcgtcatctagaattaggtttatctcccaatgctatccctccccactccccccaccccacaacagtccccagagtgtgatattccccttcctgtgtccatgtgatctcattgttcaattcccacctatgagtgagaatatgcggtgtttggttttttgttcttgcgatagtttactgagaatgatgatttctaatttcatccatgttcctacaaaggacatgaactcatcattttttatggctgcatagtattccatggtgtatatgtgtcacattttcttaatccagtctatcattgttggacatttgggttggttccaagtctttgctattgtgaataatgccgcaataaacatacatgtgcatgtgtctttatagcagcatgatttatagtcctttgggtatatacccagtaatgggatggctgggtcaaatggcatttccagttctagatccctgaggaatcgccacactgacttccacaatggttgaactagtttacagtcccaccaacagtgtaaaagtgttcctatttctccacatcctctccagcacctgttgtttcctgactttttaatgatcgccattctaactggtgtgagatggtatctcattgtggttttgatttgcatttctctgatggccagtgatgatgagcatttggtacaaggaggaactggtaccattccttctgaaactattccaatcaatagaaaaagagggaatcctccctaactctttttatgaggccagcatcattctgataccaaagctgggcagagacccaacaaaaaaagagaattttagaccaatatccttgatgaacattgatgcaaaaatcctcaataaaatactggcaaaacgaatccagcagcacatcagaaagcttattcaccatgatcaagtgggcttcatccctgggatgcaaggctggttcaatatacacaaagcaataaatgtaatccagcatataaacagagccaaagacaaaaaccacatgattatctcaatagatgcagaaaaagcctttgacaaaattcaacaacccttcatgctaaaaactctcaataaattaggtattgatgggacgtatttcaaaataataagaggaaacacttttcaacatgttttatgagtctaccgttatccccataccaaaaccataaaacagacattacaagaaaatgtcctgtagacaaatatgtattttgatgatgaatttagatttcaaaaacttcagcaaaatattatccaattaaatcctctcatgtctgtgtgtgtgtgtgtgtgcatgcacgtgtgtttgtaaaatatatcattactaattggcgtttatcttgggagttcaagatggtttccatattcaatcaacccatcaatgtggactatggtcacttgaaaagaccagcaaatcctctgcacaaaaggccactagaaattcattaaagcagccttccatcattctcgaaattgaccaaagcattcaactacctgagaaatatttatgtttggaaagctattgaaatgcaattaaaaatatcaggaaacctgtttttaccttttgtcctaatcttgctaaatccttcttaattttaggagacactgcttctccttccactgttcttttactttctccttcccctttgtttttgcctcccccttcctctcccttttctacattccttctctctcctaaatgctgtataaatttctacatatgtaatcatattatttacaaataggaacagttttacttatttctttccagtctgcatttattttattcttcctttttttccttacacactggatagaactctaagtattatgttgaaaaagagtgataaaagcaaacatctttgctttattcctgagcatacatgtggaaaacattcagtgtttcacagctaaatatgatggattttttgta

SEQ ID NO: 41927 - DNA, 2300 bp, Homo sapien
tctgcctgccttggcctcccaaagtgctgggattacatgcatgagccatcgtgccttgcccgattttttttttttttttttttttttaagaaactgaagcctctacttcggtctcttggtagccttcctcctgggaagctctttcttgaatctagtcaccattccattccaccacgccacatatgtcttctccaggcaacagccaacatcaattgtcagccatgtaagtgagtttcagatgactgtggccccggctaatgtttgactgtagcacatgtgagaggccccatgcagaaccacctagaaacatggagagcagtcaccctgcagaaccatgagtaagttaagcttaggggtggttaattatgcagaaataagtaaacagagcactccaccaggtattaaagattattacaaagattatgtaattaaaacaatacagaacagaccagggttgactacaagatcaatgggacagaataaagttacatatccaatgcctgctgctgaccacagggatttgtcacagatctcatcacttagaaaccctacagtggtttccctggtcaccttccagtcaccactacaccttggctccttttagcactcctccctagcttatcactatatgaaattgctttatctctttgtattgtctgtcacctgccaccataatgtgaatttctagacctccatagcatgcaaagctctagaacagttcttagaacacagaaggtgcttgacaaatattttctgaaagaaaaagaagatacttcaatacctcagtttactaaggacgtggggctaccatatggctgcctgaacaaatacagcttgacattcactttcttgctactgattgaagtgtattaacttgtgtaatcacacaactaccctatggggtaggtgcccttatttctccatttggcagagagggactaagtatcttaaccaaggtcacacggctttcaagtgccagagccaggactcagatctacataggtctggctccagagcccccaatctaacctcttaacctctctgctttactgggctaaaccttcaccacctatcatatggaaaaagaaattcaatagaaagttatatggaaaaaatacaaccctgtgttaatattagaaaatccatagtaacatgtagaatgaggaagcttcctcaagcccaactatacaggtcagatcggttgaaaaaataaaactaacaaatttttacatgtcaaaatatgcaatatttgaaaatccaaggctaatatctttaaataggcaaagatttattaatactccttgacacacaaacaggaagtgagaaaatgggcaactgacacaaatcgataattaactgtgaggacataggtggtggagtctctcctaatcctctattcttggagatctggatgcctgccattcgcgtatgggaagaacagagacagtcatggaaaacagcatttgatctagaaaggaccataatgaggtcaaagggcggtctcagggcagtcttaagagctccccatccccaaagaactggcaaggactctccaggtgctcgtatgcgactgctgcccaactcccatcacgaactcaggagacctgtcattttctgaaattttcatgacttctaagacactagttattggggaaaatttcaaattatttaaataatgagaggcgaataacattgctaaactcatgaatactctgtatttaaaacctccactggcgatcagggcacatagaatctctactactgatccctgacgctggccatcccccaacccgtcggcccacggaccccagccctgaccccacctcctcccagcatcttacacaaggattctcaccacactccccagagactcgcctgcccagggcccctctctaaccccatatagctcaggtctctgatccagagactgcatcaccgacctctcctactacctatttccagattagagtccctgatcccagaggcattgtctaaaataactagctcttacaactacgtccacttcaggaaccgccctgtgatgtcagaactttgaggccgcccggccagggctgcacatgctcagtgaggtcggcgcccgccagtaacaaacatggctccctgaagccgctcaggctcaagagcaacatggaggtctgcacttaatcgctcctctccgggggcggccatactgaggaggcatctcttccgtgcaggcaggctctcctggggacctcagagattctctccagcggcagcagaaaacgggcaatgggtggattcgggtccagattctggca

SEQ ID NO: 41928 - DNA, 2300 bp, Homo sapien
aggccagaaaacaagtcttagcaaatttaagaagattgagatctcaccaagtattctttttgactacagtggcatgaaactgaaattaaaaacaggagaaaacttagaaaagtgacaaatatgtggaaatcaaccaacacactcctgaataaccagtagatcaaagaaaacatcaaaaaagaaataaaatatcttgagacaaactaaaatgaaagcacgacatactaaaactgatgagatgaagcaaaagccgttctaagagagggaagtttatacagataagtgctaaataaagaaaaaagatcccaaataaacctcaaaaaatagaaaaaaataatcaagcccaaaattagaaggaaataacaaagatcatagcagaaataaatgaaatagactagaaaaacaatagaaaagatgaatgaaacgaagagttgattttttgaaaagataataaaaattgaccaacctctcactaggccaagaaaaaagaaatctcaagtaaataaaattagaacaaaaaaggagatattaaaattggtaccatagaaatacaaaggataataatagtctactctaaacaactatgtgtcaacaaattgtttaacttagaatagagaaatttctagaaacatacatccactagactgaaacatgaagaaatagaaaataaaaacagataaataatgattaaaaatattgagtcagtagtcaaaaagctcctgaaaaaggaaaatccaagaccagatagcttagtggagaattctaccaaatgtttgaagaagaattaatacgatttcttcacaaactcttccaaaagttgaagaggagggaacacttccaaacattttttatgaggccagcattaccctgataacaaagacagaaaaggacactacaaggatgacagagatttttaaggtacaaatgatgtattgttggaattgaaaatacaggctttgttagtacaaagatttgtgtgtggataggtggatgtgtactggtgtgtgcatgcatacatatacaagcttaacttgttttattgcacttcactttattatgcttctcggatattgcagtttgtacaggttgaaggtttgtggcaaccctgcaccaagcaagtctaccagtgccacttttctggtagcatgtgcttattttgcacctctgtgttacatctttgtaattcttgcaatatttcaaatgttttgttattattatatctgttatggtgatctgttatcagtgatcattgatattactattgtcattgttttggggcatcacaagccatgctccaaaagacaatgagcttaattgatacatatgtgtattcgaatggttccatcgatctgcccttcctccatctcaccctctcctcaggtctgttttctgagacacagcaatattgaaattaggccaattaataactctataaaggcctctatgtgttcaagtgaaagtaagagtcacacatctcttattataaatctaaagtgagaaatgattaagctgagtgaggaaggtatgttaaaagccgagacaggccaaaaggcccaggctggtctcgaacgcctgacctcaagcaatccacctgccgcagccttccaggtagctgagattaaaggcatgagccaccatgtccagcttctatgcattattttaaatggagtattgaagactctgttactgtagaactatttctaacttcaattctgtcaatattttggtcacaggccttaatgtgattacacgctggtctgatgttcatggccaggacattttgttttcctgttggacataaacaatctcacagaatatcaacttcagaaggttaatctgagaccgtgataagtgcaaacaaaaacaagggcactttataatgttgtctaagtgcagataaaaaacaaggtcttgatgccacccacaaaatacttaataatcatattgctcctgctttctgacagcatccaatctaaagtcttcactttctgagatcctgtccgaaatcaaccaattaaagtccaaatcgtataatagtttctctctaactcctcccactgagatgacccatagtaccccattccttgctgcaatgtaattatatttacttacaagtgtgctcctggtggtctttaactgaagggcactgactgggtcactggtgaagttccccgcaggaactgagtcagaccccatctcagggccctgcacaagataggtgcctgctctaaggcgtggaccctcgccacagccctggcccgtcttgacgggcgagggttactgtacttgtcccaaccgta

SEQ ID NO: 41929 - DNA, 2300 bp, Homo sapien
cgtctcaaaaaaaaaagaaaaagaacgtacaggagatcatggaataagaacaagaagagattactttccagggctctcagaaagtttctaaaaagaggtgccattgaccctgaccttagcattgtgatggagacattacagagctggtaggaaggagaagaagaaggaacggctggaacacacttggggtgaaatgagcagcatttcagtgtgggagctgcagactcagttttggtggaagagttaagagccaggatcttgtcaggaataattctgtgtccaagtgcagaatcgtggtttgctccactactgccagtaactccatttctcaatcatgatggtgatgctttttttttttttggctcccaatcccggagagtggccatactgaagtcacattacaacaattaacttttcaactattagatgattaatttttaccaagtagcaagaacagctgtttggcacgtagcagtgtggcatgagtatcttgtaaatgaattaaacaaaatatctctccaacacacacacagtcattcttgctgcatgtcagcctccacttctccctccattatttgatgctgtgaagctgaggcagccagcttgagcgaaagctttcagatctcactccaacaaagagctttgattgattcatttagtataaggtgttttatctggctagagaaatccaagctgagttttattaattactaagaaaagtatgcaatagattaatctttgatcaaaactatgtgtgaagtagaaacatattacacatatggagagcagttttatggaataaaaacaatctatgtgtggcataactgacattgtctttatatttttgggggggtgtgtgagtacggagtctcactctgtcgccaggctggagtgcagtggcacaatcttggctcactgcaatctccacctccttggttcaagcaattctcctgccgcagcctcctgagtagctgggattacaggtgcctgctgccatgcccagctaatttttgtatttttagtagagacggagtttcaccatgttgtcgaggatggtttcaatctcctgaattcatgatcctcctgcctcggcctctcaaactgctgggattacaggcgtgaaccaccttgcctggcctatacataatttttaaaacagatacagaatatatagatagcttaacaattataaaattgtatttatcaagtaggtcacgaggtaaacattttacgctatgcaaaagggagcaaacctccgaatttgtcatgcagggtcactagtggaactcacagcaacaggtctgataaagcagaggagggaaccgggcttccgtgtgctttagagagagtgaaacatgaggagtcacaggcagagaaaactgtttttcagaaagaaaagaaaggggacatgacagcccagcagtagggtgaagagggcctctccgtgggtgccgctggcttgagctgctgtaagtggctgtgccgggaacagaggatctgtataggagaatggggaagggagtgctggaaccgggggtgggcaggagcagcagtctggagaccagaatgacctagggtttcctctcatgctcccattcccagtgtttcacgtgtgtaaagtagcaagcatgcatatactgcttagaggcatctacacttaacatactacactcgtatacaacacttgcatcgtacaaagtacacatagtaggtgtggcatgtaataagttaccctcctatattttcttctaaaagatttttaaatatttgcatctcaaatttaagtcctttgtccatttagatctggcctttgtgtgatagcgatccatttttgggatagagatccattctgatattttcccatatggataccaactgctcataccatggattatatagaccctttctgactgttctgtaatgttagccagggcatacatcaagatttcacacaagcatacactttcacaatagcaattcctgctgtggtaattataacttcacagtaaatctggtacgtgatagactcacataagctccacctcccaccttcacacactttagtcttctatgggattgtcttagttatactgggcccttttatcttccgtataagctttggaagcagtttagtgacaatggtactcttgtctttttcttgattttaaaaggagtgatttcgatatttttaatcacaaaacatgataggtgctgtaggttatttgttgactccttttatcaggttaaggaaattaccctttattcataggtggaaatatcatgaattatttaatttttgt

SEQ ID NO: 41930 - DNA, 2300 bp, Homo sapien
gaggagactgcaacactaataataaatggatcaattcaccagtaaacataacaattccaaatatatatgcaccaaataacaaagtcttaaacaacatgaagagaaaaattatagaactaaaaaataataaattatagttgtgtgttttaacagccttatctcagcaattgatagaattattggacaaaaatttgacaatcagcaagcatgtagaagatctgtacagcacaatcaaccaacaagattttattcacacacacaaacacacacacacacacacagacacacatatacagataaatatatatgtcaattatatatatatctctaaatatagaatcagtccacaaaaaacagcagaatatacagtttttcaggagctcatgaaatattaactaaaatactagatgatttcttgcaccataaaacaaaccctgatacatttaaaagaatttatgtcatatagagtatgttctctgaccatagtggaattaaaataaaagtcagtaacagaaagagagcaggaaaatgtttaaatgcatttcaattatgcaacacagttccaaatgatctatggattaaatataaagtcttaaataaaaatctaaaaatatatttcaacaaatgaaagaaaatacaacatatcaaaatataggaaatacagctaaggctgtggtgggaaagaaatttatagtactaaatgcttcattaaaaataagaaaagatctcaaatcaataacttacacttgtatctcaagaaactagaaaaagaacagagtaaactgaaagcaggcagaagaagaaaaataatcatcacaataacaaaaattcatgaaattgaaaacagaaaaaaatgtgaaacaaaaagctggtttattgaaaaaatcaatcaattgataaacatctatcaaaaccgacaaaaataaatagagatgacacaaaacacaacagcaaattttttaaaaaatgcaaatgatccaattaggtaatggacaaaagacatcaatggacgttttaacaagaaaaatattcagatgtcaaataatccatgaaacatgttcaatattattaatcatcatggacatgtcaaataaaaccatagtgagatatttctacacacctatcaaaatgacttttaaaaattgtgacaatagcaaaagctattcaggatgtaaaaaatacgatcactcataagttgctagtgcaaaagtaaaataatagagccactctgaaaaatagctgacagttttttaaaaagacagatatgttattcattctttccacattttttttgtgtgtgtgctgattaaccttctctacctcctctccaatgccccagtatccttactagcttctgtgggcactcagtgtacccataaaattttaagaaaataattaaaaattttttaaagtaaaataaaaaccagatatgcatagaccatagatcccagcaattgcagttgtgggtgtttaatttggagtgatgaaactgtggtcccacaaaaacttgttcacgaatgtctacaacagcttaatttgttagttgaaaaggtcaataagcccaggtgaatgtttaatttgtggtgaatttataccagaaaccatgaaatactactcagtcatcaaaggaacaaaatattaattaatgcaatcatttggatgtatttttaggaaattttgtcgagtgaataaaagtcaattatatacattatgtacaacagtacaagtaggccttgagacctacgggatcattctgtgttgcagcgaggccctgcctgcctcaccagatgtggtgagcctatcctatctcactccgaggggtccaaaatcggatctgaacgggagtctggagaacacagcaggcatcctgaagctccacctccctcggtggaagtcagctcaaggaggtcctgaggacaggactcctaggggtttggccctgggacaggacaagacacccgcggccccctctcccacgccgcccgaaactggaccccggatccagctgccgcagtggcggcaggaggaacctcgctgccgccgcgcggcggtggcggtatttaaaggggacgcagccatactgccaggagcggagcgcgagtcggctcagccaatgcacatgcgcgaggcgggagcggtttctcccgtcacagtggttcccatggttgtcttagaaaccagtccccgaggcttggcaaagcaggagccctctgtggcagtgcttgggtgtcggggctctgaggatccggcctcacctctccacggggtcgacgggaacgtctccggatgccaggagtcgc

SEQ ID NO: 41931 - DNA, 2300 bp, Homo sapien
ggagttaatagaatacttctaatccatttataggatctacactaagtaaaaaaattaaagacatctgaaaactattttgtgagtccttataatccatatcaacaatcatggaatatattaagtaatagaccaaaaattaatcatcatattaaccaaaaacacatagcaagacaagataactaaatattttcatttggaaattgggaaatttagtcaattttaaaactcagcaaatgagatcatttcacagaagcaacctaggtttgctggtaaattaaaattatgacgttttggtttgggagggtagttcctcttctgtaaattgtgtactcacataagaaatatatctatgttctcatggacacttgctgtagaggtaataatatgaagttagctcagggatcagggcctcacagtgcagtgctggtagttttttttgtttttgttttttttttttttttttgccctgcaccttgagtaaaagtttcctgaggcctctccggaagcagaaaccaccatgcttcctgtatagcctatggaactgtgagccaactaaaggtatttctcatgtatttctttataggaatgcaagagcgtactaatacagctaagcagaggccatcaggaccagcaaaagtctgagctggatgagagacaaagctaaactttgagcagcagcaggagctgccagggattacagaaaggaaggactgactcctaaattccaggatgtctcctttaagtctgtaagaagctcagccactgtctccttacctgactcctctgggaaaccagagtttccctaggttaaaccatacagggatagggtaggagatgccatttggatctaggagcagagggcagagactcagcaggaagagtgtctctttgagaaggatacacagtggagcaggtgtgtaggttcacagggccagctatgggtagagtcgggtgtacatttttagaagccacaattcccaaaaatctcctgactataagatcagtgcacagagccagtcaaatggaggaggagtgggtccaggcaattcaggaagaaggaaagtaacaaatgagtggttgcaggaggacactttttctgtcgaggtcactaaacaaaacattgtctcctccccttaacttcggaaacaatggagggtaaaagtgttgcctgggccctgggggcaaaggcagtagataacttctctgtcgtgttctccagaagggcccattccagcctcacaggccgagaagtctgttcggttcccaagtactagagatgctgctataagggactcctgaatttccttcctgaaccagaggctgcccagccttttcttcctgttttattttttcccaggaagaaacttgcctgtacaattacaaggttctacggttctaaattccaatctagtcttccacatcattttgaaggtataatattacttgtcaaagtgggatgatagaagatatgtgtggacataaattgttgacaaggaaaaaaactaaaatcagaaaataagaaaaaatatatgtatgtacagtggttagctagaaatgtgccttttaaatatttggcatgtggtatgtgggcctcaatgtgtactattgcactagcttcccaaatattaaaggatgtcttttaaaagaaaaacctcttgctaaaaggttaacagttaaaataaccagagtggcacaggtaccagtcattaagtgaaacctttcatcttcccagaatagtacctgttcccaagccagcttctttgaaaatcacttttctctcctttactatttagtttacagattgtatagtaacaatacagaaaccacaatagtagcaaaaaaaataaagaatatttttaaatgaaaactcacatcctaactctaccaaaacatgaaaattaaacctgaatgcctcccattcctgatatattttcacctaaatattcagctctgggattgcattgtttttggattgagtggaaattattgcctggtcttgaaatcttccataatgtgtgtgtgtgtgtgtgtgtgtgtgtgtgcgtgtgcgtgtgcgtgtgtgcatgtgtgtgtgtgtatatgtatgtgtggtgaatatatttctttttgttcggagcaaagattttttcaatatgtatatttattttaggcagattatgctagtaattttctacaaatgtgctttttaaaaaataacctttaatttaaaaaaaattattcttactcagtggcccacaattgttaaaaacgctactaatggagctgggtatggtgacacacacctgtcatcccagctactt

SEQ ID NO: 41932 - DNA, 2300 bp, Homo sapien
ctggccctgccttggccctagcctggctttgaccctgccctggccctaccttggccttcaccctagccttaccagggcactgtgttggacctggccatagcacagacctggttgtggccctggcccagaccctagccctgcaggtaccggtcctggcccagctctgggcctggctttgtccctaattcttagatgaccctggccctgcccctgcccttgcccttgccctggcactggccttggacatgtccgtggtcctaaccctggccctgccctggagctgccactgtcttggccctgccctggctctggccctgccccggccctggccctgccccggccccagccatagacctgccctggttggtcgtgccctaccttaaccctgtgctaccctgggcctgctccaccctgccctggccctgccctccctttggccctgccctgaccccgtcttggccctcacactggccctagcacagacctggtcctatctgtggccttggcctggcattgacccctgctcctgaccctggtcctgccatggccctggccctgccaatgaccctggcagcccttaccctggccctgaactggccctgccctggccctgaagtggatttgcaggtgtcttgtccatggtttaacctggtcttaccatggccctgtccctcccctggctctgtcctggtcttatgctgaccctgacccagaccttggccctgccacagccttgtcctagacctggccatggccctgcgtctgccctggaccggcgctggcactggcatggaccctggccctggcccttcactacttaaggccataccctggcccagccctggccctaatttggcctggctctaccctggcatgctattctggccctagccctgaccctgtccctgtccctgtactggtcctagccccgttgctggtcctgccatggcccttgtcctgacattgccctttcctggttctggccctggccctgtcccagccctgctctggccctggtctgaaccctggccctgcaatagacctgccttggtcctgcccagaccctggctctggccctacctctgccctggccatacccttgccctggcctggaccccggtcctggtccttgtcctgccccagccgtggccctggccctgccctgcctgtgccctgttctatcctgggctggccctgccatggcctggtcttgccattgccctgccctagcttgccctgcttgtgccctagatctgccccgcttgtgccctagatctgccccggcctttgccccatcttggttctagccttgactcagccctggaccttccctgaccttgcctcagccctggcactaccctggcattgccttggcatttgccctactctctctatggcctggctgtggtcctgccctgctctgctcttgttctgtcctggcacagccctggccctggccctggccctggccctgccgtatcactggctctggtcctgcccttatgcagacctgaccctgccactgccttggctttggcctggaccttggccatacagtgaccctgccatgacattttcctggtcctggcctggaacctggccctgccaaggactcgccctggctctgtcatggccctggcccgttcctggatttggatgtgtcctgtcccttatttgccccggcccttccctggctctgccataccccttctctggggtagggccagggtcaggaccagaccagggcagggtcaggaccagggtagggccatgttaaggcctgaagatgggaagggccagggcagcggctggatcagggaagggtcagggccagggatgtagtaggactaggggcagagccggcactagggctgagccagggcagagcaggagagattactttaggctattactaaaatttttattttagatttttaagataactatagtagtagtaatgtctatactatgttgtttgtaatagtaataatacttgcagtaatcactaaattttaactaatactatctttgcttccagtagtgttctatgagtataattttatcaacatgtaaatatgtgaggcattgattctcataataattctatatgctaggtacttaaagcatccccattttccaaatgtaggaaacaggcaaaaagaaggtaaatacttggccagattactcctgtaatcccagcactttgggaggccaaggcaggcagatggcttgagctcaggagtttggaaccagcctgggcaacattgtgaaaccccatctctactaaaaatgcacaaaaa

SEQ ID NO: 41933 - DNA, 2300 bp, Homo sapien
attgcaattcatgcaaatctgactccgcagctctactccaaaggatagtttcaacgttctgggctgagtgggagggatgaaagatcacacatcacctacaaacagggataccacccatatcagacacatttatagtcacagaagtaaatgatgcatggatcagaggatacatgcctcaccataaagttctaaatatagtttacactctacccgaggatattgctttcatctttgttaaccagaaaatagattaagcaaaggttagctggtgagacatgtacaaatcctcaagtcaagctgagtattctgagagcctaaggtgaattttttcttttcccctaaaagtacaacttttacctgctgagtgtaacgatctattttgacttgtgcctcaggacagagttcgatatctttggctccatagacagcctgggcaatggtccttatcttgtccacaattggaagctgcagaaacacaaattataacaaaattgtgtaagtttaatctggttaaagatttttttaaaagtttagtgacacttactgtaattgcttaaaattcccttatcagggtaccccctcagcaactgcaggattccttgcaaaccctcttttttccttttagcaccctaaagcactgaaattttcagtgtcagaatagatcggatgtcaactagcaaataagccttaggtgttcaggcaatttagaggctgcctagagcccatgtagaatctgcagagggaggccgggcacagtggctcacacctataatcccagtactttgggaggccgaggcgggtggattacctgaggtcaggagttcgaaaccagcctgatcaatatggtgacaccccgtctttactaaaaatccaaaaaaactagctgggcttggtggtgcatgcctgtaatccgagctacttgggaggctgaggcaggagaatcacttgaactgggaggcagagactgtggtgagacaagattgtgccactgcactccagcctgggtggagtaggactccgtctcaaaaaaaaaaaaaaaaaaaaaatctgcagagggaagagggaagttagtgccttacagagggcttctgactaggaagccccagaactgcggccgaccccttcctctccctgcctcacccctgcagaaagatctgcagaaaaagctggaaggggtgggatggtgtgtgtgggggtggggactggggctatgcagtttccagacctggtctttggcaccctctacaggacagttccattcccacacctgagctttggacaactgaatcctatgccccttcccacccagggaacctggtgccagaaattcccaggacttacccaccatccaccacgccacatagcaagtgtcctcagtgtctgcagaccagaaacaactcccttgtgtctcagcactgggccacctgctgaaaccccaaactgcctgccccattgtttgagacccagtcaggccttggctccaaaagtcctcttggactgccactggcccccagggtctctcctgactgcacctcggtcccggagctcccacaccgctgggccccgagccccatgccccgatccagctgtggctcctttacgggggccttgctggcctttcctaagggaggtgttttcccgagggcaggtggactgctcctcagactaggggccctcggagggccaggcctgggcttctacctcctctcgcaggctggtgtttctctgcaaatatggctcgtgtgtcctccttcctctcagactgggggcccctgaggactgggcctgagtttccctctcccccttcagaatgggggttccctgaggactgacccagggcctccccccgtcccctccatctggctgttaatctccaacacttccacctccagtcctattctgcacagcgctccccagcgctgggagctcagaggcctcttcagccttccccagggctggggctcagggagggcttcctcaggcgctggccccagagtcaggctgcacattggcttggaggacaggcctttcctctgggactgtgaggcccagagtgcccacccagaactccacctctgacctcacaaaggcctgcttcagaactcagtctccactgcactgctggccagacgagggatgttattttgggcagtgcatctggacttggttcaagtggcaccagccaaatccctgccttactgacctctcccctggaggagcaggagcagcgctcaaggccgccttgggagggctgagaggcaggctctggactggggacacagggatagctgagccccagc

SEQ ID NO: 41934 - DNA, 2300 bp, Homo sapien
acctgaggtcaggagttcaagaacagcctggcgaacatggcgaaaccccatttctactaaaaatacaaaaaaaaaaaaaaaaaaaaaaaaacaaaaaaaaaacaactaattagctgggcatggtagtgtgtgcctgtaatcctgtaatcccagctactcaggaggctgaggcaagagaatcgcttgaacccgggagaaggaggttgcagtgaaccaagatcttgccattgcactccagcctgggcaacagaactggattccatctcaaaaaaaaaaaaaaaaaaaaaagaaaaagaaaaccagaaaagaaactcagtgtggctggaggagggagagcagggggctggagtggggaggccagaaagctaacaaggactacataggcagggccttggccattgcaaggactggctctttttcaccccaaagacagctgagcctgagagggtgagaggtgctgagtgcagttgagttgaaggccacctgcatgccttgaccctcatccaagtatttctgagcctcccctcaccccaggacccagcccaggcaacaggtggaagatgcttttcttctgggacctcagaggcgagtgggtgggtggggaggaggaggtcgaggggggacagctgccccaagggagaggctgaggatggagcagggagggcactgaagtgggctgggtggaggacagggggctggagggtgagaagagggtggggtacttaccgcctgtgcccagatgcttgaaccatgttttgtccttcagatttgtagatgctgaagagccaaagagaggtcactagggctggaggacacagaacttggccccacacttccatcagacctttgtccccaggggagaagccctggggcagctcctgctagtgccactcccttaacccagccaaggaacagggagggaggagcggtgctcagccaatgaggcgacgccctggagccccaccccacccatgctggccccaggaccccaaccccaggccagaccctccagtgctcctgctgaccttccctgtctgcagcccagctttggactgtggagatgccctcagcctctactcagtggctccagcctcatatttgcgtgctatacctttaacctcaagttctcttgctgctaacttaagctgtgactgtccaggacctgcacacacacatatatgcacgcatgcacacacacacacacacacacacacgcagaaggtgaacacacaggatgaggccctgaaaactcatttcacccgtgtacctcacccaaaaattcccctttgtactcctatctttatctctaacagacagcatgaaggtagcccgaagtcccctcaccctgtctgtcctcctgattctctagcccagttccctctagctccagcacagactcttatctccagccctgactgctgaaaccctccagccccagctccagcccctcaggaggggactgcgtgggaggaatgactccagcaagccggcagctgacccgtgtctggcctgcatgcctccccctgtggtccactgccggtggtcttcagctctctcctcgtcccacccccatggtctgctgacagcccagcccagtgcatccctgccatctctgctctaccgctggtcctcccaacaaccaacttacaggtaaggaaactgaggcccagagagaaggtgtatgtgcctgtgtcacacagcaacacaggactgcaccataacaagaaagccgggacttccactcccagccggggctccttccccaaacaatccctcagtcacctcctcgctgtatggtacccagggaatgacccttccagatctgggcactgaggaggctgccccatccccaccctgcctggagccccactcactctgctgaaatgtcttctgattctcagcctctgccttgggggcttctcagttaaagcgcatcttgatcttgttcctctgtgactgtctctggctcagcttccacccccagctggggctcagctatccctgtgtccccagtccagagcctgcctctcagccctcccaaggcggccttgagcgctgctcctgctcctccaggggagaggtcagtaaggcagggatttggctggtgccacttgaaccaagtccagatgcactgcccaaaataacatccctcgtctggccagcagtgcagtggagactgagttctgaagcaggcctttgtgaggtcagaggtggagttctgggtgggcactctgggcctcacagtcccagaggaaaggcctgtcctccaagccaatgtgcagcctgactctggggccagc

SEQ ID NO: 41935 - DNA, 2300 bp, Homo sapien
gcaggcacctgtaatcccagctggggtgggggctgagatgtgagaatcgcttgagcccaagaagcagaagttgcagtgagccgagatcatgccactgcactccagcatgggcaacagaacaagactccatctcaaaaaaagaaaaaatttttgttgagcacctacttatgagtcaagcaccagggatacaaagtcaaaacccactctccactcttgggtcactctgtttaatagaagagatgggtaatggcaacaccaccagagagaagcagcctgggactgggggaactcaggggaggcatgggaggtgaggcctgaagggagttttgaagaatgggcgggtggtggcctgacatggccatgggggagtagggtggtggtagaaagaatggtggaagctgtgcacattctagatattttaggagattggtgactggatgtgaggcatggggaagagggaagtatcaaggacatgaccttgacttctggcttgagcaactgaagagaaggggacccctgactgagccaagagcacaggaggagtggacttgtggggggcggaggaggctgtttccatctaggagctgagttgcctgtgagacaccagtgggtctctagaaacaggatctaaagccctggaaagagacgtaggctagaggcaatgatgtcaacagaggggcactattcattctctccgtgcaagtgtacaacaggcaaatatccctgcttgcgtggagctgacagcaatgaaatgtaataagtaagtacatttgtataagcgaaggtaccagctcctatgggaaaaaacagagcaaggagaggggaattgggagtgcaggggctggagatggggtgtgatttcaaatagggcagtcagagtaatccttgttgagaaggtggccttggagcaaagccatgaaggagatgagagtgggctgtatgttaactgcagaaagcctctcagatggagggaatagtcaccagaggactctcagcatgtttgaagaaagcaaagaaagtcagtgtgaggccaggtgcagtggctcacacctgtaatcccaaccttttgggaggccgaggcgggtggatcacctgaggtcaggagttcaagaacagcctggcgaacatggcgaaaccccatttctactaaaaatacaaaaaaaaaaaaaaaaaaaaaaaaacaaaaaaaaaacaactaattagctgggcatggtagtgtgtgcctgtaatcctgtaatcccagctactcaggaggctgaggcaagagaatcgcttgaacccgggagaaggaggttgcagtgaaccaagatcttgccattgcactccagcctgggcaacagaactggattccatctcaaaaaaaaaaaaaaaaaaaaaagaaaaagaaaaccagaaaagaaactcagtgtggctggaggagggagagcagggggctggagtggggaggccagaaagctaacaaggactacataggcagggccttggccattgcaaggactggctctttttcaccccaaagacagctgagcctgagagggtgagaggtgctgagtgcagttgagttgaaggccacctgcatgccttgaccctcatccaagtatttctgagcctcccctcaccccaggacccagcccaggcaacaggtggaagatgcttttcttctgggacctcagaggcgagtgggtgggtggggaggaggaggtcgaggggggacagctgccccaagggagaggctgaggatggagcagggagggcactgaagtgggctgggtggaggacagggggctggagggtgagaagagggtggggtacttaccgcctgtgcccagatgcttgaaccatgttttgtccttcagatttgtagatgctgaagagccaaagagaggtcactagggctggaggacacagaacttggccccacacttccatcagacctttgtccccaggggagaagccctggggcagctcctgctagtgccactcccttaacccagccaaggaacagggagggaggagcggtgctcagccaatgaggcgacgccctggagccccaccccacccatgctggccccaggaccccaaccccaggccagaccctccagtgctcctgctgaccttccctgtctgcagcccagctttggactgtggagatgccctcagcctctactcagtggctccagcctcatatttgcgtgctatacctttaacctcaagttctcttgctgctaacttaagctgtgactgtccaggacctgcacacacacatatatgcacgcatgcacacacacacacacacacac

SEQ ID NO: 41936 - DNA, 2300 bp, Homo sapien
tttaatcctggctcaccatgtacaggctgtgtgaccttggacaagccattcaagttctctaagcttcagattacccatctgtcaagtgggggagaataatagtgcttaactatcatttgcaacatctgagtttctggctcggccaacggggatggggaacatagagtgaggagcaggtgtgctgtgagatggcgaaccttcaacagagcctgagacgtccgtggaacaccaggagagttgcagtggggatttgcaaataggcatctggctcccccacggagatgacgggaatttcagcgcatcaggcatagctgagactgtctacgtggtaaaaccatgcctgaaaagacctttggaaaatcaggaggttgctggagcccttggagagagctttggtgtctgtgacatgtggaaatggaagccagattgaggagggggtgcgagggaaggggtgaagcagctggccagtgtgttctctcctgcagcctgactgaaacagggagggggcaaccaggaacccacagctggagaaggacactgggcaggggtgggacagtttgctgggaaggatgagactccagtgtgtgggaaccgatcaatgggaggatggaaggtatgggggagacggaggcctctgcagagggagaggatagcacaggagccagggctgaagggaacagtggctctagactgagggtaatgggcctgaaggtaggccccttcccctgtgaaggcagcattatctgaggagccgtgagggatgggcaagaagcagcagcttgggaatgccgcctgaggtcagtggaaatgaagctgagggcaagacagttagggccccactgttccagcattgtgggaattgcggtggagtgtgtgtgtgtagggaggggttcctggcagagtcaggcatggatggatttggaggtcccttgaagaaacttccttcaggtcagcctgaagtgtgagggactctgagggggtgcaatgcatgccagccatcccctccttgcagccctgcctcaccccaaaacttcaggtgggcctggggctgaggtgcttggatgtttgtagtaagagcttctaactctgctgctccacccggctctcagtggctcaggtctgagaggcctcagcaggggcaaggagaggaggcagtgaggagggaaggctctggaggaagagggcatggcagagggtcttcgaggcaacgccagggaggcccagggcatgggggtgaggagctagaactgagctctgagccctcctctgaggttggggcttctgggaaggcagcccccttagaggccctcccttgtaggtattcggccttggttccgtggcccatatgcttctaaataaaacatttgggagctaccttggtgtcaacttgggttttggcttcggagtcaccatgggagtgcacatggcaggccgcacctctggtgagtgagcccaggccctgccggaccgggcaagaccaggtgtccccaacaggctctttcctgcccgcctcagccagctcctttgccagcacagccagtgcctcagcctggccaccgggtgggaggaagtctcctctgaagcccgtgcctatgacgtgtctgccccagattcttcctggcccccccgacctaccattttcactggctgggtgatcttaggcaagccatcgcctctgtgttcctcagtttccttaagagtgaaaggaagacggtggcccctgcctcacggggtggttgtgagggctcaaggagagaactctgtcacggagcatgctgtcatacacactagccatcgttgttctcatactgtttgtcactgttgtttgttctgctctcactccctgacacacttgcctgctgcccgcaggagcccacatgaacgcagctgtgagcctcactaactgtgcactgggccgtgtgccctggaggaagtttccagtatatgtgctggggcagttcctgggctccttcctggcagctgccaccatctacagtctcttctacagtgagcgtcctgcccgggtgtccgcctctggcctcagctgcctcctatgaaatatgggcagattggacctcagtgtcctgatttgtaaaaaatagctgggagaaaaaagccttggaggtctcccaccctctaacctataacctaatttccgggaccctggtggggcttagttggggacaggttcgcatgatagtctgtgtctccacagcggccattctccacttttcgggtggagagctgatggtgaccggtcccgttgctacagctggcatttttgccacctaccttcctga

SEQ ID NO: 41937 - DNA, 2300 bp, Homo sapien
gcagcccaaagacagtcctgggaaggtaccatagaggcaggggagaggtagacagagcagggagccaagaacaccaagggaatcctggaagcctggctcctttctcatcagcacagagcaggtaacaaccagccaaggaaccaaagatttattgaatctactatgcctactatgttcaggcactgcagtgaagcaaactggtatgatcccagcccttaggaagaaaaaccgttaattaattaagctttttttttttttcttttttgagacagggtgtcgctctgtcacccacgctggagtgcagtggtgtgatctcagctcactgcaacctctgccttctgggctcaggcaatcctctcacatcagcctccccattagctgggaccacaggcgtacaccacaacacctgactaatttttgtattttttttttgtagagatgaggttttgtcatactgcccaggctggtcttgaactcctgggctcaagcgatcagctcgcctcggcaagtgctgggattacaggtgtgagacactgtgcctggcctaactgagcaattactatgcagtgtgatgagcattgccccagctgaaagagtgggcaccgtggggcatgtggaagaagtgaatggcctagaggagagggtaggaggctctcccagagaaagggaaatttaggtcaagaaaagaaggctggcgggtaaaggagcctctggggaggcaggggaccattctgggcgtaggactggcatgtgcaaaggcctgcagctaaggcagtacgtgatgtgcaaggatgggctggccagaggagttgaggggctggtgtcagcttccgggcatgcagacagtgagatagcagagtgactaaggccacacttagaggtatctgtatccctcttcttcctctttttttttttttttttttttttttttttgagatggagtctcgctcttgttgcccaggctggagtgcagtggcaagatctcggctcaccacaacctccatctcccatgttcaagtgattctcctgcctcagcctccgaagtagctgggattacaggcatgcgccaccatgcctggctaattttgtattttttagtagagatggggtttctctatgttggtcaggctggtctcgaactcccgacctcaggtgatctgctcaccttggcctcccaaagtgctgggattataggcgtgagctaccgggcccagcccctcttcttcctctttatcctccagtcccaccccgccaccttccccaaactccagtcctatacctctccctatacgcagatttggaacctgttactcacctgtttcatctacctttccatctaatcgtgcacttaactaaatataaatcaagtgccaggccctttgggaagctctgaggatctagttgggagtaagacagattccccagttttcacccattcaacaaatacttattgcacatctactatgtgcctggcatggtgctgggcactgaagatacaccaggaagtagatccagtccttccttttctccctccctctctcggtcattcattcattcactcactctctcacaaacctctgtttgcactgacctggttgcacagcctggtgcattttgctgaccccttcatttttgacagaacctggcgcatgtttcagtgttcagtgctgtttacagagctcggcagcagactttgtcacacctcatgctgtttgtagagtgcctcactgttgccaggccctggcctgtgaccccaaagttctggctctagcagataggcagacagacagatggacagacatagactactgagctctactttccagcctgctctctcccaccctgctttttcccagaggcttgttggcaccgtggattgcactttcagctccccacctgcccgtctgcaaagtggcctcattggtgtgccatttttactggtccagtcccaactacaaggggcatggcttggccatctaccccagttcctctccatgtccccatggctctcaagtgtctccaattccagctgtcccagctgccccgggcaagaggaggtgtgtgtggcaagtctgctgggttacctattaactcagctgtgagttgaagagccgatgggcagcaggcagacttgagtctcctttctgtccatgggctcgggccactgtatcaggtccacccgtggctccaaaatggtctcctggtccgtgatagcaaagatccaggaaatatggtgcgaggaagatgagaggaagatggcgcgagagttcctggccgagttcatgagcacatatgtcatg

SEQ ID NO: 41938 - DNA, 2300 bp, Homo sapien
agctgaagaccaccggcagtggaccacagggggaggcatgcaggccagagacgggtcagctgccggcttgctggagtcattcctcccacgcagtcccctcctgaggggctggagctggggctggagggtttcagcagtcagggctggagataagagtctgtgctggagctagagggaactgggctagagaatcaggaggacagacagggtgaggggacttcgggctaccttcatgctgtcagttagagataaagataggagtacaaaggggaatttttgggtgaggtacacgggtgaaatgagttttcagggcctcatcctgtgtgttcaccttctgtgtgtgtgtgtgtgtgtgtgtgtgcatgcgtgcatgtatgtgtgtgtgcaggtcctggacagtcacagcttaagttagcagcaagagaacttgaggttaaaggtatagcacgcaaatatgaggctggagccactgagtagaggctgagggcatctccacagtccaaagctgggctgcagacagggaaggtcagcaggagcactggagggtctggcctggggttggggtcctggggccagcatgggtggggtggggctccagggcgtcacctcattggctgagcaccgctcctccctccctgttccttggctgggttaagggagtggcactagcaggagctgccccagggcttctcccctggggacaaaggtctgatggaagtgtggggccaagttctgtgtcctccagccctagtgacctctctttggctcctcagcatctacaaatctgaaggacaaaacatggttcaagcatctgggcacaggcggtaagtaccccaccttcttctcaccctccagccccctgtcctccacccagcccacttcagtgccctccctgctccatcctcagcctctcccttggggcagctgtcccccctcgacctcctcctccccacccacccactcacctctgaggtcccagaagaaaagcatcttccacctgttgcctgggctgggtcctggggtgaggggaggctcagaaatacttggatgagggtcaaggcatgcaggtggccttcaactcaactgcactcagcacctctcaccctctcaggctcagctgtctttggggtgaaaaagagccagtccttgcaatggccaaggccctgcctatgtagtccttgttagctttctggcctccccactccagccccctgctctccctcctccagccacactgagtttcttttctggttttttttttctttttttttttttttgagatggaatccagttctgttgcccaggctggagtgcaatggcaagatcttggttcactgcaacctccttctcccgggttcaagcgattctcttgcctcagcctcctgagtagctgggattacaggattacaggcacacactaccatgcccagctaattagttgtttgttttttttttttttttttttttttgtatttttagtagaaatggggtttcgccatgttcgccaggctgttcttgaactcctgacctcaggtgatccacccgcctcggcctcccaaaaggttgggattacaggtgtgagccactgcacctggcctcacactgactttctttgctttctttaaacatgctgagagtcctctggtgactattccctccatctgagaggctttctgcagttaacatacagcccactctcatctccttcatggctttgctccaaggccaccttctcaacaaggattactctgactgccctatttgaaatcacaccccatctccagcccctgcactcccaattcccctctccttgctctgttttttcccataggagctggtaccttcgcttatacaaatgtacttacttattacatttcattgctgtcagctccacgcaagcagggatatttgcctgttgtacacttggacggagagaatgaatagtgcccctctgttgacatcattgcctctagcctacgtctctttccagggctttagatcctgtttctagagacccactggtgtctcacaggcaactcagctcctagatggaaacagcctcctccgccccccacaagtccactcctcctgtgctcttggctcagtcaggggtccccttctcttcagttgctcaagccagaagtcaaggtcatgtccttgatacttccctcttccccatgcctcacatccagtcaccaatctcctaaaatatctagaatgtgcacagcttccaccattctttctaccaccaccctactcccccatggccatgtcaggccaccacccgcccattcttcaaa

SEQ ID NO: 41939 - DNA, 2300 bp, Homo sapien
gccgaggcgggtggatcacctgaggtcaggagttcaagaacagcctggcgaacatggcgaaaccccatttctactaaaaatacaaaaaaaaaaaaaaaaaaaaaaaacaaacaactaattagctgggcatggtagtgtgtgcctgtaatcctgtaatcccagctactcaggaggctgaggcaagagaatcgcttgaacccgggagaaggaggttgcagtgaaccaagatcttgccattgcactccagcctgggcaacagaactggattccatctcaaaaaaaaaaaaaaagaaaaaaaaaaccagaaaagaaactcagtgtggctggaggagggagagcagggggctggagtggggaggccagaaagctaacaaggactacataggcagggccttggccattgcaaggactggctctttttcaccccaaagacagctgagcctgagagggtgagaggtgctgagtgcagttgagttgaaggccacctgcatgccttgaccctcatccaagtatttctgagcctcccctcaccccaggacccagcccaggcaacaggtggaagatgcttttcttctgggacctcagaggtgagtgggtgggtggggaggaggaggtcgaggggggacagctgccccaagggagaggctgaggatggagcagggagggcactgaagtgggctgggtggaggacagggggctggagggtgagaagaaggtggggtacttaccgcctgtgcccagatgcttgaaccatgttttgtccttcagatttgtagatgctgaggagccaaagagaggtcactagggctggaggacacagaacttggccccacacttccatcagacctttgtccccaggggagaagccctggggcagctcctgctagtgccactcccttaacccagccaaggaacagggagggaggagcggtgctcagccaatgaggtgacgccctggagccccaccccacccatgctggccccaggaccccaaccccaggccagaccctccagtgctcctgctgaccttccctgtctgcagcccagctttggactgtggagatgccctcagcctctactcagtggctccagcctcatatttgcgtgctatacctttaacctcaagttctcttgctgctaacttaagctgtgactgtccaggacctgcacacacacatacatgcacgcatgcacacacacacacacacacacacacagaaggtgaacacacaggatgaggccctgaaaactcatttcacccgtgtacctcacccaaaaattcccctttgtactcctatctttatctctaactgacagcatgaaggtagcccgaagtcccctcaccctgtctgtcctcctgattctctagcccagttccctctagctccagcacagactcttatctccagccctgactgctgaaaccctccagccccagctccagcccctcaggaggggactgcgtgggaggaatgactccagcaagccggcagctgacccgtctctggcctgcatgcctccccctgtggtccactgccggtggtcttcagctctctcctcgtcccacccccatggtctgctgacagcccagcccagtgcatccctgccatctctgctctaccgctggtcctcccaacaaccaacttacaggtaaggaaactgaggcccagagagaaggtgtatgtgcctgtgtcacacagcaacacaggactgcaccataacaagaaagccgggacttccactcccagccggggctccttccccaaacaatccctcagtcacctcctcgctgtatggtacccagggaatggcccttccagatctgggcactgaggaggctgccccatccccaccctgcctggagccccactcactctgctgaaatgtcttctgattctcagcctctgccttgggggcttctcagttaaagcgcatcttgatcttgttcctctgtgactgtccctggctcagcttccacccccagctggggctcagctatccctgtgtccccagtccagagcctgcctctcagccctcccagggcggccttgagcactgctcctgctcctccaggggagaggtcagtaaggcagggatttggctggtgccacttgaaccaagtccagatgcactgcccaaaataacatccctcgtctggccagcagtgcagtggagaccgagttctgaagcaggcctttgtgaggtcagaggtggagttctgggtgggcactctgggcctcacagtcccagaggaaaggcctgtcctccaagccaatgtgcagcctgactctggggccagc

SEQ ID NO: 41940 - DNA, 2300 bp, Homo sapien
gaggaagcattgcaattcatgcaaatctgactccgcagctctactccaaaggatagtttcaacgttctgggctgagtgggagggatgaaagatcacacatcacctacaaacagggataccacccatatcagacacatttatagtcacagaagtaaatcatgcatggatcagaggatacatgcctcaccataaagttctaaatatagtttacactctacccgaggatattgctttcatctttgttaaccagaaaatagattaagcaaaggttagctggtgagacatgtacaaatcctcaagtcaagctgagtattctgagagcctaaggtgaattttttcttttcccctaaaagtacaacttttacctgctgagtgtaacgatctattttgacttgtgcctcaggacagagttcgatatctttggctccatagacagcctgggcaatggtccttatcttgtccacaattggaagctgcagaaacacaaattataacaaaattgtgtaagtttaatctggttaaagattttttaaaaagtttagtgacacttactgtaattgcttaaaattcccttatcagggtaccccctcagcaactgcaggattcctcgcaaaccctcttttttccttttagcaccctaaagcactgaaattttcagtgtcagaatagatcagatgtcaactagcaaataagccttaggtgttcaggcaatttagaggctgcttagagcccacgtagaatctgcagagggaggccgggcacagtggctcacacctataatcccagtactttgggaggctgaggcgggtggattacctgaggtcaggagttcgaaaccagcctgatcaatatggtgacaccccgtctttactaaaaatccaaaaaaactagctgggcttggtggtgcatgcctgtaatcccagctacttgggaggctgaggcaggagaatcacttgaactgggaggcagagactgtggtgagacaagattgtgccactgcactccagcctgggtggagtaggactccgtctcaaaaaaaaaaaaaatctgcagagggaagagggaagttagtgccttacagagggcttctgactaggaagccccagaactgcggccgaccccttcctctccctgcctcacccctgcagaaagacctgcagaaaaagctggaaggggtgggatggtgtgtgtgggggtggggactggggctatgcagtttccagacctggtctttggcaccctctacaggacagttccattcccacacctgagctttggacaactgaatcctatgccccttcccacccagggaacctggtgccagaaattcccaggacttacccaccatccaccacgccacatagcaagtgtcctcagtgtctgcagaccagaaacaactcccttgtgtctcagcactgggccacctgctgaaaccccaaactgcctgccccattgtttgagacccagtcaggccttggctccaaaagtcctcttggactgccactggcccccagggtctctcctgactgcacctcggtcccggagctcccacaccgctgggccccgagccccatgccccgatccagctgtggctcctttacgggggccttgctggcctttcctaagggaggtgttttcccgagggcaggtggactgctcctcagactaggggccctcggagggccaggcctgggcttctacctcctctcgcaggctggtgtttctctgcaaatatggctcgtgtgtcctccttcctctcagactgggggcccctgaggactgggcctgagtttccctctcccccttcagaatgggggttccctgaggactgacccagggcctccccccgtcccctccatctggctgttaatctccaacactttcacctccagtcctattctgcacagcgctccccagcgctgggagctcagaggcctcttcagccttccccagggctggggctcagggagggcttcctcaggcgctggccccagagtcaggctgcacattggcttggaggacaggcctttcctctgggactgtgaggcccagagtgcccacccagaactccacctctgacctcacaaaggcctgcttcagaactcggtctccactgcactgctggccagacgagggatgttattttgggcagtgcatctggacttggttcaagtggcaccagccaaatccctgccttactgacctctcccctggaggagcaggagcagtgctcaaggccgccctgggagggctgagaggcaggctctggactggggacacagggatagctgagccccagc

SEQ ID NO: 41941 - DNA, 2300 bp, Homo sapien
ctggccctgccttggccctagcctggctttgaccctgccctggccctaccttggccttcaccctagccttaccagagcactgtgttggacctggccatagcacagacctggttgtggccctggcccagaccctagccctgcaggtaccggtcctggcccagctctgggcctggctttgtccctaattcttagatgaccctgcccctgcccctgcccttgcccttgccctggcactggccttggacatgtccgtggtcctaaccctggccctgccctggagctgccactgtcttggccctgccctggctctggccctgccccggccctggccctgccccggccccagccatagacctgccctggttggtcgtgccctaccttaaccctgtgctaccctgggcctgctccaccctgccctggccctgccctccctttggccctgccctgaccccgtcttggccctcacactggccctagcacagacctggtcctatctgtggccttggcctggcattgacccctgctcctgaccctgatcctgccatggccctggccctgccaatgaccctggcagcccttaccctggccctgaactggccctgccctgaccctggccctgaagtggatttgcaggtgtcttgtccatggtttaacctggtcttaccatggccctgtccctcccctggctctgtcctggtcttatgctgaccctgacccagaccttggccctgccacagccttgtcctagacctggccatggccctgcgtctgccctggaccggcgctggcactggcatggaccctggccctggcccttcactacttaaggccataccctggcccagccctggccctaatttggcctggctctaccctggcatgctattctggccctagccctgaccctgtccctgtccctgtcctggtcctagccccgttgctggtcctgccatggcccttgtcctgacattgccctttcctggttctggccctggccctgtcccagccctgctctggccctggtctgaaccctggccctgcaatagacctgccttggtcctgcccagaccctggctctggccctacctctgccctggccatacccttgccctggcctggaccccggtcctggtccttgtcctgccccagccgtggccctggccctgccctgcctgtgccctgttctatcctgggctggccctgccatggcctggtcttgccattgccctgccctagcttgccctgcttgtgccctagatctgccccgcttgtgccctagatctgccccggcctttgccccatcttggttctagccttgactcagccctggaccttccctgaccttgcctcagccctggcactaccctggcattgccttggcatttgccctactctctctatggcctggctgtggtcctgccctgctctgctcttgttctgtcctggcacagccctggccctggccctggccctgccatatcactggctctggtcctgcccttatgcagacctgaccctgccactgccttggctttggcctggaccttggccatacagtgaccctgccatgacattttcctggtcctggcctggaacctggccctgccaaggactcgccctggctctgtcatggccctggcccgttcctggatttggatgtgtcctgtcccttatttgccccggcccttccctggctctgccataccccttctctggggtagggccagggtcaggaccagaccagggcagggtcaggaccagggtagggccatgttaaggcctgaagatgggaagggccagggcagcggctggaccagggaagggtcagggccagggatgtagtaggactaggggcagagccggcactagggctgagccagggcagagcaggagagattactttaggctattactaaaatttttattttagatttttaagataactatagtagtagtaatgtctatactatgttgtttgtaatagtaataatacttgcagtaatcactaaattttaactaatactatctttgcttccagtagtgttctatgagtataattttatcaacatgtaaatatgtgaggcattgattctcataataattctatatgctaggtacttaaagcatccccattttccaaatgtaggaaacaggcaaaaagaaggtaaatacttggccagattactcctgtaatcccagcactttgggaggccaaggcaggcagatggcttgagctcaggagtttggaaccagcctgggcaacattgtgaaaccccatctctactaaaaatgcacaaaaa

SEQ ID NO: 41942 - DNA, 2300 bp, Homo sapien
taggtctattcagattttctattctcgagtcaattttgatagattgtgtgtttctaggaatttgctaatttcatctaggttatctaacttgttggcataaaatagtttgtaatttttttttttttttttgagacggagtcttgctctgtcacccaggctggagtgcagtggcgcaatctcggctcactgcagcctctgcctcccaagttcaagcgattctcctgcctcagcctcccaagtaactgggattacaggcacctgccaccacaactggctaatttttgtactttcagtagaggcggggtttcaccatgttggccaggctggtctcaaactcctgacctcaggtgatctgcccgccttggcctcccaaagtgctgggattacaggcgtgagccaccacacctggcctgagcaatgatttgactacattcataatttgggtatatcatgttttcattttcatttggctcaaaatattttctaatatcccttataactttttatttgacctataggctgcttaaaattgtgttaatttctacatatttgtaaattttctagtttttcttctgttattgatttttagtttcattctgtatttgtcagagaagataatttacataactttatctttttacatttattgaaacttgttttatggcctaccctgacacatgatccacgtgctttgtgtattttgcaattgtttggtggagtattttcttttttttttctttttgagacgtagtcttgctctgtcgcccaggctggagtgcagtgccgcagatctcggctcactgcaagctccgcctcccgggttcacgccattctcctgcctcagactccaaagtagctgggactacaggtgcccgccaccacacctggctaatttttttcttgtattctttagtagagacggggtttcaccgtgttagccaggatggtcttgatgtcctgacctcgtgatcagcccgcctcggcctcccaaagtgctgggattacaggcatgagccaccgcgcctggcctcggtggagtattttctatatgtctgttaggtcttgttgatttacagtgtttttcaagtcctctatttctttattgatcttctgtctagatgttctatctgttattgaaagtgactgtttgagtccatttagtgttgctgtaacagactacctgtgactgggtaatttataaagagaagaggtttacttggcccatgattctggtgacttgaaggttcaagattgagcagctgcatctagtgagggcctccctcatgctgcttccactcatggcagaaagtggatggggtgtgggcgtgtgcaaagagatcacgtggtgaaaaagaaagcaagagagagagagatacacccactgacccaaacacctcccagtgggctcctccgtttagcactgttacatggaggaacaagtttccacatgagctttggcaaggccaggccacattcaagtgatatggggcatataatttgccaaatgcagtggggtattgaagtctccaacaattattgtagtactatctacttcttccttcaagtctatcgatgtttgtttcatgtattttggagttctgatttttggtatctatacagttataagtattttatattcttgataaatttatgagttatcaatatataatgaccttaattcatttcttgtaacaatttttgactttgtttatttttgctttgcgtatctactataagtttttattttgtagttaccattaggcttacataaaacctcttataacggactgtttatatttggtaacaacttaactttgatcacatagaaaaaagtctccacttttactccatccccttgcccccaatttatgctttgatgtcataatttatatttttaattgtatatcccttagcaaattattatagctattatttttaatacatatttatttaatcttcatactaaagacacagatgatttacttaccatcactgcagtattagaatattctgaatttgactgtgtacttacttttagcagtgagttttatactttctcatgtttccatgacaccaatgagcattcttttctttctttcagcctgaagagcttcctttaggatttcttgtgagacaagtcagcttttatttgtctggaaaagtctttatctcacttttatttgtgaagaactgctttggcaggtacagtattcttagttggcatatttttttctttgaggctttgaatatatcatcttgctctctcctgccatgtaaggtttttgctaagaaatatgctg

SEQ ID NO: 41943 - DNA, 2300 bp, Homo sapien
tttggggtggggcgaattttgcagaaacctctatgctcctctggtaggcatttgaaaacgtagcttgggtccggcacaggccccccctccccacaccccgcgtgtcccacgtgtttttcgattttccttggtattgatggaaaggtcacccgtttcccccttccaccggcatgttcctggacaccaccctttgtttcgccgtctccccgtatgcctccagtgacacgcattaacaccaactgctgtgggataggccagtgccacgcgtagtcatatggtctccgcctcggatttgcccctgttcctctttgcaggtgtcctgtaaagcactgtcggctttccggagccccagggcttttagaagcagggcaggccactgctctttctaaggaggagggcattgaaaaacacacccccaagcaatccctgaggctgtgatgttctgctctctacgagaaggaccctcgggtgagagagcagcccaggggcatgcaggctgacctgtcctagagatcactgacggaggcatgacttttggggagactcaccccaaccaacaccgtccggtcaggcctgaggctgggatcccgtgctgcttcccccgtctccgctgggctttcctcatggtagttggccttttgcgactcctggcatctggggacattcccgttgaccccaagaagaggttaggccggagcctcagagccccgaaacccaagtactgccacggagggctccttcttcgccaagcctcggtgactggtttctaagacaaccgtgggaaccactgtgactggagaagccgctcccgcctcgcgcatgtgcattggctgagccgactcgcgctccgctcctggcagtcaggctgggtcccctttaaatactgccacatctgagcgtggcagcagcgaggctcctgctagccccgcggcggcggctagatccggggtccagtttggggcggcgtgggagagggggccgtgggtgtcttctcctgtcccagggccaaaccccgaggagtcctcacctcaggacctgcttgagccgacttccactgagggagggggagcttcaggacgcctgctgtgttctccgtcctcctgttcagatccaattttggcccccttcgagtgaaataggatgggctcaccacatctggtgaggcaggcagggcctcgctgcagtgcagaatgatcccataggtctcaaggcctagtgtcagctgcaaattcacttatccatcagccctctgcctccctcctcctttgaaagagcagtggcctgccccgcttctaaaagccctggggttccggaaagcccaccgcgctttacaggacacctgcatagaggaacaggggcgaatccgaggtggagaccatgtgaccacgcgtggcactggcctatcccacagcagttggtgttaatgtgtgtcaccggaggcatacggggcgacggcgaaacaaagggtggtgtccaggcatgtgccggttgaatggggaaacagttgacctttccatcaatgccagggaaaatcgaagaacacctaggacccggggggtgggggtcctgtgcctgacccaagccacgttttcacatgcctaccagaggagcaaagaggtttctgcaaaattcgccccacccccaaccctccaccgccctggtagccctgacgcaacttaggctgcgcccagccacagccccagccccagccccagccccagcccagtccctttggttcccttacattcgtttcagccagaagatcaagggagtcagtccacccaggagcagaggagaggatgtccctcatgaatgagacaggaagtgcagaggaaatgcgacactacctttcctggaagacaaggccagtcatggtcgcctagcgctcattctaggcaatccacccaccatgaggggaaacgtggagaagaaggaagcttccctgcctgagacacgaatggaagccaggagctcccaggtcatgcgacctgcccaatcaagcagaaacaggtttggagagagaaacaatcacgacacggatctcgaagaaatgtctccctgacggactgggaagtcatctttgttgaagacattgggcgtcagcgagaggcattgaggcacttgagaaacaggtgaggcagagcaggagggaggacagggcagacgccggcggccaggcgggatatatcaccgttccactgccagggtcataagggatggggttccaaaagggtggcttgtccagagaggccagcattccagtgacagggactgttgccatctcccattcccggcttcct

SEQ ID NO: 41944 - DNA, 2300 bp, Homo sapien
ggatcctgtgctgcttccgccgtacccccctggggcttcctcatcctggtcggccctttgtgactcctggaatccggagacgttcacgtcgaccccgtggagaggtcaggccggagcctcacagccccgacacccaagcactgccacggagggctcctgctttgccaagcctcggggactggtttctaagacaaccgaaggaaccactgtgaagggagaagccactagagcctcgcgcatgcgcattggctgggacgactcgcgctcagctcctggcagtcaggctacgtcccctttaaatatcgccactgtcgcctggcggccgcgatgctcctgctgccgccatggcggcagctggatcctgggtcctgtttggggtggcgtgggagagggggccgcaggagtctcgtcctttcccaggcccaaacccccaggggtcctgtcctcaggacctgcttgagcccacttccaccgatggagggatggagggggagcttcaggactcctgctgtgttctccggactcccgttgagatccgattttggccccctccgagtgagataggatgggctcacaaaaactggtgaggccggcagggcctcgctgcagcacagaatgatctcataattctcaaggcctagagtcagctgaaaattcactgatccatcagccctctgcctccctcctcctttgaaagagcagtggcctgccccacttctaaaggccctggggttccagaaagccgaccacgctttacaccacacctgcaaagaggaaaacaggcgaatccgagggggagaccatgtgaccacgcgtggcactggccaatcccacagcagttggtgtgaatgcgtctcaccggaggcatacggggcgacggcgaaacaaagggtggggtccaggcatgtgccagtggaagggggaaacgggtgacctttccatcaatgccaaggaaaatcaaagaacacctgggacccgggggtggggggccgcctgtgcctgacccaagccacgttttcaaatgtctaccggaggagcaaagaggtttctgcaaaattcgcaacacccccaatcctccaccgacctggtagccctgacgcaacttcggctggcacaaacgcacagagagtgggaaagaaacacacagagactgagagacagagagagaagagagaatgggagacacacacacacacacacacacacacacacacacacgcagagtcatacagcagaggcattgaaacacacacccccaggcaacccctgaggctgcggggttctgctctggaggagaacgaccctcgggtgagagagcagcccaggggcacgcaggccgacccgtcctcgagatcacggacggcggcacgacttttagggagactcaccccaaccaacaccgtccgtgcaggcctgaggctgggatcccgtgctgcttcccccgtctctgcctggggtttcatcatcatggtcggccctttgcgactcctggcatccggagacgttcccttcgaccccgtggagaggtgaggccggagcctcagagcctcgacacccaagcactgccaccgagggctcctgctctgccaagcctcggggtctggtttctaagacaaccgtgggaaccactgtgacgggagaaaccgctcgcgcctcgcgcatgcgcattggctgagccgactcgcgctccgctcctgacagataggctgcgtcccctttaaatatcgctgccgccgcggcggcggctggatcctgggtcctgtttggggcggcgtgggagagggggccgcgggtgtctcgtcctgtcccaggcccaaacccccaggggtcctgtcctcaggatctgcttgagccgacttccaccgagggagggggagcttcaggacgcctgctgtgttctccggactcccgttgagatccgattctggccccctcccactgagataggatgggctcaccacatctggagaggccggcagggcctcgctgcagcacacaatgatcccataggtctcaaggcctagcgtcagctgcaaattcactgatccatcagccctctgcctcccacctcctttgaaatatcagtggcttgccccgcttctaaaagcccaggggctccggaaagccgaccgcgctttacaggacacgtgccaccaggaacaggggcgaatccgaggtggagaccgtgtgaccacgcgtggcactggcctaccccacagcagatggtgtggatgtgtgtcgccggaggcatacggggcgacggcgaaacaaagggtggtgtccaggcatgtgctggtgga

SEQ ID NO: 41945 - DNA, 2300 bp, Homo sapien
tgcaacactaataataaatggatcaattcaccagtaaacataacaattccaaatatatatgcaccaaataacaaagtcttaaacaacatgaagagaaaaattatagaactaaaaaataataaattatagttgtgggttttaacagccttatctcagcaattgatagaattattggacaaaaatttgacaatcagcaagcatgtagaagatctgtacagcacaatcaaccaacaagattttattcacacacacaaactcacacacacacacacacacagacacacatatacagataaatatatgtcaattatatatatatctctctctaaatatagaatcagtccacaaaaaacagcagaatatacagtttttcaggagctcatgaaatattaactaaaatactagatgatttcttgcaccataaaacaaaccctgatacatttaaaagaatttatgtcatatagagtatgttctctgaccatagtggaattaaaataaaagtcagtaacagaaagagagcaggaaaatgtttaaatgcatttcaattatgcaacacagttccaaatgatctatggattaaatataaagtcttaaataaaaatctaaaaatatatttcaacaaatgaaagaaaatacaacatatcaaaatataggaaatacagctaaggctgtggtgggaaagaaatttatagtactaaatgcttcattaaaaataagaaaagatctcaaatcaataacttacacttgtatctcaagaaactagaaaaagaacagagtaaactgaaagcaggcagaagaagaaaaataatcatcacaataacaaaaattcatgaaattgaaaacagaaaaaaatgtgaaacaaaaagctggtttattgaaaaaatcaatcaattgataaacatctatcaaaaccgacaaaaataaatagagatgacacaaaacacaacagcaaattttttaaaaaatgcaaatgatccaattaggtaatggacaaaagacatcaatggacgttttaacaagaaaaatattcagatgtcaaataatccatgaaacatgttcaatattattaatcatcatggacatgtcaaataaaaccatagtgagatatttctacacacctatcaaaatgacttttaaaaattgtgacaatagcaaaagctattcaggatgtaaaaaatacgatcactcataagttgctagtggaaaagtaaaataatagagccactctgaaaaatagctgacagttttttaaaaagacagatatgttattcattctttccacattttttttctgtgtgtgctgattaaccttctctacctcctctccaatgccccagtatccttactagcttctgtgggcactcagtgtacccataaaattttaagaaaataattaaaaattttttaaagtaaaataaaaaccagatatgcatagaccatagatcccagcaattgcagttgtgggtgtttaatttggagtgatgaaactgtggtcccacaaaaacttgttcacgaatgtctacaacagcttaatttgttacagttgaaaaggtcaataagcccaggtgaatgtttaatttgtggtgaatttataccagaaaccatgaaatactactcagtcatcaaaggaacaaaatattaattaatgcaatcatttggatgtatttttaggaaattttgtcgagtgaataaaagtcaattatatacattatgtacaacagtacaagtaggccttgagacctacgggatcattctgtgttgcagcaaggccctgcctgcctcaccagatgtggtgagcctatcctatctcactcggaggggtccaaaatcggatctgaacgggagtctggagaacacagcaggcatcttgaagctccacctccctccgtggaagtcggctcaaggaggtcctgaggacaggactcctaggggtttggccctgggacaggacaagacacccgcggccccctctcccacgccgccccaaactggaccccggatccagccgccgccgtggcggcaggaggaacctcgctgccgccgcgcggcggtggcggtatttaaaggggacgcagccatactgccaggagcggagcgcgagtcggctcagccaatgcgcatgcgcgaggcgcgagcggtttctcccgtcacagtggttcccatggttgtcttagaaaccagtccccgaggcttggcaaagcaggagccctctgtggcagtgcttgggtgtcggggctctgaggatccggcctcacctctccacggggtcgacgggaacgtctccggatgccaggagtcgc

SEQ ID NO: 41946 - DNA, 2300 bp, Homo sapien
tgtctatcaatagtggaatggattaaaaacaaaacaagcaaaggcctcaaacctgtggtatagtcataaaattgaatattacaaaataatgaataatcaataggagcaaaatgatgtgtcacaagcatgtttagtgagtgaacataaaaattatataatttatagtttcacttacataaatggtgaaaacagacaaaactaaccttttgtggaaagaatcaaaaccgtggaagcctctgtgttcaaatactgactggaaatgggcaggagaaaacatgtttctgccagatcttctatatgcctgatgtgcattcactcgatgtattttgcgtatactatttttgcaaataaaactgagataaaggcaaaataactcaagagaaaataggtagaaataggtagagttgggatagaagcctttgaagctacccccgtaccttgcccacctggcacaggccgaggaagtcctgggacaatgctgtgagcgacctgagggccgtccaggggagccccgccagcccatgctggcgcccgagctgcccgccgccatctgaatatgttgcaaagacagtgctggcctggcaaccggtgacgctccacgccccaccccgacccccacttctacccaagtagtggctacgctagagacagattcctgggcggcagcggttaagtctggcagttggccaggtggccaaaggacgggaactggccgttcaccccatcccagttccacagagaactcaaccactatggcccctgagcggaccttcaggcctggtgggctgtgctctgtgcccgcaaacctgacgccatccaggggagctccgccttcccgcgccagcgcctcggctgctgcagaaaactgcaaaactgcaagttgcacacgggcagagatgacggagcaacccccgaccctccgcgccactcaccctacctgcacacctgccgcgcggaccctggggcgggtgcctgggtgcccaagtcaggcagtccgcacagcagtggcaccagggtgaaaacctgctgctcggtaccatcccggttaccacgaagagccagtcccggcggcccctgcgttcttggaggaggccaagtcagagcaacctctcaagtgggagggcgatgcacttgaccctgaggacatcaggtaccaggcccgccagctcacgccggcatcggagccgcagctgcagtctagacgtggtgcaccggcagcaagtgactggacactccagaccaggcccgccccgcagtagcgtggatcctgaggccagacccccaggcggcaaaatcaggcaaccggccccgccagcagccgctgtttcatccgtgtggacacagagtgcccagcgccagggcccaggatccagaaagatgtccaagaggagcggaccttgaggccaggtgggctgtgcgctctgcggccctgaggccatccaaaggaagctccgccatcctgcgccagtgccagatctgcagctgcaaaccgcgcgtgtggcactggcagcagtgagggcgggtgggggaaggagcagcccctgactctgcctccatccctctccagctacctgacactagccacacagacttcagggccagagcctcagcgttcagccaatccgcgaagccactcaggtggccgcggagtgcccttgccagcaccctatctcccttctgaggaggagcggggcgggctgcaaggccagacaggccctctttctcaggccgggctggctgcgcgcctgcgatcctggggccgcccgggcgatcccaggagaaccggcgagcccatcggcgcacgcccagagctgcagccccacctgctggcgcgcgccgccagggagcgtcttccgggagcccggcagcaaccgcggtgcaggcgcgctccgccagggaccgtcttctgggagctcggcagcaactgccgtgcaggcgcgcgcccaacggctttgcgaggctcactcggtctgagaggtcggaggctgcgagtgtcgctgctgaaggctgtggtggaccgggctggatcgcggattgtggagtagaccatagatttgaaatagcggagttggggttggatcggggctttggggttggataggggatttggggctgggtcggccggggtcggggaggggggtggtgaaaaggtgacagggagctgcccccgctcaagagccggtggttgggggtctgagaagaagtcaccaatatgaagttattcggcttcgggagccgcaggggccagacggcccagggctccatagaccacgtctacacgggttccggataccgaatcc

SEQ ID NO: 41947 - DNA, 2300 bp, Homo sapien
caggcagaggttgcagtgagccaagattgtgccattggacaccagcctgggcaaagaagcgagactctgactcaaaaaaaaaaaaaaaagaatataatgaattccctataaaatgaaaacatacttttcatctgaaaaaaaaatatatatatataatatagtaaatatttttcaagtaagctctcttatctgagaacttttcgcccactgaaacaactcacggttatttttgataggggaacgagttctctcattaggcacctcctataatgtatataaaccatgttttaaacgtgtacgttaaaaataacaacgctgtatatgcttaactttgtgagttaaatcactcaaattctccaactgctccagccagggaattatgagggatggaaaacagctgagagtccgtttggctccgccgctccgagggtgcccggcgccctgcaaggccccgtcccagggtctgcggggaagccgggcctgggggccccctcccaccccgggctgagcccccgctacctgtgctgcttgtccagggcgtccaggtctccgctcctgcgcgccaggcagcgctccacctccgcggcgtcgcctttgacagctgccctgtggatcttctgcagttcggagtcccggattcggtatccggaacccgtgtagacgtggtctatggagccctgggccgtctggcccctgcggctcccgaagccgaataacttcatattggtgacttcttctcagacccccaaccaccggctcttgagcgggggcagctccctgtcaccttttcaccacccccctccccgaccccggccgacccagccccaaatcccctatccaaccccaaagccccgatccaaccccaactccgctatttcaaatctatggtctactccacaatccgcgatccagcccggtccaccacagccttcagcagcgacactcgcagcctccgacctctcagaccgagtgagcctcgcaaagccgttgggcgcgcgcctgcacggcagttgctgccgagctcccagaagacggtccctggcggagcgcgcctgcaccgcggttgctgccgggctcccggaagacgctccctggcggcgcgcgccagcaggtggggctgcagctctgggcgtgcgccgatgggctcgccggttctcctgggatcgcccgggcggccccaggatcgcaggcgcgcagccagcccggcctgagaaagagggcctgtctggccttgcagcccgccccgctcctcctcagaagggagatagggtgctggcaagggcactccgcggccacctgagtggcttcgcggattggctgaacgctgaggctctggccctgaagtctgtgtggctagtgtcaggtagctggagagggatggaggcagagtcaggggctgctccttcccccacccgccctcactgctgccagtgccacacgcgcggtttgcagctgcagatctggcactggcgcaggatggcggagcttcctttggatggcctcagggccgcagagcgcacagcccacctggcctcaaggtccgctcctcttggacatctttctggatcctgggccctggcgctgggcactctgtgtccacacggatgaaacagcggctgctggcggggccggttgcctgattttgccgcctgggggtctggcctcaggatccacgctactgcggggcgggcctggtctggagtgtccagtcacttgctgccggtgcaccacgtctagactgcagctgcggctccgatgccggcgtgagctggcgggcctggtacctgatgtcctcagggtcaagtgcatcgccctcccacttgagaggttgctctgacttggcctcctccaagaacgcaggggccgccgggactggctcttcgtggtaaccgggatggtaccgagcagcaggttttcaccctggtgccactgctgtgcggactgcctgacttgggcacccaggcacccgccccagggtccgcgcggcaggtgtgcaggtagggtgagtggcgcggagggtcgggggttgctccgtcatctctgcccgtgtgcaacttgcagttttgcagttttctgcagcagccgaggcgctggcgcgggaaggcggagctcccctggatggcgtcaggtttgcgggcacagagcacagcccaccaggcctgaaggtccgctcaggggccatagtggttgagttctctgtggaactgggatggggtgaacggccagttcccgtcctttggccacctggccaactgccagacttaaccgctgccgcccaggaatctgtctctagcgtagcc

SEQ ID NO: 41948 - DNA, 2300 bp, Homo sapien
aaagttggattgtagagatggctgcacaactcagtaaatgtactaaaaatcttttaacttaaaacagatacattctatagtatgtaaattatatttcaacaaagctgttttaataaaaaaaggaaaaatgtgtttactatatcggcttagaaacatgcctcatttctaggaaataaaagatagaggtgagagatgatttactttgagaaaagacattgtgtcacctatgaaattttattaggcacagagtcatattttaaggtagatagttctgtattgctgaaatagtaattttaatgtctttatgttgccacatgttaagaccataatgtagttataaatggaaatgtttacacctgaagtgagtattttcaaattaaaatttaattaagtgattttcttcgacacttaattctagattccccagatgaattgaagtgtattgctgtgtcttgtaataccttgctttaactagctttttatgtattttagttggtatagctttgttattattcatattaacaaatctgaaaatatgtcaaattacgtgtttttatgaccatgtaatgttttaaaggcacctacttgttataaaatcataatttaggataaatgtggtaaaacttagcaaaactatatttggtttagttttcccactggtatttatagtttactttgaatatttatattaataattagctcataatttttattgcaaggctcaatgactgtcattggaatataattttgttcagtacaaagatacttgtagctgtctgtgatttacgagttaggcactacatctccattttcagactgaggggtggcaggcttcacatacagtgggaatggagtaattacaggagggagttgtaggagctttgaagtcagagagggaggtagaggcctttttacctagggcctcaaaggccattggaattttacttttattctgagataggaatctgttggaaggatttgaacaggtgattgaatatgttaggaactttgaggctgagttgagcttctgagatgattgaatgttggaatgaatctgttgtgtaagtaagagaataccaatttggcaggaagagaacatattctgcatccctcactgaattcagtaataaataaaaatgtgtacatgtgattaaaagaaggtgaattgatatgtgtggtgataattttcaaagtagatatgttggaattaaacattattaacataatttaataaggcagtttataaaatcagtaacaaatattttatcaggtggttgtgagacaacttcaacaagaagtggctgacagcgtaaaaaaattaacgacgttagagtctccactggaaggtatatcacgttgtcatattaatttggatgagacacaggcctcaaataagaaattatttcaagtgaaaagtcaagtatgtatggaatttaacatgtcaacagttattctgtagctagttgaattatataacgtgttttaggatactaattttggcagaagcttgattttttattttcattataatgaatgatttccattttactatctttataatgtacttttttttatattgtgactttcattataccattttgaaaaaccattgcataccttttctcttacaatatgtacccttggaaaagttgagaattatacatcattcctcatagaaaattgacttttttcctgttaaacagtatttttaagtaatttgtgtattgctctgatgaggcaagccagattaaatcagaggagaatgtttcatggaatgttccagaaaattgtcttatttcttcacttttgtgaatggacacagaatctgtgtctatttgtttcacagattctaggttaacttgtacagaaaggccattatactattctttgaaatgtgcatgttttaggttaatttacaaactatttgaaaagttaggcattttctttatcttttatttaaaatatactgtaaaactgtagaaatatttagatttgatatagcatgtacatcaaaaattaagagttgagaaaattatcttgatcctgcctttggattttaaaaagattcactgagatgtcattcacatatcagacagttcaaccatttaaaatgtacaactcagtgtctattagtatgttcacagcattttcgtcaccctgaaaagtgaccccacatctcctaggcatgactgcagccttcctccatgtccctccacctacccctgttgtaggcaaccaccgtctacttttgtctccatatgtttgcctgttctgcatatttcatatacatagagttatac

SEQ ID NO: 41949 - DNA, 2300 bp, Homo sapien
aacgtccacagtgattacgattagtcaagcttgaaaaaaatttcactaggatcattatgactgaataacctcacaaacataggaaagttactggagaaaaatacgagcagaatttcagaattctgcctttgctgaaagtgtttgttccctcctcctctactcatcaagacctgactgcttatgtaactcccccaaaccaccaacacctgggaggagttgaaaatgattttaatgaagaagaaaagctgatgtttaatttcaaaactgacggtgacaatagaagggagaggcatgaatttatcttgattctaacacaaagcattgtatttgagtcaacaaacaaaattggtttcatttttattttttgtaagttttcaccaaactctatgcatatatagaggctgggcaagaaagaaagaaatccagaaatatggcatatgccatcccttatttatttccccatgcgaccagccaacagcttcttcaccttgtccctgcttcaagctgacttggtgtctactctgtcagaaatggagcttccctaaagactgcctcaatgtcagttacccagaggccttttttccatcttgtgttcctaaacttctatgatattaaatgatattaccctttctggaaattctccttagctttgattttataattttactctgtttcattccttcttttatagcctttcttttctctatccctttactgcagacatgttgtaaggctttgttcttgaccttctgatctctccacattcattccctcagagcatgtatccattttcttggtgtcagccttcctgactatctgattattaccatcatataacgatgttggtgatgagcatagctaacatatcctaggcattttccatgtaggttatcataagcaccctatataatttgtaccatttaattcttcaaccctaaatgatactattacggaccacattgtatgagatgaggaaacagattttcatcaaaaccatggaaagccaacgtgaggagcccctgtgtgtctcctttgttaatgcctctgggcatcatggcatgtggattgccctagaatggggattaggaagcgcagcactgtgaaaacaccagaaaatacgttatgatagcgggtaaggacgctcatctctgcccattgagatggttttgtttctgagtcaggtttgagatgagccaatcctgactccatggtgccaccagggatcacgaatttaataagatcttcgtggatgcttggaacccaactgatctctgttttctactttagggaaagagccacagcttaaatggggtggttttggtgtcacataagctatcaataatacccacgttttggtgtcacatacgcgattaataatacccaccgctgcagaggaatcaccgtggactactgctcgtttcatcccatgctcttgcgatggatccctctcacctgtttactgatttcattcaaattcttcagcgaccacaggaccccgacttgccttctctatcctggttcccatcacgctgctttacaggcctggcctgctcgcggctcctcacaccagcactgtgcgtctccctccacgcctctgccctgtttcctccatcagacaggactagcttcctccaccataactctccacctcagcccacattcccacagcactcgcgacatccgcggccctcaacatggcgcttcattccattttagggtatttcctccttgtttcctgcacacacagtcgcgcgaggcacagccccgagtgacccacgcacgagtggcctgcgctcccagacgcgccgccgcaggccggcgagggcagcctgagccgcttcccgcccccacgggaccgtcgccagcccgcagctctagcgggaggcagttccacagcgtgcccggcagccccgccaccgtcagcaccggcgcctcgggcgggctttccccacctctgggaggcacgaatcctcaggggctcctcgagagggcgccagggagcagatgcgcgcggacacctttcggccctctgcagccgccatagctccccagcagaaacccggaagttgaaatctcagccattcagtgtttgggtgaagacggaggcgggttctggacagacctacgctgtccgggagtgtttacttcgcctccacttctgttcctccccgccctggtgctgctccaggtcacatactcttcctgagccggcttcagcctctccgcgcagaagtctcccggagccatggcctagtattcttatgtgaagtctaccaagcttgtgctcaagggaaccgagg

SEQ ID NO: 41950 - DNA, 2300 bp, Homo sapien
ccattgcactccagcctgggcaacaagagaacaagagtgaaactctgtctcaacaacaacaacaacaaaaaaatactgaagggccataacacgtggttctaaatgagatactacattgggcaaaccattcaaaaaagacattctggagacactgagggaaaatttcagtatgatcttagtttcagatgacataaaaattatttatttgtttattttagagaaagggtctcactctgttgcccaggctggagtgcagtggtacgatcatagttcactgtaaccttcaactgctgggctcaagcaatcctcccaactcagcctcctgagtagctaggactacacatgcgccatcatacccagttaattttaaaaacattttttgtagaaatgagatcttgctatgttgcctaggctggtctcaaactcctggcctcaagtgatccccctgcttcagcctcccaaagtgctgggattatgggcatgagccactgaacctggctacttttaatcttattagtatcttttgatgagcagaagttttaaattttgatgaagtctagtttatttttcttataattaatggattatatgattattatatatgtctttgtcaactacaagaaatttttgcttcctccaaggtcagagagatattttctctatattttcttctagagtcattgcagtttcaacttttacatttatgtctagaatgattttgaattaatttttgagcacggtataaggtaggggtcgaggttcacttatttcccttatccagtttttccaatcccatttttaaaaaagaattttctttcccctgaatagacttggcaccattattaaaaatctgttggccatatatatgtagatctatttcaggattctctattctataccactgatccatttgttgattcgtatgtaaatattacactgaaattaggtgagcttcccaacatgtttttcttctttgtcaaattaaagggaaattatatattctaggtcctctgcattttatttcattttagaaccaacatctcaatttctaccaaagcctactgggattttgattgggattatgttgaatctatagagccatttggggagaatagtattttaataatcttgaatcttccaatccatgaatgtggtatatctctctatttaggttttctttaatttctcttacatgtatttcataatttttaatgtagagatcttatacaatttttgtcaaatttatttctgagtattttcttttttttgacgctattataaatgttttatgaatttaattttccaattatttgctgctggtgcttttttgtaaattgaccttgtattcttcactagaggggagaagaatcacctaccttttggatgcctcccactctacttgtctccctgaggtgatatggaccttaagtccacgatggtgacctaaactcagtttaaaattcttgcctagcagcaccaaagagtggtatgtgattccatgttttctcccatttacctttgcctacacccttccttttaaaaaaaaaaaagactccgtagaattgtagggaacaaagcaaaaatgggaccatttctagaaattgagaactcagagtcatatagaatcctgagtgatacgtagggtgtttaataatatgggagtatacttaacccttccacttatacagaatcttataatttagaaataatttgtaacatatcaactcacttgatctttgcaataattttatgaggtaattgagataggcattactctcctcatattaaagatgttgaaccaatgatcagagagcttaagtgacttgtacaaggtcacacagtgaattagaaattgactcaggatttgaaactaggtcttctgataatagggtactactgtatctgcccaataactataattggatcaaaagggtccctgataaaccagttgagaatattgtcccctgtgggctagcaaataactttccaaaccatggctaggggaggctggttttactctgacaacaaaaaccatttgtccttgtttcttgtggaaatttcccagcagttcttgatttcactttacccctccttctcaataaatctctgtttcagtcagaaaccagaggccttgcttagaaatttcacaaaggacctgttctgatatgtaagtgaccatttaaaaggattattcatgcttgctggttgggaatcagaattctgtggggctctgacgtggtgctttgttctgggtatttgatctgttgtgtaggtcccaggtggattctcatgatggacac

SEQ ID NO: 41951 - DNA, 2300 bp, Homo sapien
agcgaaagaaacataaactatagtttaatgccaaatcaaaaatgtcaaatgcaaaattattttatgctattacagtataaaattatgtccactttggggcaaggacttagaaaaatgcagaaataaacatgtaaagttattaagtaggaatgattatagatacatttttatcttattaaatttcagttatttttgaaaatgtaatatacattctgtttaaggttaaagtgagtaattacacttgaatgaagtttcaacctgaaatactttagttataattggagaattaacagaagattaaattctagatatctggaaattttacctatgtgagatctgctcattaacccatcaataccagagagaagaggtattgctggacatggtcctatcatctgggggataagtactggaggagatgtgaaagagtgggtgatggggcttctaaggtaagacatggaaaattgtgaagatatttgtgtcccttatggacactcaccaaatggtgacctaggcagaggaggattttaataataggatgaccagttctgtggatgtcaatgagtggctttcccccagccattcctgtcattgtccaatgggctcatgagccaagtggctgatatggtttagatgtttgtctcctccaaatctcatattgaaatgtaatctccagtgttagcggtggggcccagtgagaggtgtttggatcatgggggcgagtccctcatgaatggtttagcaccatgcccttgatgataaatgtgttctcgctctgagtttacatgagatctgcttgtttaaaagtatgtggcaccttctcttttgttctcttgctcccactcttgctgtgtgatatgcctgctcccactttgtcatccgccatgtgtaaaagctcctgaggcctcaccagaagccaaggagatgccggcaccaggcttgtacagccttcagaaccatgagctaaggaaacttcttttctttgtaaattacccagcctcaggtatttcttcatagcaatgcaagaatgctgtaataccatggccgtgatggcagggatgaaggctatgcatgggctcaacaacatggacattcactcaccaaggctgacctggctatggccactgcagagtgcctactctaccagcagcagggaccaacactgagtctccttatggtaccattccccaaatgatcagccagctacctggtggtagattggttaatttgggccacttccatcacggaagatgcagcactttgtacttactagaatagacacaaagaagaggagatatgaagacagatgcaaagattggagtgatgcagccacacccgggaagccaaggaatgtattctgctgccagaagctggaagaggcagggagcagattctccctagagcatctacagagtgtggccatgctgataccttgattttgacttctggcctccagaactgtgagagaataaatttctgtgattttaaaccaccaaatatgtggtaatttgttatgggagtcctaggaaatgaatacaaagtttgtaatctaatacaaagtttgtattagcttcacaaggctgctataacaaattgccataaacttggtggctaaaagcaattaaaatttattcccttacagttctggaggccagaagttcaaaatcaaggtgtcagtgggggtctgcctcatcgaaaggctctaggggaggatcctcccttgcctcttccagtttctgttgcctccacatatttccgagcttgtgttcacatcactccaatctctgcctctgttttcacatcactttcttctctgcgtgtctatgtcttctcttctgttcaccctgtctctaccaattagcccaggataaatgccatcagaaaaggtatggctttcaagatctagtcattgataaaaagaaatataacttttggaagcccttttgtataaagaaaaagcactcaacttgaagttaaaaggcataggtatgagtcttgactctaccccctgacataggatcaatcatttaacttctctgaggctctgcgtctttatctgaaaggccaaaagccaaggaagaagagggttgttaaaatccaccgaagatcagattctataaacaaaaactctttgttaaattaaccatgacacaaattattctattgtcttccccgaatcccacaaccccctccaacatttaaaattcatctttagatagcagattatcccttaaagtaccattttactctctgaaaaagtcctagaaatactaccctctgtcaatgcagcagaccgctac

SEQ ID NO: 41952 - DNA, 2300 bp, Homo sapien
gaagatcacctgaatctggggaggtcaaggctacagtgagccaagactgtgccattgcactccagcctgggcaacaaagtgagaccctgtctcaaaaaaaaatgaaatttaatttaaaaaatgaaaattgctttttaaaattaactttttccatcaaaaccaagatttttcagatatagagaatgcagcccactggtcagatttgtcagttcaaaaagaataaattctagttttctatttttctagcctgcttatgattatccaataggatatcaaaaaagaccaaagcctttgggatccaagttcagtattcctgagtctaactcaggatgccaaatcaggagacaagcacattctcatcaattttcaatcattcaagaccaattttgcttataattatccagttcttttagaccacctttctcctgaagccagccttatggctattcacttcactttagcataagcccccaagaaggtgaacaaaatgaggaaaagattggttaaagttggctgtttgaaattctgaaacatgtccaccattcccttcacccatgcccacccctcttagaagtagtactttcagattatttaagagtcgatgcttctatgtggattttaatttgtcatctgtcctttataacagctagtaggtttaatttgactctattttaagcatatattgacctatgctaattatctgttaaaataaattccactcttagagttaataaagtgtgtttgtcatagaaggcccattgaagtaagaagctgaggagcccttatggtaaagtgggacaagaaataataagacataattttcccatgcaaatcaacaaccgtagcttcaaaaatatcctgacccacaacaagtattggacaggccatgtttctctcactccctaaaaaattggctcgggaaggagtatgagagctcccatagctctcccaaggctcattattctccatcactccacaggaacagcctgtcagagaagagtgaaagaccatttgtcaacctctcttcaactccctgattctagccaaacttcatcaatcccaagtgaggaggcagagagaaatcaaaccccatatatccagcatcattgtctactggagtcaaaaatcacaattccactacccaccccaacaccactggccctgtttctcccaattgctttttattgtgtttttaaaaaaatcctctttccccatccctgcaacaccaagaaggaggaattatagtagataaatatgaagcatggagatcctttaaaattgtttttaataataaatgagaaaatgaaaaggagagggttgggaaggaaggagggaattcaaatgccagggaattgttcagtttcgcttttaaagatgttaacactcatttatacatctgcaagacactccccttaaagaaaagttctatgagtgtgggtctggttacatgaataaggataaaattacttttttagacgatgtttcccacatataattcagagacccctgaaattaggtatccctcttgtagatgtccttgagatgctgctggacctgggaaagaggaaactgggatatgggtctatgccaaaaggtgcttctagttataggacagagaggaaaggggcagagggagaaaaacccgaagtctgagaatctggattgcagaagactaccgagttcgtgggagaagggagagaaaacaaggatgaaaaccgaaaggggaagaggcatgaaatgttgtcaaatgtcaaaaggcatttggagagaagttgggaactgcattaagaaaaccactgcaaatctcatttcagaccatttagagatatgccccctgggaactgcgagctcaggctgtttagcatcaaacaaatggatccactccatccctaccctaattaaataaatcattcagtaattccactgggttaaagaaccaaaatattaaaaaccttcagggcctactcttgccaaatatgtcagggatcgtgtgtgtgtgtgtgtgtgtgtgtgtgtgtgtgtgtgttctgagacaccactactgttaaataggcagagctaagacttaggggactggcagattattgcaaaaagggcactgggcagaaggactatgttgtgagcctgcgaaagaagtttgtgtggggactgtgggcagtgaacgcgttgggaacaatatggaaaactgggagctgccttggaatctacagggccgggtaagagaatgtccgaaagaaaaatgagcaggtgcgggatgtgcgcagagtcagagaagagtccagggcgcccggagtggctcc

SEQ ID NO: 41953 - DNA, 2300 bp, Homo sapien
gtggcatgtacctgtaggcgggaggatcgcttgagcccaagagggagagggtgcagtgagccatgattgtgccactgcactccacctgggtgacaggaactttatggggaatgggatcttggagactgagtagagactagaggaaaaaaaaaaaaaaaactacctccccgactggccacactattcttttaaaaaaatgttaattgacaaattaaaattgtatgtatttacggaggtataatgtgatgttatgatatatgtatacattgtggaataattaaatccagagaattaatagattcatcacctcaaaacctatcttttttgtggtgagaacatttgaaatttattgtcttagcaattttgaaatacacaatacttcattgttaactacagtcaccatgctgtgctgtagatctcaacaaaatatattcttcctgtctcaactaaaacactgtactctttgacaacatttccccattcctctcaccccctccaaaaacacccattctttatgttgaagagaatggctaaaaagtcccagcaggtttcaactgacggcttcagtggttttcccatcacacttcaatgttattaataaaaaggggaggggcaacacataattcggacaggctgaaagtaccattgtaaccactttcttgacttcacagaaaaagtcctcttgttttcatctgtaaaatgggaactgcgtgaataccattcttcttttcttcagcctccaaagaaaaaacagatgcaaagccttttatcaattgcaaaacagtatacaatgtgtgttattactcacagttgtcttactgtgaccaaacactttataagcctgctgcaagtcagccttactctcaggaagtggacaatatttggggaaggagaagcagcaggatatttcaggacagtagccttggtgggtccaaaaattccttgagagaaatgggagatagaactttcttcctgctttgggttttatcctgttagtcttttctctcttcactcttattttctatggagaatttcctggttttggagtttgggtgcgttttatggagaggaggcagaaaatctttagctccagcagaatgaaaggatacatgcaaaggaacctagcacagtatctggtacccagttctcctttaacttggctttattcattcactcctggtagggcattaataagggatttagccccctcctattgaaaacgattaattcagggaagagttcagacagtgtggactgatacagtgtaggacaagcctgtttctaaggcaggagctgggtagggagggtgagaagggcgagaagaatagggaaatatgtgtcgtctgtgttgctgctgttgcaaccaccacaacaaacaaacaagtgaaaaaaaaaagaattgtccataccggaaagtgtgctgttttggaggaggctggggaaagtgtggatggcttgagtgggtcctgttggattgaagtctgacagtggtgattcccttcaacaaatggtcggggtgggagggtacacacacacacacacacacacacacacacacacacacacacacacacacacacaccacgcagcgcccagcctccgatttcagcgctggcaggagataaccattcttagctcgcctttccagggttatttttggctgaggctgttcgctgatggcaaaaggtttcagccccctcccaaatccctccccgtccttcttctaaagagaaactggtgcgtgtaggctgcgcactcccaaggagatagggagacgggccgggcgccggagaggaacccggactctgcccaaagtctcgccgcccgccggctgttttctggcagagggtgtgtcccggagggcggcgagcgcgggtgaaggctggggccaggcgcgggtggaggcgtcaccggggtcgggctagcaggccctggaatcaggcttttgggacatcccgaaagtgagtccaacttggggagaaactgagggcacctcgggcggtctggcagccgagaaggtgggcgggagaaaactttacaggaaggcagaagcaatctctgccgagggagtcagcgagcggccgcgcggagaggaggggcgggcggtccccaggcgggcgggtgcagggcgcagggcgccgacctgctggagagggggccccgggcgcgaggcggagtcccggcgcgcagccaggctggtgggggcccccggcaggctgcagattccctccggctccgggagccgcagcaggaccggccaggaggcgccatagaggggagccccatcccggtgctgacag

SEQ ID NO: 41954 - DNA, 876 bp, Homo sapien
gaattctagccacatttgccttcccagactcacagttctgtcttctcaactcaggaagatctctgagctccatctgcattctttcttcctgtgctgtggcctggaaagttttctaaggtgtttgggaggtcaattgtggggctagcctcatttgtttctcatctcttgaggatcactgccctttgatgcttgattccagtgattgattccctttgttgcttgagggccatagtttcatatattttgtccaatatttttgttgttttaggtcagaaagtaattttggtctctgttactccatcttggccagaagtgtaagacctaagcatttacacatcaaaatactgcacacataattttagtttaagctactttttaaaaaatctccttcattttccatttagcattctatttagggtattacaatggtttttttgaaattctgttatgggcagtttctattgcctatcaatcccatttaaagatagtgcatagggcattctaaaataactgttaagcaaagagaaaattgggcctgatagggtgagaatcacagctctaatacctagagtgaccttataatgtattgtccaaaggagatatttttgacagtgaaagagggtgttgttagtaattatatcaggaccatggcctaaaccaggactataccaggcagcctgggacatatttgtaccccatctctatttaatgcctttatacaattctttacttaattctaccagcctttattgagcctgctttctttgtctagctgagtgtcacgtgctgacatcactaagatcaatacagcaaactctgaaagatggacagagagacaggagatggtcctttataatgcagtgtgatctgtgctgc

SEQ ID NO: 41955 - DNA, 2300 bp, Homo sapien
aacgtccacagtgattacgattagtcaagcttgaaaaaaatttcactaggatcattatgactgaataacctcacaaacataggaaagttactggagaaaaatacgagcagaatttcagaattctacctttgctgaaagtgtttgttccctcctcctctactcatcaagacctgactgcttatgtaactcccccaaaccaccaacacctgggaggagttgaaaatgattttaatgaagaagaaaagctgatgtttaatttcaaaactgacggtgacaatagaagggagaggcatgaatttatcttgattctaacacaaagcattgtatttgagtcaacaaacaaaattggtttcatttttattttttgtaagttttcaccaaactctatgcatatatagaggctgggcaagaaagaaagaaatccagaaatatggcatatgccatcccttatttatttccccatgcgaccagccaacagcttcttcaacttgtccctgcttcaagctgacttggtgtctactctgtcagaaatggagcttccctaaagactgcctcaatgtcagttacccagaggccttttttccatcttgtgttcctaaacttctatgatattaaatgatattaccctttctggaaattctccttagctttgattttataattttactctgtttcattccttcttttatagcctttcttttctctatccctttactgcagacatgttgtaaggctttgttcttgaccttctgatctctccacattcattccctcagagcatgtatccattttcttggtgtcagccttcctgactatctgattattaccatcatataacgatgttggtgatgagcatagctaacatatcctaggcattttccatgtaggttatcataagcaccctatataatttgtaccatttaattcttcaaccctaaatgatactattacggaccacattgtatgagatgaggaaacagattttcatcaaaaccatggaaagccaacgtgaggagcccctgtgtgtctcctttgttaatgcctctgggcatcatggcatgtagattgccctagaatggggattaggaagcgcagcactgtgaaaacaccagaaaatacgttatgatagcgggtaaggacgctcatctctgcccattgagatggttttgtttctgagtcaggtttgagatgagccaatcctgactccatggtgccaccagggatcacgaatttaataagatcttcgtggatgcttggaacccaactgatctctgttttctactttagggaaagagccacagcttaaatggggtggttttggtgtcacataagctatcaataatacccacgttttggtgtcacatacgcgattaataatacccaccgctgcagaggaatcaccgtggactactgctcgtttcatcccatgctcttgcgatggatccctctcacctgtttactgatttcattcaaattcttcagcgaccacaggaccccgacttgccttctctatcctggttcccatcacgctgctttacaggcctggcctgctcgcggctcctcacaccagcactgtgcgtctccctccacgcctctgccctgtttcctccatcagacaggactagcttcctccaccataactctccacctcagcccacattcccacagcactcgcgacatccgcggccctcaacatggcgcttcattccattttagggtatttcctccttgtttcctgcacacacagtcgcgcgaggcacagccccgagtgacccgcgcacgagtggcctgcgctcccagacgcgccgccgcaggccggcgagggcaccctgagccgcttcccgcccccacgggaccgtcgccagcccgcagctctagcgggaggcagttccacagcgtgcccggcagccccgccaccgtcagcaccggcgcctcgggcgggctttccccacctctgggaggcacgaatcctcaggggctcctcgagagggcgccagggagcagatgcgcgcagacacctttcggccctctgcagccgccatagctccccagcagaaacccggaagtggaaatctcagccattcagtgtttgggtgaagacggaggcgggttctggacagacctacgctgtcggggagtgtttacttcgcctccacttctgttcctccccgccctggtgctgctccaggtcacatactcttcctgagccggcttcagcctctccgcgcagaagtctcccggagccatggcctagtattcttatgtgaagtctaccaagcttgtgctcaagggaaccgagg

SEQ ID NO: 41956 - DNA, 2300 bp, Homo sapien
gccattgcactccagcctgggcaacaagagaacaagagtgaaactctgtctcaacaacaacaacaacaaaaaaatactgaagggccataacacgtggttctaaatgagatactacattgggcaaaccattcaaaaaagacattctggagacactgagggaaaatttcagtatgatcttagtttcagatgacataaaaattatttatttgtttattttagagaaagggtctcactctgttgcccaggctggagtgcagtggtacgatcatagttcactgtaaccttcaactgctgggctcaagcaatcctcccaactcagcctcctgagtagctaggactacacatgcgccatcatacccagttaattttaaaaacattttttgtagaaatgagatcttgctatgttgcctaggctggtctcaaactcctggcctcaagtgatccccctgcttcagcctcccaaagtgctgggattatgggcatgagccactgaacctggctacttttaatcttattagtatcttttgatgagcagaagttttaaattttgatgaagtctagtttatttttcttataattaatggattatatgattattatatatgtctttgtcaactacaagaaatttttgcttcctccaaggtcagagagatattttctctatattttcttctagagtcattgcagtttcaacttttacatttatgtctagaatgattttgaattaatttttgagcacggtataaggtaggggtcgaggttcacttatttcccttatccagtttttccaatcccatttttaaaaaagaattttctttcccctgaatagccttggcaccattattaaaaatctgttggccatatatatgtagatctatttcaggattctctattctataccactgatccatttgttgattcgtatgtaaatattacactgaaattaggtgagcttcccaacatgtttttcttctttgtcaaattaaagggaaattatatattctaggtcctctgcattttatttcattttagaaccaacatctcaatttctaccaaagcctactgggattttgattgggattatgttgaatctatagagccatttggggagaatagtattttaataatcttgaatcttccaatccatgaatgtggtatatctctctatttaggttttctttaatttctcttacatgtatttcataatttttaatgtagagatcttatacaatttttgtcaaatttatttctgagtattttcttttttttgacgctattataaatgttttatgaatttaattttccaattatttgctgctggtgcttttttgtaaattgaccttgtattcttcactagaggggagaagaatcacctaccttttggatgcctcccactctacttgtctccctgaggtgatatggaccttaagtccacgatggtgacctaaactcagtttaaaattcttgcctagcagcaccaaagagtggtatgtgattccatgttttctcccatttacctttgcctacacccttcctttaaaaaaaaaaaagactccgtagaattgtagggaacaaagtaaaaatgggaccatttctagaaattgagaactcagagtcatatagaatcctgagtgatacgtagggtatttaataatatgggagtatatttaacccttccacttatacagaatcttataatttagaaataatttgtaacatatcaactcacttgatctttgcaataattttatgaggtaattgagataggcattactctcctcatattaaagatgttgaaccaatgatcagagagcttaagtgacttgtacaaggtcacacagtgaattagaagttgactcaggatttgaaactaggtcttctgataatagggtactactgtatctgcccaataactataattggatcaaaagggtccctgataaaccagttgagaatattgtcccctgtgggctagcaaataactttccaaaccatggctaggggaggctggttttactctgacaacaaaaaccatttgtccttgtttcttgtggaaatttcccagcagttcttgatttcactttacccctccttctcaataaatctctgtttcagtcagaaaccagaggccttgcttagaaatttcacaaaggacctgttctgatatgtaagtgaccatttaaaaggattactcatgcttgttggttgggaatcagaattctgtggggctctgacgtggtgatttgttctgggtatttgatctgttgtgtaggtcccaggtggattctcatgatggacac

SEQ ID NO: 41957 - DNA, 2300 bp, Homo sapien
aggaggccaaggcaggcagatctcttgagatcaggagtttgagactagactgggcaacacagagaaaccctatgagtagtaaaaacacaaaaataagctgtgcatagtggcatgcacctatagccccagctactcaggaggctgaggtgggaagatcacctgaatctggggaggtcaaggctacagtgagccaagactgtgccattgcactccagcctgggcaacaaagtgagaccctgtctcaaaaaaaaatgaaatttaatttaaaaaatgaaaattgctttttaaaattaactttttccatcaaaaccaagattgttcagatatagagaatgcagcccactggtcagatttgtcagttcaaaaataataaattctagttttctatttttctagcctgcttatgattatccaataggatatcaaaaaagaccaaagcctttgggatccaagttcagtattcctgagtctaactcagaatgccaaatcaggagacaagcacattctcatcaattttcaatcattcaagaccaattttgcttataattatccagttcttttagaccacctttctcctgaagccagccttatggctattcacttcactttagcataagcccccaagaaggtgaacaaaatgaggaaaagattggttaaagttggctgtttgaaattctgaaacatgtccaccattcccttcacccatgcccacccctcttagaagtagtactttcagattctttaagagtcgatgcttctatgtggattttaatttgtcatctgtcctttataacagctagtaggtttaatttgactctattttaagcatatattgacctatgctaattatctgttaaaataaattccactcttagagttaataaagtgtgtttgtcatagaaggcccattgaagtaagaagctgaggagcccttatggtaaagtgggacaagaaataataagacataataattttcccatgcaaatcaacaaccgtagcttcaaaaaatatgaaagaccatttgtcaacctctcttcaactccctgattctagccaaacttcatcaatcccaagtgaggagccagagagaaatcaaaccccatatatccagcatcattgtctactggagtcaaaaatcacaattccactacccaccccaacaccactggccctgtttctcccaattgctttttattgtgtttttaaaaaaatcctctttccccatccctgcaacaccgagaaggaggaattatagtagataaatatgaagcatggaaatcctttaaaattgtttttaataataaatgagaaaatgaaaaggagagggttgggaaggaaggagggaattcaaatgccagggaattgttcagtttcgcttttaaagatgttaacactcatttatacatctgcaagacactccccttaaagaaaagttctatgagtgtgggtctggttgcatgaataaggataaaattacttttttagacgatgtttcccacatataattcagagacccctgaaattaggtatccctcttgtagatgtccttgagatgctgctggacctgggaaagaggaaactgggatatgggtctatgccaaaaggtgcttctagttataggacagagaggaaaggggcagagggagaaaaacccgaagtctgagaatctggattgcagaagactaccgagttcgtgggagaagggagagaaaacaaggatgaaaaccgaaaggggaagaggcatgaaatgttgtcaaatgtcaaaaaggcatttggagagaagttgggaattgcattaagaaaaccactgcaaatctcatttcagaccatttagagatatgccccctgggaactgcgagctcaggctgtttagcatcaaacaaatggatccactccatccctaccctaattaaataaatcattcagtaattccactgggttaaagaaccaaaatattaaaaaccttcagggcctgctcttgccaaatatgtcagggatcgtgtgtgtgtgtgtgtgtgtgtgtgtgtgttctgacacaccactactgttaaataggcagagctaagacttaggggactggcagattattgcaaaaagggcacggggcagaaggactatgttgtgagcctgcgaaagaagtttgtgtggggactgtgggcagtgaacgcgttgggaacaatatggaaaactgggagctgccttggaatctacagggccgggtaagagaatgtccgaaagaaaaatgagcaggtgcgggatgtgcgcagagtcagagaagagtccagggcgcccggagtggc

SEQ ID NO: 41958 - DNA, 2300 bp, Homo sapien
actacaaaaattagctgggcgtggtggcatgtacctgtaggcgggaggatcgcttgagcccaagagggagagggtgcagtgagccatgattgtgccactgcactccacctgggtgacaggaactttatggggaatgggatcttggagactgagtagagactagaggaaaaaaaaaaaaactacctccccaactggccacactattcttttaaaaaaatgttaattgacaaattaaaattgtatgtatttacggaggtataatgtgatgttatgatatatgtatacattgtggaataattaaatccagagaattaatagattcatcacctcaaaacctatcttttttgtggtgagaacatttgaaatttattgtcttagcaattttgaaatacacaatacttcattgttaactacagtcaccatgctgtgctgtagatctcaacaaaatatattcttcctgtctcaactaaaacactgtactctttgacaacatttccccattcctctcaccccctccaaaaacacccattctttatgttgaagagaatggctaaaaagtcccagcaggtttcaactgacggcttcagtggttttcccatcacacttcaatgttattaataaaaaggggaggggcaatacataattcggacaggctgaaagtaccattgtaaccactttcttgacttcacagaaaaagtcctcttgttttcatctgtaaaatgggaactgcgtgaataccattcttcttttcttcagcctccaaagaaaaaacagatgcaaagccttttatcaattgcaaaacagtatacaatgtgtgttattactcacagttgtcttactgtgaccaaacactataagcctgctgcaagtcagccttactctcaggaagtggacaatatttggggaaggagaagcagcaggatatttcaggacagtagccttggtgggtccaaaaattcattgagagaaatgggagatagaactttcttcctgctttgggttttatcctgttagtcttttctctcttcactcctattttctatggagaatttcctggttttggagtttgggtgcgttttatggagaggaggcagaaaatctttagctccagcagaatgaaaggatacatgcaaaggaacctagcacagtatctggtacccagttctcctttaacttggctttattcattcactcctggtagggcattaataagggatttagccccctcctattgaagacgattaattcagggaagagttcagacagtgtggacagatacagtgtaggacaagcctgtttctaaggcaggagctgggtagggagggtgagaagggcgagaagaatagggagatatgtgtcatctgtgttgctgctgttgcaaccaccacaacaaacaagcaagtgaaaaaaaaaaaattgtccataccggaaagtgtgctgttttggaggaggctggggaaagtgtggatggcttgagtgggtcctgttggattgaagtctgacagtggtgattcccttcaacaaatggtcggggtgggagggtacgtacacacacacacacacacacacacacacacacacacacacacacagcacgcagcgcccagcctccgatttcagcgctggcaggagataaccattcttagctcgcctttccagggttatttttggctgaggctgttcgctgatggcaaaaggtttcagccccctcccaaatccctccccgtccttgttctaaagagaaactggtgcgcactcccaaggagatagggagacgggccgggcgccggagaggaacccggactctgcccaaagtctcgccgcccgccggctgttttctggcggagggtgtgtcccggagggcggcgagcgcgggtgaaggctggggccaggcgcgggtggaggcgtcaccggggtcgggctagcaggccctggaatcaggcttttgggacatcccgaaagtgagtccaacttggggagaaactgagggcacctcgggcggtctggcagcggagaaggtgggcgggagaaaactttacaggaaggcagaagcaatctctgccgagggagtcagcgagcggccgcgcggagaggaggggcgggcggtccccaggcgggcgggcgcagggcgcagggcgccgacctgctggagagggggccccgggcgcgaggcggagtcccggcgcgcagccaggctggtgggggcccccggcaggctgcagattccctccggctccgggagccgcagcaggaccggccaggaggcgccatagaggggagccccatcccggtgctgacag

SEQ ID NO: 41959 - DNA, 2300 bp, Homo sapien
cccgctgcgatgggggtcctaagagcaagggggggaagtggggctggctctctgtccccgcctcgccgggggtgcctcgcacccttgcgatgggggtcctaagagccagtaggggaagaggagctggctctcagtcacctcagcatggggggcctttctgttctggttttgcccaagagtaagcttatttgcatctggttctagcaagggaattgctgcgaaggccctcaaacaggggggccatcctttcgaatccctatctagttgtttagagatgtaggccaccggcctcagccaaggccccacagtttgggttaaaagtccagctgccatcttttctctctgacgcatacaatggaaaaggctttgtgagatcgggtagcccctcggctggggctttcagaagtttttcctttaagtcatgaaagacttgctgttgttggaatccccattccaaaagttcccggtccccgcccccattgtgacctcatacaaaggcttggctaatactgcaaagtttgggattcccagtctacaaaaccccacagctcctaggaattctctcaccacccttgtgcctttaggcttcggtagattgcaaatgacctgctttctttcggatcccgggctgctttcggacacctgtcgaatagtaaatcccaagtaaggtacctgcggtcgtcggcagatctgaattttcttcttggacacctaatacccacagtcctccaggtcggtcctaaggatcttagaatccgcgatgggggtcctaagccacgggaggaagagggactggctctcagtccccgcctcgcggggtgtgcctcccccgtgtgatggggatcctcagaggtgggcggggaagaagggctggctcttagacaccgcctcgcggggggtgcctcccccgcctgcgatgggggtcctaagagccaggggggaaagagcggctggctctcagtccccgcctcacggggggtgcctccccacctgctatgggggtcctaagaaaaatggagggaagaggggctggctgtcagtccccgccacgcggggggtgccacccccctgcgatgggggtcccaagagccggggggaagagcggctggctctcagtccccgcctcgcggggggtgcctcccccccctgcgatgggggtcccaagagccagggagggaaggggtcccaagagccaggggaggaaaagcagctggctctcagtccccgcctcgcggggggtgcctccaccctgcgatgggggtcccaagagccaggggggaagagcggctggctctaattccgcgcctcgcgaggggtgcatccccccactgcgatgggcgtcctaagagccagggagggaagaagggctgactctgagtccttgcctcgcggggggtgcctcaccccctgcgatggggatcctaagagccacggggggaagaggagctggctctcagtccccgcctcgcgaggggtgcctcctccccctgcgatgggggtcctaagagccaggagcggaagaggggctggctctctgtatccacctcgcggggggtgcctccccgccctgtgatgggtgttctaagagccagaaggcttaggggggctgtctctcagtccccgcctcgcggggagtgcctccccttcctgcgacgggggtcctaagagccagggggggaacagggactggctcagtccccgccttgcggggggtggctcgctcccctgcgatgggcatcctaagagccaggggaggaagagggggagaggatgataataatttcagcatcgcaggctgtgttcacccagcctgttaaatcgttatttatatcctgaaagggagaggatgatattactccccgtaatagacagatatgactccccatcgtagagcacgaggtgtacacccgccctgtgattttcttcctcatattcagagaccgagaggttgatgtcactcccaatatcggaggaagtatacacccccgtgtgagatggtccttaataatattccacggcggagggggtgatatgactacatacatggcagaaagtggaaacctcccagggatattgttcccacgatcctggagggaagaagatgatgttactttcaatatgacagaaggtggatgaagtggtggactgcccctccacacctgtgagtatttctagttgggtgggtgggaggagagactgagaaaagaaataagacacagagacaaagtgtaaagatacaacagtgggtccaggggaccggcgctcagcacaccaaggacctgcaccggcaccagcctctg

SEQ ID NO: 41960 - DNA, 2300 bp, Homo sapien
tgatattgttcctggtatcccgagggggagaggatgataataattccagtatcgcaggctgtgatcacccaccctgtgatattgttattaacatcctgaaagggagaggatgatattactccccgtaatagatagatattactccccataacagagcaggaggtgtacacccaccctgtgatattgttcctaatattcagaggccgagaggtcgatattactcccaatatggcaggaagtgtacacccccgtgtgagatggtccttaataatattccaaggcggagggggagatattactcccaaaatcgcagaaagtgtacacccccagggatattgttctcatgatcctggagggaagaggatgatatcactttaaatatcacagaaggtgtgcacgcccccactgatatcggttctaatttccacgtgggagaggaggatgtgacgcccaatcacacctgcagtagaaacacagctgtgatactgttcttaatattcagggaggaagacgatgatattactcccaaaacagacggctgtacaccctctgcacaccgagggtctacccccatctgtgaaatagtttataatttccagagggggagatgatatcactccgaatatcgtaaacaggctgtgagtccaccgcggatcctaaaaaccagggagggaagaggggctggcacttactccccgcatcgcggggggtgtctcaaccccttgcgatgggggtcctaagagccagggggggaagaggggctggctattacaccccgcatcaaggggggtcccgtcgatgggggtcctaagagctagtggggtaagagggcctggctcttattccccgactcgcgagggatgcctcccccctctgctatgggggtcccaagagccacgggggaagaggggctgcctctcagtccccgcctcgcggggggtgcctcctcctcctgcgatgggggtcctaagagccagggggggaaaggagctggctcgcagtccctgtctcgcggggggtgcctcccccaactgcgatgggggtcctaagagccgggggggggaagaggggctggctctcagtccccgcctcgcgggaggtgcctccccccactgcgatgggggtcccaagagccagggagggaagaggggctggctctcagtccccgcctcgcgggaggtgcctccaccccttccgatgggggtcccaagaccgagggaggggagaggggctggctctcagtcccctcctcccgggggtacctcctccgcctgcgatgggggtcccaagagacagggggggaagaggggctggctctcagtccacgcctcgtgggggatgcctcctccccccgcgattggggtcccaacagccagcgggggaagaggggctggttctcagtccccgcctcgcgggggatgcctccccgtgctgcgatgggggtcctaaaagccagggggtgaaaaggggctggctctcagtccccacctcgcgaggggtgcctctcccccctgcgataggtgtcctaatagccagggggggaagaggggctggctctcagtccctgcctcgcgggtggtccttcaccccgctgcgatgggggtcctaagagcaagggggggaagtggggctggctctctgtccccgcctcgccgggggtgcctcgcacccttgcgatgggggtcctaagagccagtaggggaagaggagctggctctcagtcacctcagcatggggggcctttctgttctggttttgcccaagagtaagcttatttgcatctggttctagcaagggaattgctgcgaaggccctcaaacaggggggccatcctttcgaatccctatctagttgtttagagatgtaggccaccggcctcagccaaggccccacagtttgggttaaaagtccagctgccatcttttctctctgacgcatacaatggaaaaggctttgtgagatcgggtagcccctcggctggggctttcagaagtttttcctttaagtcatgaaagacttgctgttgttggaatccccattccaaaagttcccggtccccgcccccattgtgacctcatacaaaggcttggctaatactgcaaagtttgggattcccagtctacaaaaccccacagctcctaggaattctctcaccacccttgtgcctttaggcttcggtagattgcaaatgacctgctttctttcggatcccgggctgctttcggacacctgtcgaatagtaaatcccaagtaaggtacctgcggtcgtcggcagatctgaattttcttcttggacacct

SEQ ID NO: 41961 - DNA, 2300 bp, Homo sapien
gggtgtccactccctgctatattgggaatgagatcttcctctccatccctgagtattaggaacaatatccctagggagtgtacacctcctgcaatagtgagactaagatcatcctctcgccccctggatattaggatcaatatcataggggtggtgtacaccccctgcgaaattggaagaaatatcatcctctccacctttggacgttagggacagtatcacgggggatgtctacgccccctgcgatattgggagtcatatcatccgctcccacccaggacattaggaacaagatgactgaacggaggtacacccgcagcgacattttcaataatgtcatcctctacgtcctggcaattaggagaaacatcatagaggggtgtacactttcagcgacatcgggagtaatatcctctcccccacagatatcgggaacagttatattaattattaatattaataaatatattaataattaatagtaatcatcgatattaataattgcaatagagatagtaaaagtgaatatggataaaaatattaacaattactattaataatagcaatatcactattaataataaaataatgatattattaatcaatgttacataaatcagtcataagtgatgttggtaataaaacaataattaatattaagattaataactaatattattgaaaaatgacattaatacagataattttaatcatgcataattgtacatttaaaataatcattaatgattaataacgttatactattaattaatattaccattgataattattaagactgatgtttaacaattaataatattattaagattgatgcttaataattaatcgtattatttctcctaataccgcagggggtgtacacctacccgtgatattgttcctaatatccagggatggagagcatgatattagttttaatatctcagtaggtgtacactcaccctgtgacactgatcctaatatccagggagtagagtatgacatgactcccaacatagcaatgaatgtacagccacccggtgatattgctcctagtattcacggaagaagcgtaggatattacttccaaaatcgcagggagtgtacacctcttctgtgatattgttcctggtatcccgagggggagaggatgataataattccagtatcgcaggctgtgatcacccaccctgtgatattgttattaacatcctgaaagggagaggatgatattactccccgtaatagatagatattactccccataacagagcaggaggtgtacacccaccctgtgatattgttcctaatattcagaggccgagaggtcgatattactcccaatatggcaggaagtgtacacccccgtgtgagatggtccttaataatattccaaggcggagggggagatattactcccaaaatcgcagaaagtgtacacccccagggatattgttctcatgatcctggagggaagaggatgatatcactttaaatatcacagaaggtgtgcacgcccccactgatatcggttctaatttccacgtgggagaggaggatgtgacgcccaatcacacctgcagtagaaacacagctgtgatactgttcttaatattcagggaggaagacgatgatattactcccaaaacagacggctgtacaccctctgcacaccgagggtctacccccatctgtgaaatagtttataatttccagagggggagatgatatcactccgaatatcgtaaacaggctgtgagtccaccgcggatcctaaaaaccagggagggaagaggggctggcacttactccccgcatcgcggggggtgtctcaaccccttgcgatgggggtcctaagagccagggggggaagaggggctggctattacaccccgcatcaaggggggtcccgtcgatgggggtcctaagagctagtggggtaagagggcctggctcttattccccgactcgcgagggatgcctcccccctctgctatgggggtcccaagagccacgggggaagaggggctgcctctcagtccccgcctcgcggggggtgcctcctcctcctgcgatgggggtcctaagagccagggggggaaaggagctggctcgcagtccctgtctcgcggggggtgcctcccccaactgcgatgggggtcctaagagccgggggggggaagaggggctggctctcagtccccgcctcgcgggaggtgcctccccccactgcgatgggggtcccaagagccagggagggaagaggggctggctctcagtccccgcctcgcgggaggtgc

SEQ ID NO: 41962 - DNA, 2300 bp, Homo sapien
tgagaagcagagctttgaagtttgatttgcagcctgcccaagaggtcaaaaagaaaagctgatttttagtgggaaaattcaagaaggcttcagaaatgtgcataaaatggagcccagtgctaatagctaagacaatgttaaaaaggccttgaaggcatttcagagacctttgcagcagagcttgctgtcaaaggccctgagttctaggaccaaagaatggtttcctgggtcagtcccatgatcgcgctgctgtgtccatcctcaggacagtgccgcctgcatccctgcagctccagctccagctccagccatggctgaaagatgcacaggtacagcttgggtcactgcttcagagggtgcaagctgcaagccttggtggcttccacatagtgttaagccagcaggtgcacaggcttgggagcctttgtctagactcaagagtatgtaaggaaaaacctcagtgtccagctgggcagaagcttttccaagaggcagagcctcatgggaaacctttactagggcagtgcagaaggaacatacagggttgatgcccccatacagggaggaaccattttccagaccccagattcatagacccaccaactgcttgcaccctcagtgtgggaaagccacaggcactgaccaccagcccagcccacgagggcagctgtggggaaagaccctgcacagccacagaagctgagctgcccaaggccttgggagccccgccatccactcttgtgctctagatgtgggatgtagatcctttcaggaaagatgatttggagctgtaggatggaatgactttcctgctgggtttttgacttgcatggggtctgcaagtcccatctgtgttttgtgcttccctctgacaaatttcttccttttggctgggaatgcttacccaatgtctctacaatcattgtaccttggaagtagttaacttgctttgtatttcagaggctcgagcagaagggatggcagcgttgtctcagatgagactgggctttggacatttcagtaaatgctggaatgagttaagactttgggggactgtagagaaggcatcattgtattttgcagtgtgacaacgatatgagatgtggggggacctgggtgagaataatatgatttggccctgtgtcactaccaatactctcgtgaaattgtaatggggaatgttaaaggtggggcctggtgggagatgatttaatcatggagaagagtgggggttggaggtgggggagtggggagaataggagagattattttgtgggtgggggtgaaaaatgaggggggacggattcttcacaactggtgaaacactatctccttaatactgtctgcgtgatagtgagttctcttgatgattatggagcttaaagattgagtgaatattgtcctgctggggtttggactgacatttttgtcatttttctggggaatttcttccctttggattgagaaaccttacttaatgcttgtactatcattgtatcttgaaagaaaagaaatgccttttgaactcagggactgataggccgaagggactgtagccttgtctcagatgagactttgaattttttatatttggaatgagttaagaattttggaaacttttgaacatgcatgactgtgttttgctgtgtgagaaggacatgaggttctggggtatctgggtcaaataatatggattgactgtgtgtccatataaaactcatatggaattgtaatccttaattttggggcctggtggtaggcgatttaatcttgaatgggagggggttcggggtggtaggaaaaggaggggtagggtggggaggagtaggttgtcagtagggtggtaggaggatagggggtagtaggaagggggagtagccttctgcagaggcagaggctcatggaaaacctctactagggcagtgcacctgtggctttgcaggctttagccccatggctgctctcatgggctgggctggtgttgagtgcctgtagcttttccatactgagggtgtgagctgttggtgggcctatgaatccgggatctggaggatggtggcctcctttttgggggctccaagcccatattttccttctgcactgccatagtggaagtttctcaagaggcttggcctctgcaggaggcttctgcctggaaacagtgggtggtggtgtgggtgcaggatcttcttgatgctgatctcctgatagtgagacctcatgtgatctggttgtctaacagggtgtggtacctctttcctctctctgtcttgctcctacccctgccatatgaaacatct

SEQ ID NO: 41963 - DNA, 2300 bp, Homo sapien
gctcctacccctgccatatgaaacatctcattgccacttggccttctggtatgattaggaagggcctggtcagtgtgggcctggtcagtgaactagtcagttgggacttggtcagtgaggcctatttactgggggaatggtcagccagggtctgcttagagagggtctcattagagggatcgagtagtgcaggtcttggtgagtggggacctagtggcagacaaatgtttggtgtctggtcagtgcaaacctgggctgcagggcttggtgagtggagacctggtcagctgtggcttagtggtagccttgtcagaatgggctgggtcactggtgacccggtcaaggggtgctattcagtggaggcctggtcacatggcacctagtcagcagggcatgtcctcatcagtgaggccgttgtcagtgggaccctggtcatggcagcctggtcaggtcagtggaacctaatcagtgggggcctggtcagagaggacttgatcagtggtggcttttgtagcactggtctatggggtgacctggtcaacgggggtctgagcggtacatgcctgttcagtggtgcctagtcactaggttcctggtcggggcatctggtcaccgcaggcctggttagtagggacctggtcactggcagcctgttccctggagacctggtcagtggggcttcatctgtggggccaggcaatggggtcatgattggtggaatgtggtcagggaggtcttgtcagtgaggccctggtcagtgaggccttgtcagtgaaatccttgtcagtggggtcctggacactgtgggcctggcagcgggaatctagttagtggggcctggtgatgggggcctaatcagtgagagtgtggtcagggaggacctgatgtgcgggatctggtcagcagggacctggtcagtggggctgctgagcactgctgggaggtgtcaggggaaatgcatgttatcaggggccctatggacagctgggatggcccagtggtgtccagtggcccagtcaaaagtggacaaagcaggtgtttggatggacctgggagatcttgctcagagattctgaaagaacaaaggtaaaggaagggccagagtgggtagagagatggtcacagtctatgggctgcacaggatggaggaagccagggaacaggcagggtgggcagtaggggtgcagggagaggcaggtgcatgctgggaggtcggaccctgtgagggctgtgggggcgtcaggtggggtgggctccaggtgcactctcagtgtgcactgggcaggtctcggtccaggctctctggaccctggtcgggtgatgtggtcactccctgggggactgctgtcaggcctagccacccacccttggcagcactgtcccatctcaggactggactttctcagatcctgcagagggcacagcctccagcccaggaggggcagccccttggtgcagcccaagctctccatgggcctggagcatccctgccagccctgcgctccctctactcccaggtcccgcttttcaagtgtcagccagcagagaggctccgtcctcccttccctttgtgtctcctgggctaaaacttggggcgcattgggacagggatggtgctttcctcaggcccatttagggaggggactggctcccagcctggcacaggtcctcagctctgccttggttgccttagagtgacatggatcagtcagtgccctgaaggtaaatggaagagactgtccctgctgtgtgggaggctggtctagggatggaggacttggcaggtcctcccagtctgtcaggcctggacagcactgtcctgtctcaggactcagaaaatccggtcttgggatggaatggtgctgcccagggtgggtggccagggcttgacagcagtcccccagggagtgaccacatcagccaaccagggtccagggagcctggcctgagacccacccagtgcattgagggtgcacctggagcccaccccacctgatgcccccacagccctcgcagggtctgacctcccagcatgcacctgcctctccctgcaccccagatgtccaccctgctttttccctgatttcctccatcctgtccagcaggatgggctggtcagtgggatagcctctgtgcacattttgtggcaagtaggagtgacacatcattcctgggaggccccgtggttcctgccaaacccaaccccagaattctccctgaggtggttttaccaaacccataacccagaactgctattgtggtttggaggtcagcacccaccagtgccagggcactactgg

SEQ ID NO: 41964 - DNA, 2300 bp, Homo sapien
tttaatcctggctcaccatgtacaggctgtgtgaccttggacaagccattcaagttctctaagcttcagattacccatctgtcaagtgggggagaataatagtgcttaactatcatttgcaacatctgagtttctggctcggccaacggggatggggaacatagagtgaggagcaggtgtgctgtgagatggcgaaccttcaacagagcctgagacgtccgtggaacaccaggagagttgcagtggggatttgcaaataggcatctggctcccccacggagatgacgggaatttcagcgcatcaggcatagctgagactgtctacgtggtaaaaccatgcctgaaaagacctttggaaaatcaggaggttgctggagcccttggagagagctttggtgtctgtgacatgtggaaatggaagccagattgaggagggggtgcgagggaaggggtgaagcagctggccagtgtgttctctcctgcagcctgactgaaacagggagggggcaaccaggaacccacagctggagaaggacactgggcaggggtgggacagtttgctgggaaggatgagactccagtgtgtgggaaccgatcaatgggaggatggaaggtatgggggagacggaggcctctgcagagggagaggatagcacaggagccagggctgaagggaacagtggctctagactgagggtaatgggcctgaaggtaggccccttcccctgtgaaggcagcattatctgaggagccgtgagggatgggcaagaagcagcagcttgggaatgccgcctgaggtcagtggaaatgaagctgagggcaagacagttagggccccactgttccagcattgtgggaattgcggtggagtgtgtgtgtgtagggaggggttcctggcagagtcaggcatggatggatttggaggtcccttgaagaaacttccttcaggtcagcctgaagtgtgagggactctgagggggtgcaatgcatgccagccatcccctcctcgcagccctgcctcaccccaaaacttcaggtgggcctggggctgaggtgcttggatgtttgtagtaagagcttctaactctgccgctccacccggctctcagtggctcaggtctgagaggcctcagcaggggcaaggagaggaggcagtgaggagggaaggctctggaggaagagggcatggcagagggtcttcgaggcaacgccagggaggcccagggcatgggggtgaggagctagaactgagctctgagccctcctctgaggttggggtttctgggcaggcagcccccttagaggccctcccttgtaggtattcggccttggttccgtggcccatatgcttctaaataaaacatttgggagctaccttggtgtcaacttgggttttggcttcggagtcaccatgggagtgcacatggcaggccgcacctctggtgagtgagcccaggccctgccggaccgggcaagaccaggtgtccccaacaggctctttcctgcccgcctcagccagctcctttgccagcacagccagtgcctcagcctggccaccgggcgggaggaagtctcctctgaaccccgtgcctatgacgtgtctgccccagattcttcctggcccccccgacctaccattttcactggctgggtgatcttaggcaagccatcgcctctgtgttcctcagtttccttaagagtgaaaggaagacggtggcccctgcctcacggggtggttgtgagggctcaaggagagaactctgtcacggagcatgctgtcatacacactagccatcgttgttctcatactgtttgtcactgttgtttgttctgctctcactccctgacacacttgcctgctgcccgcaggagcccacatgaacgcagctgtgagcctcactaactgtgcactgggccgtgtgccctggaggaagtttccagtctatgtgctggggcagttcctgggctccttcctggcagctgccaccatctacagtctcttctacagtgagcgtcctgcccgggtgtccgcctctggcctcagctgcctcctatgaaatatgggcagattggacctcagtgtcctgatttgtaaaaaatagctgggagaaaaaagccttggaggtctcccaccctctaacctataacctaatttccgggaccctggtggggcttagttggggacaggttcgcatgatagtctgtgtctccacagcggccattctccacttttcgggtggagagctgatggtgaccggtcccgttgctacagctggcatttttgccaactaccttcctga

SEQ ID NO: 41965 - DNA, 2300 bp, Homo sapien
tagctgggcgtggtggcaggcacctgtaatcccagctggggtgggggctgagatgtgagaatcgcttgagcccaagaagcagaagttgcagtgagccgagatcatgccactgcactccagcatgggcaacagaacaagactccatctcaaaaaaagaaaaaatttttgttgagcacctacttatgagtcaagcaccagggatacaaagtcaaaacccactctccactcttgggtcactctgtttaatagaagagatgggtaatggcaacaccaccagagagaagcagcctgggactgggggaactcaggggaggcatgggaggtgaggcctgaagggagttttgaagaatgggcgggtggtggcctgacatggccatggaggagtagggtggtggtagaaagaatggtggaagctgtgcacattctagatattttaggagattggtgactggatgtgaggcatggggaagagggaagtatcaaggacatgaccttgacttctggcttgagcaactgaagagaaggggacccctgactgagccaagagcacaggaggagtggacttgtggggggcggaggaggctgtttccatctaggagctgagttgcctgtgagacaccagtgggtctctagaaacaggatctaaagccctggaaagagacgtaggctagaggcaatgatgtcaacagaggggcactattcattctctccgtccaagtgtacaacaggcaaatatccctgcttgcgtggagctgacagcaatgaaatgtaataagtaagtacatttgtataagcgaaggtaccagctcctatgggaaaaaacagagcaaggagaggggaattgggagtgcaggggctggagatggggtgtgatttcaaatagggcagtcagagtaatccttgttgagaaggtggccttggagcaaagccatgaaggagatgagagtgggctgtatgttaactgcagaaagcctctcagatggagggaatagtcaccagaggactctcagcatgtttgaagaaagcaaagaaagtcagtgtgaggccaggtgcagtggctcacacctgtaatcccaaccttttgggaggccgaggtgggtggatcacctgaggtcaggagctcaagaacagcctggcgaacatggcgaaaccccatttctactaaaaatacaaaaaaaacaaacaaacaaacaaacaactaattagctgggcatggtagtgtgtgcctgtaatcctgtaatcccagctactcaggaggctgaagcaagagaatcgcttgaacccgggagaaggaggttgcagtgaaccaagatcttgccattgcactccagcctgggcaacagaactggattccatctcaaaaaaaaagaaaagaaaagaaaaaaaaaaccagaaaagaaactcagtgtggctggaggagggagagcagggggctggagtggggaggccagaaagctaacaaggactacataggcagggccttggccattgcaaggactggctctttttcaccccaaagacagctgagcctgagagggtgagaggtgctgagtgcagttgagttgaaggccacctgcatgccttgaccctcatccaagtatttctgagcctcccctcaccccaggacccagcccaggcaacaggtggaagatgcttttcttctgggacctcagaggcgagtgggtgggtggggaggaggaggtcgaggggggacagctgccccaagggagaggctgaggatggagcagggagggcactgaagtgggctgggtggaggacagggggctggagggtgagaagagggtggggtacttaccgcctgtgcccagatgcttgaaccatgttttgtccttcagatttgtagatgctgaggagccaaagagaggtcactagggctggaggacacagaacttggccccacacttccatcagatctttgtccccaggggagaagccctggggcagctcctgctagtgccactcccttaacccagccaaggaacagggagggaggagcggtgctcagccaatgaggcgacgccctggagccccaccccacccatgctggccccaggaccccaaccccaggccagaccctccagtgctcctgctgaccttccctgtctgcagcccagctttggactgtggagatgccctcagcctctactcagtggctccagcctcatatttgcgtgctatacctttaacctcaagttctcttgctgctaacttaagctgtgactgtccaggacctgcacacacacatacatgcacgcatgcacacacacacacacacacac

SEQ ID NO: 41966 - DNA, 2300 bp, Homo sapien
gtggatcacctgaggtcaggagctcaagaacagcctggcgaacatggcgaaaccccatttctactaaaaatacaaaaaaaacaaacaaacaaacaaacaactaattagctgggcatggtagtgtgtgcctgtaatcctgtaatcccagctactcaggaggctgaagcaagagaatcgcttgaacccgggagaaggaggttgcagtgaaccaagatcttgccattgcactccagcctgggcaacagaactggattccatctcaaaaaaaaagaaaagaaaagaaaaaaaaaaccagaaaagaaactcagtgtggctggaggagggagagcagggggctggagtggggaggccagaaagctaacaaggactacataggcagggccttggccattgcaaggactggctctttttcaccccaaagacagctgagcctgagagggtgagaggtgctgagtgcagttgagttgaaggccacctgcatgccttgaccctcatccaagtatttctgagcctcccctcaccccaggacccagcccaggcaacaggtggaagatgcttttcttctgggacctcagaggcgagtgggtgggtggggaggaggaggtcgaggggggacagctgccccaagggagaggctgaggatggagcagggagggcactgaagtgggctgggtggaggacagggggctggagggtgagaagagggtggggtacttaccgcctgtgcccagatgcttgaaccatgttttgtccttcagatttgtagatgctgaggagccaaagagaggtcactagggctggaggacacagaacttggccccacacttccatcagatctttgtccccaggggagaagccctggggcagctcctgctagtgccactcccttaacccagccaaggaacagggagggaggagcggtgctcagccaatgaggcgacgccctggagccccaccccacccatgctggccccaggaccccaaccccaggccagaccctccagtgctcctgctgaccttccctgtctgcagcccagctttggactgtggagatgccctcagcctctactcagtggctccagcctcatatttgcgtgctatacctttaacctcaagttctcttgctgctaacttaagctgtgactgtccaggacctgcacacacacatacatgcacgcatgcacacacacacacacacacacacacacacacacacagaaggtgaacacacaggatgaggccctgaaaactcatttcacccgtgtacctcacccaaaaattcccctttgtactcctatctttatctctaactgacagcatgaaggtagcccgaagtcccctcaccctgtctgtcctcctgattctctagcccagttccctctagctccagcacagactcttatctccagccctgactgctgaaaccctccagccccagctccagcccctcaggaggggactgcgtgggaggaatgactccagcaagccggcagctgacccgtctctggcctgcatgcctccccctgtggtccactgccggtggtcttcagctctctcctcgtcccacccccatggtctgctgacagcccagcccagtgcatccctgccatctctgctctaccgctggtcctcccaacaaccaacttacaggtaaggaaactgaggcccagagagaaggtgtatgtgcctgtgtcacacagcaacacaggactgcaccataacaagaaagccgggacttccactcccagccggggctccttccccaaacaatccctcagtcacctcctcgctgtatggtacccagggaatggcccttccagatctgggcactgaggaggctgccccatccccaccctgcctggagccccactcactctgctgaaatgtcttctgattctcagcctctgccttgggggcttctcagttaaagcgcatcttgatcttgtccctctgtgactgtccctggctcagcttccacccccagctggggctcagctatccctgtgtccccagtccagagcctgcctctcagccctcccagggcggccttgagcgctgctcctgctcctccaggggagaggtcagtaaggcagggatttggctggtgccacttgaaccaagtccagatgcactgcccaaaataacatccctcgtctggccagcagtgcagtggagaccgagttctgaagcaggcctttgtgaggtcagaggtggagttctgggtgggcactctgggcctcacagtcccagaggaaaggcctgtcctccaagccaatgtgcagcctgactctggggccagc

SEQ ID NO: 41967 - DNA, 2300 bp, Homo sapien
aggaagcattgcaattcatgcaaatctgactccgcagctctactccaaaggatagtttcaacgttctgggctgagtgggagggatgaaagatcacacatcacctacaaacagggataccacccatatcagacacatttatagtcacagaagtaaatgatgcatggatcagaggatacatgcctcaccataaagttctaaatatagtttacactctacccgaggatattgctttcatctttgttaaccagaaaatagattaagcaaaggttagctggtgagacatgtacaaatcctcaagtcaagctgagtattctgagagcctaaggtgaattttttcttttcccctaaaagtacaacttttacctgctgagtgtaacgatctattttgacttgtgcctcaggacagagttcgatatctttggctccatagacagcctgggcaatggtccttatcttgtccacaattggaagctgcagaaacacaaattataacaaaattgtgtaagtttaatctggttaaagattttttaaaaagtttagtgacacttactgtaattgcttaaaattcccttatcagggtaccccctcagcaactgcaggattccttgcaaaccctcttttttccttttagcaccctaaagcactgaaattttcagtgtcagaatagatcagatgtcaactagcaaataagccttaggtgttcaggcaatttagaggctgcttagagcccatgtagaatctgcagagggaggccgggcacagtggctcacacctataatcccagtactttgggaggccgaggcgggtggattacctgaggtcaggagttcgaaaccagcctgatcaatatggtgacaccccgtctttactaaaaatccaaaaaaactagctgggcttggtggtgcatgcctgtaatccgagctacttgggaggctgaggcaggagaatcacttgaactgggaggcagagactgtggtgagacaagattgtgccactgcactccagcctgggtggagtaggactccgtctcaaaaaaaaaaaaaaatctgcagagggaagagggaagttagtgccttacagagggcttctgactaggaagccccagaactgcggccgaccccttcctctccctgcctcacccctgcagaaagatctgcagaaaaagctggaaggggtgggatggtgtgtgtgggggtggggactggggctatgcagtttccagacctggtctttggcaccctctacaggacagttccattcccacacctgagctttggacaactgaatcctatgccccttcccacccagggaacctggtgccagaaattcccaggacttacccaccatccaccacgccacatagcaagtgtcctcagtgtctgcagaccagaaacaactcccttgtgtctcagcaccgggccacctgctgaaaccccaaactgcctgccccattgtttgagacccagtcaggccttggctccaaaagtcctcttggactgccactggcccccagggtctctcctgactgcacctcggtcccggagctcccacgccgctgggccccgagccccatgccccgatccagctgtggctcctttacgggggccttgctggcctttcctaagggaggtgttttcccgagggcaggtggactgctcctcagactaggggccctcggagggccaggcctgggcttctacctcctctcgcaggctggtgtttctctgcaaatatggctcgtgtgtcctccttcctctcagactgggggcccctgaggactgggcctgagtttccctctcccccttcagaatgggggttccctgaggactgacccagggcctccccccgtcccctccatctggctgttaatctccaacactttcacctccagtcctattctgcacagcgctccccagcgctgggagctcagaggcctcttcagccttccccagggctggggctcagggagggcttcctcaggcgctggccccagagtcaggctgcacattggcttggaggacaggcctttcctctgggactgtgaggcccagagtgcccacccagaactccacctctgacctcacaaaggcctgcttcagaactcggtctccactgcactgctggccagacgagggatgttattttgggcagtgcatctggacttggttcaagtggcaccagccaaatccctgccttactgacctctcccctggaggagcaggagcagcgctcaaggccgccctgggagggctgagaggcaggctctggactggggacacagggatagctgagccccagc

SEQ ID NO: 41968 - DNA, 2300 bp, Homo sapien
gctttcctggccctgccttggccctagcctggctttgaccctgccctggccctaccttggccttcaccctagccttaccagggcactgtgttggacctggccatagcacagacctggttgtggccctggcccagaccctagccctgcaggtaccggtcctggcccagctctgggcctggctttgtccctaattcttagatgaccctggccctgcccctgcccttgcccttgccctggcactggccttggacatgtccgtggtcctaaccctggccctgccctggagctgccactgtcttggccctgccctggctctggccctgccccggccctggccctgccccggccccagccatagacctgccctggttggtcgtgccctaccttaaccctgtgctaccctgggcctgctccaccctgccctggccctgccctccctttggccctgccctgaccccgtcttggccctcacactggccctagcacagacctggtcctatctgtggccttggcctggcattgacccctgctcctgaccctggtcctgccatggccctggccctgccaatgaccctggcagcccttaccctggccctgaactggccctgccctggccctgaagtggatttgcaggtgtcttgtccatggtttaacctggtcttaccatggccctgtccctcccctggctctgtcctggtcttatgctgaccctgacccagaccttggccctgccacagccttgtcctagacctggccatggccctgcgtctgccctggaccggcgctggcactggcatggaccctggccctggcccttcactacttaaggccataccctggcccagccctggccctaatttggcctggctctaccctggcatgctattctggccctagccctgaccctgtccctgtccctgtactggtcctagccccgttgctggtcctgccatggcccttgtcctgacattgccctttcctggttctggccctggccctgtcccagccctgctctggccctggtctgaaccctggccctgcaatagacctgccttggtcctgcccagaccctggctctggccctacctctgccctggccatacccttgccctggcctggaccccggtcctggtccttgtcctgccccagccgtggccctggccctgccctgcctgtgccctgttctatcctgggctggccctgccatggcctggtcttgccattgccctgccctagcttgccctgcttgtgccctagatctgccccgcttgtgccctagatctgccccggcctttgccccatcttggttctagccttgactcagccctggaccttccctgaccttgcctcagccctggcactaccctggcattgccttggcatttgccctactctctctatggcctggctgtggtcctgccctgctctgctcttgttctgtcctggcacagccctggccctggccctggccctgccgtatcactggctctggtcctgcccttatgcagacctgaccctgccactgccttggctttggcctggaccttggccatacagtgaccctgccatgacattttcctggtcctggcctggaacctggccctgccaaggactcgccctggctctgtcatggccctggcccgttcctggatttggatgtgtcctgtcccttatttgccccggcccttccctggctctgccataccccttctctggggtagggccagggtcaggaccagaccagggcagggtcaggaccagggtagggccatgttaaggcctgaagatgggaagggccagggcagcggctggaccagggaagggtcagggccagggatgtagtaggactaggggcagagccggcactagggctgagccagggcagagcaggagagattactttaggctattactaaaatttttattttagatttttaagataactatagtagtagtaatgtctatactatgttgtttgtaatagtaataatacttgcggtaatcactaaattttaactaatactatctttgcttccagtagtgttctatgagtataattttatcaacatgtaaatatgtgaggcattgattctcataataattctatatgctaggtacttaaagcatccccattttccaaatgtaggaaacaggcaaaaagaaggtaaatacttggccagattactcctgtaatcccagcactttgggaggccaaggcaggcagatggcttgagctcaggagtttggaaccagcctgggcaacattgtgaaaccccatctctactaaaaatgcacaaaaa

SEQ ID NO: 41969 - DNA, 2300 bp, Homo sapien
tgggagttaatagaatacttctaatccatttataggatctacactaagtaaaaaaattaaagacatctgaaaactattttgtgagtccttataatccatatcaacaatcatggaatatattaagtaatagaccaaaaattaatcatcatattaaccaaaaacacatagcaagacaagataactaaatattttcatttggaaattgggaaatttagtcaattttaaaactcagcaaatgagatcatttcacagaagcaacctaggtttgctggtaaattaaaattatgacgttttggtttgggagggtagttcctcttctgtaaattgtgtactcacataagaaatatatctatgttctcacggacacttgctgtagaggtaataatatgaagttagctcagggatcagggcctcacagtgcagtgctggtagttttttttgtttttgtttttttttttttttttttgccctgcaccttgagtaaaagtttcctgaggcctccccggaagcagaaaccaccatgcttcctgtatagcctatggaactgtgagccaactaaaggtatttctcatgtatttctttataggaatgcaagagcgtactaatacagctaagcagaggccatcaggaccagcaaaagtctgagctggatgagagacaaagctaaactttgagcagcagcaggagctgccagggattacagaaaggaaggactgactcctaaattccaggatgtctcctttaagtctgtaagaagctcagccactgtctccttacctgactcctctgggaaagagtttccctaggttaaaccatacagggatagggtaggagatgccatttggatctaggagcagagggcagagactcagcaggaagagtgtctctttgagaaggatacacagtggagcaggtgtgtaggttcacagggccagctatgggtagagtcgggtgtacatttttagaagccacaattcccaaaaatctcctgactataagatcagtgcacagagccagtcaaatggaggaggagtgggtccaggcaattcaggaagaaggaaagtaacaaatgagtggttgcaggaggacactttttctgtcgaggtcactaaacaaaacattgtctcctccccttaacttcggaaacaatggagggtaaaagtgttgcctgggccctgggggcaaaggcagtagataacttctctgtcgtgttctccagaagggcccattccagcctcacaggccgagaagtctgttcagttcccaagtactagagatgctgctataagggactcctgaatttccttcctgaaccagaggctgcccagccttttcttcctgttttattttttcccaggaagaaacttgcctgtacaattacaaggttctacggttctaaattccaatctagtcttccacatcattttgaaggtataatattacttgtcaaagtgggatgatagaagatatgtgtggacataaattgttgacaaggaaaaaaactaaaatcagaaaataagaaaaaatatatgtatgtacagtggttagctagaaatgtgccttttaaatatttggcatgtggtatgtgggcctcaatgtgtactattgcactagcttcccaaatattaaaggatgtcttttaaaagaaaaacctcttgctaaaaggttaacagttaaaataaccagagtggcacaggtaccagtcattaagtgaaacctttcatcttcccagaatagtacctgttcccaagccagcttctttgaaaatcacttttctctcctttactatttagtttacagattgtatagtaacaatacagaaaccacaatagtagcaaaaaaaataaagaatatttttaaatgaaaactcacatcctaactctaccaaaacatgaaaattaaacctgaatgcctcccattcctgatatattttcacctaaatattcagctctgggattgcattgtttttggattgagtggaaattattgcctggtcttgaaatcttccataatgtgtgtgtgtgtgtgtgtgtgtgtgtgtgtgcgcgtgcgtgtgtgcatgtgtgtgtgtgtatatgtatgtatgtgtggtgaatatatttctttttgttcggagcaaagattttttcaatatgtatatttattttaggcagattatgctagtaattttctacaaatgtgctttttaaaaaataacctttaatttaaaaaaaattattcttactcagtggcccacaattgttaaaaacgctactaatggagctgggtatggtgacacacacctgtcatcccagctactt

SEQ ID NO: 41970 - DNA, 2300 bp, Homo sapien
tctagccagttcaggataatgtgaattgtgaataatatatttgttcatccagtcaacaaacattttttatcagataccaccgatatgctggacagtgtcatggatcctaaaaatatagctgttattattatttttttaaacaaaatccccactgtgataaagcttttattctttgggacaggcagacagtaatccagataaataaatgcaagggcaaattgggggaaaaattggaatggagagctcagaatctggccccagagaagggcagagggaaaggggacccagttcagaatctcggtgcgtccacaccaaacaattccatgagggctgaagagacagagctgaaaggcttgtctgacatcacaaaagacagaaaagtgagccccattttcatctctatcctgacaatgttcctggcttgatttcctccttccagcagacacaagaatcagggagcgcaccctgatggtaacatttttttcaggggcctattttggggatcctggtgagaacctgagtccgtcactgtccacggcagcccagcatggtccccagtgcgtggtccaaggccaagattctctacctccatcctggaggcagaagaaatgtctgggggaaaatgagaggttttaggtggttggcactgggtgagaccaaggagaaattttaaagctgtgtgtcctggggccgggggtggtggctcacgcctgtaatcccagcactttgagaggccgaggcgggcagatcacgaggtcaggagattgagaccatcctggctaacggtgaaaccccgtctctactaaaaatacgaaaaattagccgggcttggtagcgggcgcctgtagtcccagctattcgggagactgaggcaggagaatggcgtgaaccgggaggcgcagcttgcagtgaactaagatcgcgccactgcactccagcctgggtgacagaaagagactccttctcaaaaaaataaaaataaaataaaaataaaaaatagaaaaagctgtgtgtcctttgtttcttcatattttgcagatttttgatgtcaaaatattttcatagtcaaaagagtgttaataaagaatgacttctctgttataaaaaccctaatagtgaatgtatttaccaagaaattagattctatctttggttttttgttttttgccccgtagtttttaaaaaaatagttttattgtgtggatattctacagttagtgtatctattcacctcttgatggacatttggtttgcttccagttgtttttgctatttcaaataaagttgctacgaatgtttgtccaatcgtttggacatacactttcatttgtcttgggcaaataagcaggatttgaatgactaggtggtgtgatatgtttaacttttttttttttttttttttttttgagacggagtctcgctctgttgcccaggctggagtgcagtggtgcatcgcggctcactgcaagctccacctcccgggttcacgccattctcctgcctcagcttccggagtagctgggattacaggtgctcgccaccacgcccggctaattttttgtatgtttagtagatatggggtttcgccgtgttagctaggatggtctcgatttcctgacctcgtgatccgcccgccttggcctcccaaagtgctgggattacaggcgtgagccaccgctcccagccagtttaacttttaaagaaactgacaaagtggctgtatttccagcagcagtatatgagcattcctgttcctttgtgttctcaccaatgtttagtatggtcagtcttttaaattttagctattctaataggcaagtaacagtatctcattgtggttttaatttacatttccctaatgatgaatgatgtgcttatgtatcgtccatctgtattctatggtgaaatgtctgttcagatctctacatttgtgttagactatttgttttcctattattgagtcctgagagttctttgcatattttggataacaaatgtatcttcaccagatatagcttttgtaaatttttactcccagtctgtgatttgtctttttattctctcgatagtgtttttcttttttcttttttttttttttttgacagagtctggctctgtcacccaggctggatttcggtggcacgatctcggctcactgcaagctccgcctcccgggttcacgccattctcctgcctcagcctctacgagtggctgggactacaggcgcccgccactacgccccgctaattttttgtatttttggtagagaggggtttcatcgtggtctagatcgcctgac

SEQ ID NO: 41971 - DNA, 2300 bp, Homo sapien
gctttcctggccctgccttggccctagcctggctttgaccctgccctggccctaccttggccttcaccctagccttaccagggcactgtgttggacctggccatagcacagacctggttgtggccctggcccagaccctagccctgcaggtaccggtcctggcccagctctgggcctggctttgtccctaattcttagatgaccctgcccctgcccctgcccttgcccttgccctggcactggccttggacatgtccgtggtcctaaccctggccctgccctggagctgccactgtcttggccctgccctggctctggccctgccccggccctggccctgccccggccccagccatagacctgccctggttggtcgtgccctaccttaaccctgtgctaccctgggcctgctccaccctgccctggccctgccctccctttggccctgccctgaccccgtcttggccctcacactggccctagcacagacctggtcctatctgtggccttggcctggcattgacccctgctcctgaccctggtcctgccatggccctggccctgccaatgaccctggcagcccttaccctggccctgaactggccctgccctggccctgaagtggatttgcaggtgtcttgttcatggtttaacctggtcttaccatggccctgtccctcccctggctctgtcctggtcttatgctgaccctgacccagaccttggccctgccacagccttgtcctagacctggccatggccctgcgtctgccctggaccggcactggcactggcatggaccctggccctggcccttcactacttaaggccataccctggcccagccctggccctaatttggcctggctctaccctggcatgctattctggccctagccctgaccctgtccctgtccctgtcctggtcctagccccgttgctggtcctgccatggcccttgtcctgacattgccctttcctggttctggccctggccctgtcccagccctgctctggccctggtctgaaccctggccctgcaatagacctgccttggtcctgcccagaccctggctctggccctacctctgccctggccatacccttgccctggcctggaccccggtcctggtccttgtcctgccccagccgtggccctggccctgccctgcctgtgccctgttctatcctgggctggccctgccatggcctggtcttgccattgccctgccctagcttgccctgcttgtgccctagatctgccccgcttgtgccctagatctgccccggcctttgccccatcttggttctagccttgactcagccctggaccttccctgaccttgcctcagccctggcactaccctggcattgccttggcatttgccctactctctctatggcctggctgtggtcctgccctgctctgctcttgttctgtcctggcacagccctggccctggccctggccctgccgtatcactggctctggtcctgcccttatgcagacctgaccctgccactgccttggctttggcctggaccttggccatacagtgaccctgccatgacattttcctggtcctggcctggaacctggccctgccaaggactcgccctggctctgtcatggccctggcccgttcctggatttggatgtgtcctgtcccttatttgccccggcccttccctggctctgccataccccttctctggggtagggccagggtcaggaccagaccagggcagggtcaggaccagggtagggccatgttaaggcctgaagatgggaagggccagggcagcggctggaccagggaagggtcagggccagggatgtagtaggactaggggcagagccggcactagggctgagccagggcagagcaggagagattactttaggctattactaaaatttttattttagatttttaagataactatagtagtagtaatgtctatactatgttgtttgtaatagtaataatacttgcagtaatcactaaattttaactaatactatctttgcttccagtagtgttctatgagtataattttatcaacatgtaaatatgtgaggcattgattctcataataattctatatgctaggtacttaaagcatccccattttccaaatgtaggaaacaggcaaaaagaaggtaaatacttggccagattactcctgtaatcccagcactttgggaggccaaggcaggcagatggcttgagctcaggagtttggaaccagcctgggcaacattgtgaaaccccatctctactaaaaatgcacaaaaa

SEQ ID NO: 41972 - DNA, 2300 bp, Homo sapien
agttaatagaatacttctaatccatttataggatctacactaagtaaaaaaattaaagacatctgaaaactattttgtgagtccttataatccatatcaacaatcatggaatatattaagtaatagaccaaaaattaatcatcatattaaccaaaaacacatagcaagacaagataactaaatattttcatttggaaattgggaaatttagtcaattttaaaactcagcaaatgagatcatttcacagaagcaacctaggtttgctggtaaattaaaattatgacgttttggtttgggagggtagttcctcttctgtaaattgtgtactcacataagaaatatatctatgttctcacggacacttgctgtagaggtaataatatgaagttagctcagggatcagggcctcacagtgcagtgctggtagttttttttgttttttttttgttttttttttttttgccctgcaccttgagtaaaagtttcctgaggcctccccggaagcagaaaccaccatgcttcctgtatagcctatggaactgtgagccaactaaaggtatttctcatgtatttctttataggaatgcaagagcgtactaatacagctaagcagaggccatcaggaccagcaaaagtctgagctggatgagagacaaagctaaactttgagcagcagcaggagctgccagggattacagaaaggaaggactgactcctaaattccaggatgtctcctttaagtctgtaagaagctcagccactgtctccttacctgactcctctgggaaagagtttccctaggttaaaccatacagggatagggtaggagatgccatttggatctaggagcagagggcagagactcagcaggaagagtgtctctttgagaaggatacacagtggagcaggtgtgtaggttcacagggccagctatgggtagagtcgggtgtacatttttagaagccacaattcccaaaaatctcctgactataagatcagtgcacagagccagtcaaatggaggaggagtgggtccaggcaattcaggaagaaggaaagtaacaaatgagtggttgcaggaggacactttttctgtcgaggtcactaaacaaaacattgtctcctccccttaacttcggaaacaatggagggtaaaagtgttgcctgggccctgggggcaaaggcagtagataacttctctgtcgtgttctccagaagggcccattccagcctcacaggccgagaagtctgttcggttcccaagtactagagatgctgctataagggactcctgaatttccttcctgaaccagaggctgcccagccttttcttcctgttttattttttcccaggaagaaacttgcctgtacaattacaaggttctacggttctaaattccaatctagtcttccacatcattttgaaggtataatattacttgtcaaagtgggatgatagaagatatgtgtggacataaattgttgacaaggaaaaaaactaaaatcagaaaataagaaaaaatatatgtatgtacagtggttagctagaaatgtgccttttaaatatttggcatgtggtatgtgggcctcaatgtgtactattgcactagcttcccaaatattaaaggatgtcttttaaaagaaaaacctcttgctaaaaggttaacagttaaaataaccagagtggcacaggtaccagtcattaagtgaaacctttcatcttcccagaatagtacctgttcccaagccagcttctttgaaaatcacttttctctcctttactatttagtttacagattgtatagtaacaatacagaaaccacaatagtagcaaaaaaaataaagaatatttttaaatgaaaactcacatcctaactctaccaaaacatgaaaattaaacctgaatgcctcccattcctgatatattttcacctaaatattcagctctgggattgcattgtttttggattgagtggaaattattgcctggtcttgaaatcttccataatgtgtgtgtgtgtgtgtgtgtgtgtgtgtgtgcgcgcgcgtgcgtgtgtgcatgtgtgtgtgtgtatatgtatgtatgtgtggtgaatatatttctttttgttcggagcaaagattttttcaatatgtatatttattttaggcagattatgctagtaattttctacaaatgtgctttttaaaaaataacctttaatttaaaaaaaattattcttactcagtggcccacaattgttaaaaacgctactaatggagctgggtatggtgacacacacctgtcatcccagctactt

SEQ ID NO: 41973 - DNA, 2300 bp, Homo sapien
tagccagttcaggataatgtgaattgtgaataatatatttgttcatccagtcaacaaacattttttatcagataccaccgatatgctggacagtgtcatggatcctaaaaatatagctgttattattatttttttaaacaaaatccccactgtgataaagcttttattctttgggacaggcagacagtaatccagataaataaatgcaagggaaaattgggggaaaaattggaatggagagctcagaatctggccccagagaagggcagagggaaaggggacccagttcagaatctcggtgcgtccacaccaaacaattccatgagggctgaagagacagagctgaaaggcttgtctgacatcacaaaagacagaaaagtgagccccattttcatctctatcctgacaatgttcctggcttgatttcctccttccagcagacacaagaatcagggagcgcaccctgatggtaacatttttttcaggggcctattttggggatcctggtgagaacctgagtccgtcactgtccacggcagcccagcatggtccccagtgcgtggtccaaggccaagattctctacctccatcctggaggcagaagaaatgtctgggggaaaatgagaggttttaggtggttggcactgggtgagaccaaggagaaattttaaagctgtgtgtcctggggccgggggtggtggctcacgcctgtaatcccagcactttgagaggccgaggcgggcagatcacgaggtcaggacattgagaccatcctggctaacggtgaaaccccgtctctactaaaaatacaaaaaattagccgggcttggtagcgggcgcctgtagtcccagctattcgggagactgaggcaggagaatggcgtgaaccgggaggcgcagcttgcagtgaactaagatcgcgccactgcactccagcctgggtgacagaaagagactccttctcaaaaaaataaaaataaaataaaaataaaaaatagaaaaagctgtgtgtcctttgtttcttcatattttgcagatttttgatgtcaaaatattttcatagtcaaaagagtgttaataaagaatgacttctctgttataaaaaccctaatagtgaatgtatttaccaagaaattagattctatctttggttttttgttttttgccccgtagtttttaaaaaaatagttttattgtgtggatattctacagttagtgtatctattcacctcttgatggacatttggtttgcttccagttgtttttgctatttcaaataaagttgctacgaatgtttgtccaatcgtttggacatacactttcatttgtcttgggcaaataagcaggatttgaatgactaggtggtgtgatatgtttaacttttttttttttttttttttttttttgagacggagtctcgctctgtcgcccaggctggagtgcagtggtgcatcgcggctcactgcaagctccacctcccgggttcacgccattctcctgcctcagcttctggagtagctgggattacaggtgctcgccaccacgcccggctaattttttgtatgtttagtagatatggggtttcgccgtgttagctaggatggtctcgatttcctgacctcgtgatccgcccgccttggcctcccaaagtgctgggattacaggcgtgagccaccgctcccagccagtttaacttttaaagaaactgacaaagtggctgtatttccagcagcagtatatgagcattcctgttcctttgtgttctcaccaatgtttagtatggtcagtcttttaaattttagctattctaataggcaagtaacagtatctcattgtggttttaatttacatttccctaatgatgaatgatgtgcttatgtatcgtccatctgtattctatggtgaaatgtctgttcagatctctacatttgtgttagactatttgttttcctattattgagtcctgagagttctttgcatattttggataacaaatgtatcttcaccagatatagcttttgtaaatttttactcccagtctgtgatttgtctttttattctctcgatagtgtttttcttttttcttttttttttttttttgacagagtctggctctgtcacccaggctggatttcggtggcacgatctcggctcactgcaagctccgcctcccgggttcacgccattctcctgcctcagcctctacgagtggctgggactacaggcgcccgccactacgccccgctaattttttgtatttttggtagagaggggtttcatcgtggtctagatcgcctgac

SEQ ID NO: 41974 - DNA, 2300 bp, Homo sapien
aagcataaatttggtttgttcatttaaaaatggtctttttttcccatcttatttctggctttactagggagatagattggctgaggttgtcacctaattctgggaggttaagagcctttgtcttttgctacccatttctgaaataaccagaagtctagcccatcctaactttcctctcgatgatccttttcttctttttacttcaaggttccagcccttcatttgactatcagtgctgttcactagttagccatgatccctttcatcctccgtgtctggattagaactgtatttttaatttgatgctgtgggcagttttgatagttacagatcctgtgatacatttaaatgtgtttacaaggggaacaaatgaaacaatgctgcatgaaatttgcctttcattttttttttcttccccttggagacagggtctgggtctattgcccaggctagagtgcagtggtgcgatgtcagctccctatagcctctgtgtcctgggcttaagccatcttcccacctcagactcatgagtagctgggactataggcacgcactaccatgcctggctaattttttattttggtagaagatgaggttttgccatgttgctgaagctgatcttaaactcctgggcttaagtgatctgcccacctcagcctcccaaagtaatgggattataggcatgagccaccacacttggccttttcttttttttatatttatttaattattttattttattgagacagagtctcactctgacacctgggctggaatgcagtggctatcatggctctctgcagtcgtgaactcctggactcaagtgatcctcccatctcagcctcctgagtagctgggactacaggcttgcgcccatgcctggctaatttttttatttttacttttttgtagtgacaggctctcgctacgttgctcaggctcatcttgaactcctggcctcaagtgattctcctacttggcctctcaaagtgctgggattataagcctgagccactgaacccagcaaaatttgcctttcttaaactaatttatctctgttgggtccaagagcttacaagttggttgtcatttaatatgttaaacactagaatattttttagttgaaattttattttttccctttacatattgtatcctttagtgctttatttcactaataagaattatagtatgcaatcatttcccacctctatattcagtatatcaatttttgtttttcctttctacttctgtcttttgctataatttgctgtaatacaggtactttcatcaaggcatccagttctttatatcattctatatttttacttgggagaaatagaaatgttgctaattccatcttactgacaatacctaaattattgtttgttatagaacataatgatttaaatatacaaaacactaaactgtttgagattttttacattttatgtgtgcagaatttacattttatgtgtgcagagacaaaaattgttataagattacaagttaatgtgcaagatgatttccgattcatgagtttcaggttttgatagcatatccttatccactagattagtcttttaaaaatgtgtatgatagggaaaaaatcgagggcatgaaattctgagacttatgggaactaaacttaaatgttcgttgttagatttttttttttttttttttttgctgcatatgaagttttaggcagtcattgtccaacaacattaaatactgaacatatgggaaaagcatatgatttttcaaaatgtttttctaaagtaatctcattctacatacacttaagagcagttataatgctttagtgacacttgaagtagctttttaatgtgatctcaccactatagggaaggccgttgcatgacttttttgtgtgtgcttaactgctaaacaggagaatcttttcctgagcaaccagttgggaaggatttaatttgacattctccctactaggacccccccaaagagactcattccctccaatagttcctacaagttctttctctttcctaaacttgctgttactaatttacccctcactgttttcaaggcaaagcctctgcaaggttttaagtcctttccccctcccgtcctgtccccatcagtgttgaaatgtatgctacagttattatggttgtaatttgttatgccatgttgatcttcttgtgcttttcatatcagaacaatgcatttttaacattctgactttctttttctctcaattggtaactgactatatagaaaatttatatttatggatactatttcttttttaataa

SEQ ID NO: 41975 - DNA, 2300 bp, Homo sapien
atggcatcttcttccaaaaggaggccatttcatctccattaaaaatctgttgctggccgggctcggtggctcatgcctgtaatctcagcactttgggaggccgagatgggcagatcacgagttcaggagttcaagaccagcctggccaacatagtgaaaccccatctcgactaaaaataccaaaaattagcctggcttggtggtgggagcctgtaatcccagttacttgggaggctgaggcaggagaatggcttgaacccgggaggcggaggtggcagtgagctgagattgcacattgcactccagcctgggtgacagagcgagactccatctcaaaataaataaataaataaataaaaaataagtctgttacttagtgtagctactttcacgaatgatgttagctacatcttctaggtagtttactacagcttctatatcagcatttgctgcttccccttgcacttttatgttatggagatggcttctttctttaaatcttgtgaaccaacctctgctaccttccaacttttcttctctagcttcctcacctctctcagccttcacagaactgaagagagttagggttgctctgaattaggctttggcttaagggaacattgtggcttgtttgatcatctatccagaccacttcatatcagcaataaggctgttttattatcatttgtgtgtttactggagtagcacttttaatttccttcaagaacttttcctttgcattcacaacttagctaactggctcaagagacctagcttttggcgtatcttggctttcaacataacttcctcactaagcataatcatttctagctcttgatttaaagtgagaaacaggtgactgttcctttcacttgaacacttagaggccattgtaggatattaattggcctagtttcgtgttgatcatattctttatgttgtcatggttctgtcataattcttttagttctatgttttaatagttttggtgctcattaccagtactgttgcttctccattcccgagttagtccatctcctgattgaatttcattgtcaggcagtcttttcaagttacaggtactgcatgcattctttgggttcttatacacttcattgattcaaaatatttgtcttttgtttttatattacttgaaggattacttggctaggtataaaatttatcagtcacacttttttcccccaaactttgtaaatgttgttccataatctcctagtgtttgattggctggatttctttgtccaatgttttctccttttattaggaagaatttgtgagtattatagtctctgagtttcaatgcttgctgttttctttaatgcttgagaatgtctgtctattgctttcgttcctgaaaaataacttgtttgggaacactttcattagaactttgtggtcactgttttattattttgggacatctagtgttactgtagaaaagtctgatttttctccctccctccttgaaggcactttttttttttttaatctaaaatgcctgagagttttcttctttatttttgaaattcagtaatataaacaaggtatatctaagtgtcacttataatcatttttccctaaattataatatgcccttagttcttctaagaacattttccttgtttattaccatgaatactttttttttggtcaaattattagatcctctacttcatgacaccagtttttttaatactgaattttcttttgttcttcgtatgtattctaattgctttgatgtgtcttttacctttgcatttactgtgatcatctgaagcctttctttttgtcagtaattctgttttctccagtgtctgtcctgtttttgatattttaaatgaattaattggttaagtcattaattattaattaattggttaagtcaataattaaattattaataattattaattaattggttaagtcaataattaaaaataattaattggttaagtcatataggctctaagtttctttagcactacaaactgcattttcatcttattctgcttcttcttgcttttgagcttgtttattataaggttgtattgttttcaagttcttcattatgatgaagttgttgagaattttctttagtttttattgggttatgtatccttccagaatgggttggttctttgccatttgtatgccctattcatttcttcattttgtgttctttcttgctttttattccctgtatgtgtgtgtttctttttgtcaggctgtaatacatatgcatacatgtttcttcttgatatgggagaacttctatgtgg

SEQ ID NO: 41976 - DNA, 2300 bp, Homo sapien
ccctgtctcaaaaaacagaaagagggattttagtataacattcagccagtgccatattgggaacccacaagaatgtacttttaaaaatatgtcaaagaaggtggtgagggctgtaatagctgctattcaggcagtaatgcagtgctgaagggacatcaagcaaatagtgtgatgactgtgggtgcaatgttactccttcccttaggttgccaaaaaaatcaatacttcatagcattcctgaaacgaaaaagcttatgaaccattgtgtttagggtgtaagctatctattttgggctacccatcacagcttctctcctttggtagaataaagtgaactgaaccatcacgcctaaggtatttgccttatttcttcctcagctggttcatggttacattgtcaaagctggcaaagcattcaagacctgatttctcagaccgagtgtatgtgtgaatataatatactcatttgcacaaatataaaccctctgtcttaactgtgttctgcaaaaggcgtgataaatactttcaagttatatgtacttatcagtagaactaatggaatacacacagtatattttatggggaatttcagagaaggaaggaaaagtcaaccttttatctggcatcaggatagtagtaaaacattctacttgtgcatcagatagatttttatgacctaacctggacaagtaacttaactcttggtgcctcatgtttgaaagagggataacactctacagggtcattctaagaattaaatattgccaaaacacatgaaaagattctcaaccttgttagtaatcaaggaaatgcaaatgaagatcacaatgaagtcttcttttgtactcaattgattggtgaaaaatgcatgcctgataatattgacatacagaccaatgagatctcttataatttgctgggaaaatgtatcaatttgtacaaacattttgaaaaataattgtgcattttcttgtgaagtaaaacatttgaataatctaggacccagcaattcaactcttacacagacactcaagaggaagttgcacacacatatgtcaggaaaaatgttcatagcagccctgttcataagagcaaaacctggaacaattgagaggaaatgaataaattgccgtgtagccacacaatagaatacaagacagcagtgatgctgaaaaatatagcaagcctcaggagtttatatattatatggataattttatgaagctcaaaaacacccaaaattaaacaacatattctctaagtacatacgtgggatatgtgataaaactaaaaagaaaacagggaatgatcagcaatccagaaccaattcatgactgttgttactatcttatggggcaggctgtggattggaagcgggggcggtgcacataggtacgtgtaacttactggtaatgcttttacgtcaggaatgaggtcaaaggagttcactataaatttatattagaaagaagggctatctatggattagtgatgagagtgtcatgcaccagcaaatatgattaatgaacttagattacctgaggtccaaataaataatgaggaaaaagtaaataaaagtgatgcatgaatactaaaaatttggaattacatatataatatgtaataataaaaaaagaaaaaattgtcactggttatccttcaggtataaaaattacaattaaaattgtaatgttataaccttccattctttcccctatgaattaaaacttttttttttaacgagactaaaaaatcaagttgataaaatctatgccctgtgggaactggttaggtcaggttacccactccagatttccagcaggctagcctcagctctacctacagccagtagcttattaaggctctaggcgccagtgacaccttcagacaggtggttagtgcgccctaagggctctccgcagcgtcgctcaggttcacagaacacgcccaggggcgtgtccagctgtcgtcggggagagcccacctccccggggggtgtggctaagggacgaggcagttctcgtccagagcccaggtaatccgggcgggatcagctagcgtcgcgatgtgatgacgtcaggccccggccaggccgggagtggcgtgctgggcgtgcgcggctgcggtacggcgtgttggtcccagcggttcagctgaggtagggacgtgccgtaggccggaatgttaccggctgttggatctgtggatgaggaagaggatcctgcggaggaggattgtcctgaattggttcccattgagacgacgcaaagcgaggaggaggaaaagtctggcctcggcgc

SEQ ID NO: 41977 - DNA, 2300 bp, Homo sapien
tgtaacctcaaactcctaggcttgcgtgatcctcccacctcagcctcctgagtagctgggactactggtgcatgccaccatgcccagctaagttttaaaatttttgtagaaacagggtcttgctatgttgcccaggttgaccttgaactcctggcctcaagagatcctttcccctcagcctcccaaagtgcttgtattacaggcatgagccactgtgcacagcctacttatattatttaaaaaacaattaatcaaataagttggttaggattagtttcagtggcataaacagaaacttaaacaatgtgaaagcttatttctgtctccttctgccaggtgaacacacagtgttcatcccctcaggaggacacagcttttgaggtaccatcttggaagcagagaccagccctcactagacacaaacttcctggcacgttgattttggacttcatagcctctagaactgtgagaaataaatttttattatttataaattaccctgtattggatattttgttatagcagcacaaaaggtctaagacaatgactgaaagacggagctataggactcaaaagaccctggtcttgaagccagaaagacctggctttgccagtagcatggtatttcaattaagtatgattaaacactcttcgagggaatagaaaggggaaggaagaatggagatggatcatttgtttcatgccttttacttacgtgtaaggaattatgagcaggtgcctatggattttggaatatgcttctctaacactataaaaattagaaagtgaaacttatagccacaaatgtccatttaaaatttctaatgacaatggaagaaattatttagactctctcctatactattacaccatacatcattgcaaaacattttttttcattttgcccaacctccactcctgtcattccaccactcctatagtatctaaaatatagtttcttttagagagattggtgcaccactcaacttgtcagcttgagggctttgaatggtgttttcttttttttttaaatttcatggcaagctgacttacaagtgactcaactgtaagctaagacttattaatagcatggtttaaccaccaaagataatgaattcaaacaatgttacttacagcctttaatgtcacagcccctaaaaacattgaaatgtacatttttcacctgctagtcatcttcagtattctggagaggaaatattctttcctgtccttacagtggttgtatatcttaaaagacgactatatgacacttgaatattgatattcaaccttaaccaaagcagtcacaagaatacaagccattggcctctggccttttagatatgttcccaacaagttcatgtgtacccaatgaaaaatgttaaataaactgataaactttaaacatttaaaaatattttatttatttacttgccacagctagataagaggaactgggttaattttgaaactctcagtttcctttcctctaaaccagtagctattgctggccactagtatgttgtttcctttgcaggaagttgcaaaaatgagaaagaaaaaaacgaaaaacaaaaccaagttggtattatttttagctttcttcttatttggatatagctacagttctttttcttatggtgattaacataactattcaagagagaagaaccaagcaaaggggagtagtagggaattagtagggaattgtgccaaaggacatatggcaaggttattgtcagaaagctgagctgctgaaatccagacagtttaagagcttatctgctctgctctgctcccacctaggaggactcctactacaatgcaaagactcaagtttcaccttaattaggtctttcccaggccaggtattagtgaccttgggaaaaaagtttaagcttctcagcttcagatcttcctctgaatattagcactgtggtaattggcacagtggtacctaaccctttgagggtccaggattgttttaatggtgagtgatttacaaactgagtttaaaagagcaaggaggatccaattttgcaaaatttcattaactctgcttaagaaaacagtatattatattagcttagatcaggagttgggaatctatagcctgctaccatttattgtgtagcctgcaaatggtttttacatttttaatacattggaaaaaaaattaaagaagattattatttcgtgatgtgaaaattatacatgttgaaaggaaaactttagagtttaattgagtaaagaatgatctgtgaattaggcagcccccagaaccagagtagggttggtta

SEQ ID NO: 41978 - DNA, 2300 bp, Homo sapien
tactccctgaggtagttcatgttattgcaagggtgtgtatcatcacaaacatattgcttccacatacatatatcagcatacatatatatatatgtatagcatatatatatatgagcacatattaatatatgcccatgcacatacaagcatgtttttgttaatttttactgaaatggaatcatactgcatacttatgaacaaattgcttctttcaccttatatcacttataattgttattctacaaatcagtacatataaaaaatacatatttacatatgtaatactctatctttctgttataattttctgcatgcacatgtatgcatatacatatattcataaacataaaacttaatctaaacgggattttttttggggggggtgatatggtttggctgtgtccccacccaaatctcatcttgaattcccatgtgttgtggggggacccggtgggaggtaattgaattatgggggcaggtctttcctgtgctgttctcgggatagtgaaaaagtctcacaagatctgatggttttaaaaagatgagtttccctgcataatctctcttctcctgtctggttccatgtgagatgtgccttttgccttccgccatgattgtgaggcctccccagccatgtggaactgtaagtccaataaacctctttcttttgcaaattgcccagtctcaggtatgtctttatcagcagcataaaaatgaaacaatacagtaaattggtacaagtagagtggggcgctgctgaaaagatacctgaaaatgtggaagaaactttggaactgggcaacaagcagaggttggaacagttttgagggctcagaagacaggaatatgtgggaaagtttggagcttcctagagacctgttgaacgactttgcccaaaatgctgatagtgatatggacaataaagtccaggctgaggtggtcttagatggaaacaagaaacttgttgggaactggagcaatggtgactcttcttatgttttagtaaagatactaggggcattttgcccctgccatagatatatgtgaaacttttaacttgagagagatgatttagggtacctggcagaagaaatttctaagcagcaaagcattcaagaggtgacttgggtgctgttaaaggtattcagttttataagggaagcagagcacaaaagtttggaaaatttgcagcctgacaatgtgctagaaaagaaaatcccattttctgaggagaaattcaagctggctgcagaaatttgcataagtaacaaggagctgaatgttaatccccaagacaatggggaaagtgtctccagggcatgtcagagttcttcatggcagcccctcccatcacaggcccagaggtttaggaggaaaaagtggtttcgtgggctgggcccagggtccctctgctgtatgcagtctagggacttcataccctgcatcccagccatgaatgaaaggagccaaagtacagctctgtctgttgcttcagagggtgcaagccccaagccttggcagcttccacatggctttgagcctgcgggtgcacagaagtcaagaattgaggtttgggaaactccgcctagatatcagaagatgtagaagtttgctgtaggggtgggtccctcatggagaacctctgctagggcagtgtgaaagggaaatgtgagattggagcccccaaacagagtccctactggggcaccatctagtggagcagtgagaagagggccactgttctttagaccctggaatggtagatccatggacggcttgcactgtgcacctagaaaagccacagacactcaatgccagcctgtgaaagcaacctggagagaggctgtaccctgcaaaacctcaggggcagagctgcccaagaccataggaaccaaccccttgcatcagcatgacctggatgtgagacatggaggcaaaggagatcattttggagctttaagatttgactgtcccactggatttcagactttcatggggcctgtatcccctttgttttggccaatttctcccatttgggatggctgtatttaccaatgctgtacccccattatatctaggaagtaactaactcgcttttgattttacaggcccataggtggaagggacttgccttgtctcagatgagactttggactttggactgtggacttttgagttaacactgaaatgaattaatgctgaaatgaattaagactttgggagacggttgagaagccatgactcattttaaaatgtgagaacatgagatttgggaggggctggggtggaatggtatggtt

SEQ ID NO: 41979 - DNA, 2300 bp, Homo sapien
ctgaggtagttcatgttattgcaagggtgtgtatcatcacaaacatattgcttccacatacatatatcagcatacatatatatatatatatatgtatagcatatatatatatgagcacatattaatatatgcccatgcacatacaagcatgtttttgttaatttttactgaaatggaatcatactacatacttatgaacaaattgcttctttcaccttatatcacttataattgttattctacaaatcagtacatataaaaaatacatatttacatatgtaatactctatctttctgttataattttctgcatgcacatgtatgcatatacatatattcataaacataaaacttaatctaaacgggatttttttttgggggggtgatatggtttggctgtgtccccacccaaatctcatcttgaattcccatgtgttgtggggggacccggtgggaggtaattgaattatgggggcaggtctttcctgtgctgttcttgggatagtgaaaaagtctcacaagatctgatggttttaaaaaggtgagtttccctgcataatctctcttctcctgtctggttccatgtgagatgtgccttttgccttccgccatgattgtgaggcctccccagccatgcggacccgtaagtccaataaacctctttcttttgcaaattgcccagtctcaggtatgtctttatcagcagcataaaaatgaaacaatacagtaaattggtacaagtagagtggggcgctgctgaaaagatacctgaaaatgtggaagaaactttggaactgggcaacaagcagaggttggaacagttttgagggctcagaagacaggaatatgtgggaaagtttggagcttcctagagacctgttgaatgactttgcccaaaatgctgatagtgatatggacaataaagtccaggctgaggtggtcttagatggaaacaagaaacttgttgggaactggagcaatggtgactcttcttatgttttagtaaagatactaggggcattttgcccctgccatagatatatgtgaaacttttaacttgagagagatgatttagggtacctggcagaagaaatttctaagcagcaaagcattcaagaggtgacttggctgctgttaaaggtattcagttttataagggaagcagagcacaaaagtttggaaaatttgcagcttgacaatgtgctagaaaagaaaatcccattttctaaggagaaattcaagctggctgcagaaatttgcataagtaacaaggagctgaatgttaatccccaagacaatggggaaagtgtctccagggcatgtcagagttcttcatggcaacccctcccatcacaggcccagaggtttaggaggaaaaagtggttttgtgggctaggcccagggtccctctgctgtatgcagtctagggacttcataccctgcatcccagccatgaatgaaaggagccaaagtacagctctgtctgttgcttcagagggtgcaagccccaagccttggcagcttccacatggctttgagcctgcgggtgcacagaagtcaagaattgaggtttgggaaactcctcctagatatcagaagatgtagaagtttgctgtaggggtgggtccctcatggagaacctctgctagggcagtgtgaaagggaaatgtgagattggagcccccaaacagagtacctactggggcaccatctagtggagcagtgagaagagggccactgttctttagaccctggaatggtagatccatggacggcttgcactgtgcacctagaaaagccacagacactcaatgccagcctgtgaaagcaacctggagagaggctgtaccctgcaaaacctcaggggcagagctgcccaagaccataggaaccaaccccttgcatcagcatgacctggatgtgagacatggaggcaaaggagatcattttggagctttaagatttgactgtcccactggatttcagactttcatggggcctgtatcccctttgttttggccaatttctcccatttgggatggctgtatttactaatgctgtacctccattatatctaggaagtaactaactcgcttttgattttacaggcccataggtggaagggacttgccttgtctcggatgagactttggactttggactgtggacttttgagttaacactgaaatgaattaatgctgaaatgaattaagactttgggagacggttgagaagccatgactcattttaaaatgtgagaacatgagatttgggaggggctggggtggaatggtatggtt

SEQ ID NO: 41980 - DNA, 2300 bp, Homo sapien
tgtaacctcaaactcctaggcttgcgtgatcctcccacctcagcctcctgagtagctgggactactggtgcatgccaccatgcccagctaagttttaaaatttttgtagaaacagggtcttgctatgttgcccaggttgaccttgaactcctggcctcaagagatcctttcccctcagcctcccaaagtgcttgtattacaggcatgagccactgtgcacagcctacttatattatttaaaaaacaattaatcaaataagttggttaggattagtttcagtggcataaacagaaacttaaacaatgtgaaagcttatttctgtctccttctgccaggtgaacacacagtgttcatcccctcaggaggacacagcttttgaggtaccatcttggaagcagagaccagccctcactagacacaaacttcctggcacgttgattttggacttcatagcctctagaactgtgagaaataaatttttattatttataaattaccctgtattggatattttgttatagcagcacaaaaggtctaagacaatgactgaaggacggagctataggactcaaaagaccctggtcttgaagccagaaagacctggctttgccagtagcatggtatttcaattaagtatgattaaacactcttcgagggaatagaaaggggaaggaagaatggagatggatcatttgtttcatgccttttacttacgtgtaaggaattatgagcaggtgcctatggattttggaatatgcttctctaacactataaaaattagaaagtgaaacttatagccacaaatgtccatttaaaatttctaatgacaatggaagaaattatttagactctctcctaaactattacaccatacatcattgcaaaacattttttttcattttgcccaacctccactcctgtcattccaccactcctatagtatctaaaatatagtttcttttagagagattggtgcaccactcaacttgtcagcttgagggctttgaatggtgttttcttttttttttttaatttcatggcaagctgacttacaagtgactcaactgtaagctaagacttattaatagcatggtttaaccaccaaagataatgaattcaaacaatgttactcacagcctttaatgtcacagcccctaaaaacattgaaatgtacatttttcacctgctagtcatcttcagtattctggagaggaaatattctttcctgtccttacagtggttgtatatcttaaaagacgactatatgacacttgaatattgatattcaaccttaaccaaagcagtcacaagaatacaagccattgacctctggccttttagatatgttcccaacaagttcatgtgtacccaatgaaaaatgttaaataaactgataaactttaaacatttaaaaatattttatttatttacttgccacagctagataagaggaactgggttaattttgaaactctcagcttcctttcctctaaaccagtagctattgctggccactagtatgttgtttcctttgcaggaagttgcaaaaatgagaaagaaaaaaacgaaaaacaaaaccaagttggtattatttttagctttcttcttatttggatatagctacagttctttttcttatggtgattaacataactattcaagagagaagaaccaagcaaaggggagtagtagggaattagtagggaattgtgccaaaggacatatggcaaggttattgtcagaaagctgagctgctgaaatccagacagtttaagagcttatctgctctgctctgctccacctaggaggactcctactacaatgcaaagactcaagtttcaccttaattaggtctttcccaggccaggtattagtgaccttgggaaaaaagtttaagcttctcagcttcagatcttcctctgaatattagcactgtggtaattggcacagtggtacctaaccctttgagggtccaggattgttttaatggtgagtgatttacaaactgagtttaaaagagcaaggaggatccaatttcgcaaaatttcattaactctgcttaagaaaacagtatattatattagcttagatcaggagttgggaatctatagcctgctaccatttattgtgtagcctgcaaatggtttttacatttttaatacattggaaaaaaaattaaagaagattattatttcgtgatgtgaaaattatacatgttgaaaggaaaactttagagtttaattgagtaaagaatgatctgtgaattaggcagcccccagaaccagagtagggttggtta

SEQ ID NO: 41981 - DNA, 2300 bp, Homo sapien
gagaccctgtctcaaaaaacagaaagagggattttagtataacattcagccagtgccatattgggaacccacaagaatgtacttttaaaaatatgtcaaagaagatggtgagggctgtaatagctgctattcaggcagtaatgcagtgctgaagggacatcaagcaaatagtgtgatgcctgtgggtgcaatgttactccttcccttaggttgccaaaaaaatcaatacttcatagcattcctgaaacgaaaaagcttatgaaccattgtgtttagggcgtaagctatctattttgggctacccatcacagcttctctcctttggcagaatacagtgaactgaaccaccacacctaaggtatttgccttatttcttcctcagctggttcatggttacattgtcaaagctggcaaagcattcaagacctgatttctcagaccgagtgtatgtgtgaatataatatactcatttgcacaaatataaaccctctgtcttaactgtgttctgcaaaaggcgtgataaatactttcaagttatatgtacttatcagtagaactaatggaatacacacagtatattttatggggaatttcagagaaggaaggaaaagtcaaccttttatttggcatcaggatagtagtaaaacattctacttgtgcatcagatagatttttatgacctaacctggacaagtaacttaactcttggtgcctcatgtttgaaagagggataacactctacagggtcattctaagaattacatattgccaaaacacatgaaaagattctcaaccttgttagtaatcaaggaaatgcaaatgaagatcacaatgaagtcttcttttgtactcaattgattggtgaaaaatgcatgcctgataatattgacatacagaccaatgagatctcttataatttgctgggaaaatgtatcaatttgtacaaacattttgaaaaataattgtgcattttcttgtgaagtaaaacatttgaataatctaggacccagcaattcaactcttagacactcaagaggaagttgcacacacatatgtcaggaaaaatgttcatagcagccctgttcataagagcaaaacctggaacaattgagaggaaatgaataaattgccgtgtagccacacaatagaatacaagacagcagtgatgctgaaaaatatagcaagcctcaggagtttatatattatatggataattttatgaagctcaaaaacacccaaaattaaacaacatattctctaagtacatacgtgggatatgtgataaaactaaaaagaaaacagggaaggatcagcaatccagaaccaattcatgactgttgttactatcttatggggcaggctgtggattggaagcgggggcggtgcacataggtacgtgtagcttactggtaatgcttttatgttaggaatgaggtcaaaggagttcactataaatttatattagaaagaagggctatctatggattagtgatgagagtgtcatgcaccagcaaatatgattaatgaacttaggttacctgaggtccaaataaataatgagaaaaaagtaaataaaagtgatgcatgaatactaaaaatttggaattacatatataatatgtaataataaaaaaagaaaaaattgtcactggttatccttcaggtataaaaattacaattaaaattgtaatgttataaccttccattctttcccctatgaattaaaacttttttttttaacgagactaaaaaatcaagttgataaaatctatgccctgtgggaactggttaggtcaggctacccactccagatttccagcaggctggcctcagctctacctacagccagtagcttattaaggctctaggcgccagtgacaccttcagacaggtggttagtgcgccctaaggactctccgcagcgtcgctcaggttcacagaacacgcccaggggcgtgtccagctgtcgtcggggagagcccacctccccggggggtgtggctaagggacgaggcagttctcgtccagagcccaggtaatccgggcgggatcagctagcgtcgcgatgtgatgacgtcaggccccggccaggccgggagtggcgtgctgggcgtgcgcggctgcggtacggcgtgttggtcccagcggttcagctgaggtagggacgtgctgtaggccggaatgttaccggctgttggatctgtggatgaggaagaggatcctgcggaggaggattgtcctgaattggttcccattgagacgacgcaaagcgaggaggaggaaaagtctggcctcggcgc

SEQ ID NO: 41982 - DNA, 2300 bp, Homo sapien
gtcaccagctgctttagcctctaacaagagagtcagcctgtcctttgaatctttgaagccaggcattgacttctctatagctatgaaagtcctaaatggcatcttcttccaaaaggaggccatttcatctccattaaaaatctgttgctggccgggctcggtggctcatgcctgtaatctcagcactttgggaggccgagatgggcagatcacgagttcaggagtttaagaccagcctggccaacatagtgaaaccccatctcgactaaaaataccaaaaattagcctggcttggtggtgggagcctgtaatcccagttacttgggaggctgaggcaggagaatggcttgaacccgggaggcggaggtggcagtgagctgagattgcacattgcactccagcctgggtgacagagcgagactccatctcaaaataaataaataaataaataaaaaataagtctgttgcttagtgtagctactttcatgaatgatgttagctacatcttctaggtagtttactacagcttctatatcagcatttgctgctttcccttgcacttttatgttatggagatggcttctttctttaaatcttgtgaaccaacctctgctaccttccaacttttcttctctagcttcctcacctctctcagccttcatagaactgaagagagttagggttgctctgaattaggctttggcttaagggaacattgtggcttgtttgatcatctatccagaccacttcatatcagcaataaggctgttttattatcatttgtgtgtttactggagtagcacttttaatttccttcaagaacttttcctttgcattcacaacttagctaactggctcaagagacctagcttttggcgtatcttggctttcaacataactttctcactaagcataatcatttctagctcttgatttaaagtgagaaacaggtgactgttcctttcacttgaacacttagaggccattgtaggatattaattggcctagtttcatgttgatcatattctttatgttgtcatggttctgtcataattcttttagttctatgttttaatagttttggtgctcattaccagtactgttgcttctccattcccgagttagtccatctcctgattgaatttcattgtcaggcagtcttttcaagttacaggtactgcatgcattctttgggttcttatacacttcattgattcaaaatatttgtcttttgtttttatattacttgaaggattacttggctcggtataaaatttatcagtcacacttttttccccctcaactttgtaaatgttgttccataatctcctagtgtttgattggctggatttctttgtccaatgttttctccttttattaggaagaatttgtgagtattatagtctctgagtttcaatgcttgctgttttctttaatgcttgagaatgtctgtctattgctttcgttcctgaaaaataacttgtttgggaacactttcattagaactttgtggtcactgttttattattttgggacatctagtgttactgtagaaaagtctgatttttctccctccctccttgaaggcacttttttttttttaatctaaaatgcctgagagttttcttctttatttttgaaattcagtaatataaacaaggtatatctaagtgtcacttataatcatttttccctaaattataatatgcccttagttcttctaagaacattttccttgtttgttaccatgaatacttttttttggtcaaattattagatcctctacttcatgacaccagtttttttaatactgaattttcttttgttcttcgtatgtattctaattgctttgatttgtcttttacctttgcatttactgtgatcatctgaagcctttctttttgtcaataattctgttttctccagtatctgtcctgtttttgatattttaaatgaattaattggttaagtcattgtgttatataggctctaagtttctttagcactacaaactgcattttcatcttattctgcttcttgcttttgagcttgtttattataaggttgtattgttttcaagttcttcattatgatgaagttgttgagaattttctttagtttttattgggttatgtatccttccagaatgggttctttgccacttgtatgccctattcatttcttcattttgtgttctttcttgctttttattccctgtatgtgtgtatttctttttgtcaggctgtaatacatatgcatacaagtttcttcttgatatgggagaacttctatgtggtgct

SEQ ID NO: 41983 - DNA, 2300 bp, Homo sapien
cataaatttggtttgttcatttaaaaatggtctttttttcccatcttagctctggctttactagggagatagattggctgaggttgtcacctaattctgggaggttaagagcctttgtcttttgctacccatttctgaaataaccagaagtctagcccatcctaacttttctctcgatgatccttttcttctttttacttcaaggttccagcccttcatttgactatcagtgctgtttcactagttagccatgatcgctttcatccgccgtgtctggattagaactgtatttttaatttgatgctgtgggcagttttgatagttacagatcctgtgatacatttaaatgtgtttacaaggggaacaaatgaaacaatgctgcatgaaatttgcctttctttttttttttttttccccttggagacagggtctgggtctattgcccaggctagagtgcagtggtgcgatgtcagctccctatagcctctgtgtcctgggcttaagccatcttcccacctcagactcatgagtagctgggactataggcacgcactaccatgcctggctaattttttattttggtagaagatgaggttttgccatgttgccgaagctgatcttaaactcctgggcttaagtgatctgcccacctcagcctcccaaagtaatgggattataggcgtgagccaccacacttggccttttctttttttcatatttatttaattattttattttattgagacagagtctcactctgacacctgggctggaatgcagtggctatcatggctctctgcagtcgtgaactcctggactcaagtgatcctcccatctcagcctcctgagtagctgggactacaggcttgcacccatgcctggctaatttttttatttttacttttttgtagtgacaggctctcgctacgttgctcaggctcgtcttgaactcctggcctcaagtgattctcctacttggcctctcaaagtgctgggattataagcctgagccactgaacccagcaaaatttgcctttcttaaactaatttatctctgttgggtccaagagcttacaagttggttgtcatttaatatgttaaacactagaatattttttagttgaagttttattttttccctttacatattgtatcctttagtgctttatttcactaataagaattatagtatgcaatcatttcccacctctatattcagtatatcaatttttgtttttcctttctacttctgtcttttgctataatttgctgtaatacaggtactttcatcaaggcatccagttctttatatcattctatatttttacttgggagaaatagaaatgttgctaattccatcttactgacaatacctaaattattgtttgttatagaacataatgatttaaatatacaaaacactaaactgtttgagattttttacattttatgcgtgcagaatttacattttatgtgtgcagagacaaaaattgttataagattacaagttaatgtgcaagatgatttccgattcatgagtttcaggttttgatagcatatccttatccactagattagtcttttaaaaatgtgtatgatagggaaaaaatcgagggcatgaaattctgagacttatgggaactaaacttaaatgttcgttgttagatttttttttttttttttttttgctgcgtatgaagttttaggcagtcattgtccaacaacattaaatactgaacatatgggaaaagcatatgatttttcgaaatgtttttctaaagtaatctcattctacatacacttaagagcagttataatgctttagtgacacttgaagtagctatttaatgtgatctcaccactatagggaaggccgttgcatgacttttttgtgtgtgcttaactgctaaacaggagaatcttttcctgagcaaccagctgggaaggatttaatttgacattctccctactaggacccccccaaagagactcattccctccaatagttcctacaagttctttctctttcctaaacttgctgttactaatttacccctcactgttcttcaaggcaaagcatctgcaaggttttcagtcctttccccctcccgtcctgtccccatcagtgttgaaatgtatgctacagttattatggttgtaatttgttatgccatgttgatcttcttgtgcttttcatatcagaacaatgtatttttaacattctgactttctttttctctcaattggtaactgactatatagaaaatttatatttatggatactatttcttttttaataa

SEQ ID NO: 41984 - DNA, 2300 bp, Homo sapien
cagcaaagtttcaaaaaaagatcagcaagaaagctcttttccagattttatcctgaaggcactagctactttaagctattttttattatattttgcccttgcagttggcgtttgatttctcactgaacattcattgtcataattatagacactatgtgactatcaagggcataatattctttcatgctgcatttttattagatggcacctcaaagttttcccaagtaggtgggttttaaattatgaatatataccgtggcatagtatcttacttagtattttaataagattcttatttatataacaaattttttttattcctctgtagtgctactttagtctctgagctaattttcatgaagccaatctaaaaatcgtgttatttctaaggatgtggagcgagtgagatgaacagttgtgctgtcatattgcccctccccagtgcagatagtgaatgaggacccactgatttaaaggcaacactgcagccccttcttgcctcattgaagtcccaagttttattacagtaaaagcacttaatgttgacatttctgaaagaatgaagaggctgggcatggcggctcacgccggtaatcccagcactttgggaggctgaggcaagcggatcatgaggtcaggacatcgagaccatcctggctaacacggtgaaaccccgtctctactaaaaatacaaaaaattagccaggcgtggtggcgagcgcctgtagtcccatctacttgggaggctgaggcaggagaatggcgtgaacccaggaggcggagcttgcagtgagctgagatcgccccactgcactccagcctgggcgacagagcgactccgtctcaaaaaaaaaaaaaaaaaaaaaaaaaaaaaaaagaatgaagagccagagccaggcatagtggcacgcctgtagtcccacctactcaggaggctgaggcgggaggatcacttgagcccaggaattcaaagccagcctgcgcaacatagaccctgtctctaaaaatgaattggttataaaggatgaagaaaggaaggaggaaagggagagagagaagcccttatagagtgggtgcatttcttgtatgtggggccactttgtaagaacaggatttttcaaactgggcccatactggtatgtgtgaaatcaatttagttggttatggccatttttttttaaaaggaaatatcagtgatcactatagtgtaagtatattgtttcgtgaaacccatcttagttatgtattatgtctgtatgtgtgagattgtgatataaaatgtatttctgtggttaaatattcaaagaaattggagaaccattgctacaaggggacagaggactccgtgtgagctctcctgccttccctgagtaaacttacacaatttagtgctgggacatttgagccttttctgaaaatttgagtcagggagagcatcttgaggaggtgggaaggaaggtagaaggagcaaagcaacacccccctgaagcctgggaatattgtcagaaccttaaatataattcagctcaccattctgggtaaggacagactctaccaatgaaaatgggtgattaccagctgtgaaacacaaaaacatacttttacggttacacattcctttacaaacaaccgtgtacatttcagcctcctgccccaccatttcttttctccaggcgggaaggctgcatgttgaggtggtcatagaatgttgagtatcatactttcctacctcgcttttatttgcgcgggtttaaatgcgccttaacagaacccgtgcaaaggcttgccaactgtctggctgcaccggatgagtagagcatcttccttggtggcaggtgggtgcgaggaggagggggctgggcttttctccggacgggtgtttgcccagaagaccatcatccctggactacgttaggaggaagtggcaccgctccgaggtaggggaagaagggttataaaggggggagtccaccacacatggtcttgaagaagcttttataaaaggcaaaggcatctttgccggacgttgttgcaaaggagtagaaacaagcagacgaaaacatcccaaagggtaaccactagcgttcctgcttcttgcaacattcatcccaggcttccagctcagcccgccccaggccaggtgatcggccgccacatcccctgcgactgaagcacctgctcctccatgaacctgccaagagctgagcgccttcgctccacaccgcagcgcagcctccgggactccgatggggaagacggtaaaatcgatgtcctgggagaggaggaagatgaagacgagg

SEQ ID NO: 41985 - DNA, 2300 bp, Homo sapien
aaacacgaacttctgttcgctgcaaaatggttagaaagaaacagctggattacgttcctctaaaaaccacctgaacgtaaccttcgcagggcgtcaagtcatcttttcttgccttcggttgtggcttctatggctgtcccgatttgcgcatttcctggggtactatgaacgtgagtggggtattttgttctggcattaaaagaaaaacaagcaagcaaacaaaaacacagcctccgatgccaaacatgttcccccttcttcacttccttggagctggaagtattattcctaagtctagtgcaaaatgcttctactctctgtgtcttcctgatagggatgtttaatgtaagtaggatattaatttcagaacattgatttcttatctgtgtgtctgacgtgccatctttaatgttaaaattaaggtgttaaaattaagcctagttatatagacgaaataaaatgctaagtcactacactacatcgtttattttctattacatctcattcttccctttctaaatggaactttttaaaacctacgttattttccctcaaacaatttattttcacaattcatatttattatagatagcagaagtaatccattttaatatggcctttaaaaattccaaatatttgaggttgaaaatgtcctggcttttaaaataggaaatttactatttatgagacttctaaaagaaaagaataggagggcatgtaaatatattctccatttatttttcatcacccctcaacaagctggaaaaccatttgagataaatttggaatgtagtggccaacatgtactcagagaaaataaaaggctataaattatatatatatatatatatatatattttaagcactagaattttcaaaacttatttcttaaaaaaaaaaacaactctgaaaagactttgcaactagaaaggtttaagtgttactcggcgtcaggggacggagtggggggaaaccagacaagaacgcccatcatgaattgctccccacaaagaaaacaaatttctaggaacttggccgttttcccctgtcctgagtggggttcccgattccgtgccgctttgagggaagctgctccgtgaatgtgagaaagtttttcccccagcccccatctactccccacccccagctatgaatttcttatttcaggagggaggacaaacatggagacacacatttttacaggagtctaattggccgatttttctccggcttctcttctccatcccgtctcttggaatttcttggcacgccctacctgagatcccctacgggagatttcctcttggctcctgcggttctgaggacgttctgaaaagttcccaagccccacctttggtagctgcccagaccccagcttccaattcttccctcttctttgcacaggtagccgtcagccccatagcaccaccagcgtccaaaatagaccacttttagcaaatccggcagggctggggcagtctaagagtttggaaacaaactgagaatagaggggtcctatttcatgccaggttctcgctggtttacattccaactcccctctgtccgttgtgcgaaaacgtctccaggccgaccttcattcatttattgtcaacaaacgtcctgggagagcggctacagccggccgctgaacccagaagggactttctctaggctttcttggcaccctcccaattatcttccttctcttgcccgagggcagaccaacacagctacgaacatgggtgactgagggtcagaccccttcccggaaccgcctccaagctcctaatttttgcctaatgttaaaccatatccaaagatgaatatttaaacaatcaattcagtggcggagtaaattaaacgttattctccgatcaaacaggagcttcgggtccacctgtttggaagcacccaggcagcttggagaggtccggccttcgggtgcgacccgcaggggttgccctgcccggttcgcggaacggacgtttacctgtcgcagctacgaacccaccaacgacaccaagcacttgccgggcagaccaggcgtcgtggaggcgccccagcccccccaactcccccgcaacgacgcgtcccaggggtgcgtagtgcttggcgcggtgaccagacctggccgccttcctgactgcacagagcaagaggccacactctggatcccaggccgggtccctgtggttctgggagggaggtcccggatgcctcccagatctcgggcttctgtaaccctgaggctgggttttaaaatcacggctcttccaagttacacgaagagtccatggtca

SEQ ID NO: 41986 - DNA, 2300 bp, Homo sapien
gggtgtccactccctgctatattgggaatgagatcttcctctccatccctgagtattaggaacaatatccctagggagtgtacacctcctgcaatagtgagactaagatcatcctctcgccccctggatattaggatcaatatcataggggtggtgtacaccccctgcgaaattggaagaaatatcatcctctccacctttggacgttagggacagtatcacgggggatgtctacgccccctgcgatattgggagtcatatcatccgctcccacccaggacattaggaacaagatgactgaacggaggtacacccgcagcgacattttcaataatgtcatcctctacatcctggcaattaggagaaacatcatagaggggtgtacactttcagcgacatcgggagtaatatcctctcccccacagatatcgggaacagttatattaattattaatattaataaatatattaataattaatagtaatcatcgatattaataattgcaatagagatagtaaaagtgaatatggatgaaaatattaacaattactattaataatagcaatatcactattaataataaaataatgatattattaatcaatgttacataaatcagtcataagtgatgttggtaataaaacaataattaatattaagattaataactaatattattgaaaaatgacattaatacagataattttaatcatgcataattgtacatttaaaataatcattaatgattaataacgttatactattaattaatattaccattgataattattaagactgatgtttaacaattaataatattattaagattgatgcttaataattaatcgtattatttctcctaataccgcagggggtgtacacctacccgtgatattgttcctaatatccagggatggagagcatgatattagttttaatatctcagtaggtgtacactcaccctgtgacactgatcctaatatccagggagtagagtatgacatgactcccaacatagcaatgaatgtacagccacccggtgatattgctcctagtattcacggaagaagcgtaggatattacttccaaaatcgcagggagtgtacacctcttctgtgatattgttcctggtatcccgagggggagaggatgataataattccagtatcgcaggctgtgatcacccaccctgtgatattgttattaacatcctgaaagggagaggatgatattactccccgtaatagatagatattactccccataacagagcaggaggtgtacacccaccctgtgatattgttcctaatattcagaggccgagaggtcgatattactcccaatatggcaggaagtgtacacccccgtgtgagatggtccttaataatattccaaggcggagggggagatattactcccaaaatcgcagaaagtgtacacccccagggatattgttctcatgatcctggagggaagaggatgatatcactttaaatatcacagaaggtgtgcacgcccccactgatatcggttataatttccacgtgggagaggaggatgtgacgcccaatcacacctgcagtagaaacacagctgtgatactgttcttaatattcagggaggaagacgatgatattactcccaaaacagacggctgtacaccctctgcacaccgagggtctacccccatctgtgaaatagtttataatttccagagggggagatgatatcactccgaatatcgtaaacaggctgtgagtccaccgcggatcctaaaaaccagggagggaagaggggctggcacttactccccgcatcgcggggggtgtctcaaccccttgcgatgggggtcctaagagccagggggggaagaggggctggctattacaccccgcatcaaggggggtcccgtcgatgggggtcctaagagctagtgggggaagagggcctggctcttattccccgactcgcgagggatgcctcccccctctgctatgggggtcccaagagccacaggggaagaggggctgcctctcagtccccgcctcgcggggggtgcctcctcctcctgcgatgggggtcctaagagccagggggggaaaggagctggctcgcagtccctgtctcgcggggggtgcctccccccactgcgatgggggtcctaagagccggggggggaagaggggctggctctcagtccccgcctcgcgggaggtgcctccccccactgcgatgggggtcccaagagccagggagggaagaggggctggctctcagtccccgcctcgcgggaggtgcc

SEQ ID NO: 41987 - DNA, 2300 bp, Homo sapien
tattgttattaacatcctgaaagggagaggatgatattactccccgtaatagatagatattactccccataacagagcaggaggtgtacacccaccctgtgatattgttcctaatattcagaggccgagaggtcgatattactcccaatatggcaggaagtgtacacccccgtgtgagatggtccttaataatattccaaggcggagggggagatattactcccaaaatcgcagaaagtgtacacccccagggatattgttctcatgatcctggagggaagaggatgatatcactttaaatatcacagaaggtgtgcacgcccccactgatatcggttataatttccacgtgggagaggaggatgtgacgcccaatcacacctgcagtagaaacacagctgtgatactgttcttaatattcagggaggaagacgatgatattactcccaaaacagacggctgtacaccctctgcacaccgagggtctacccccatctgtgaaatagtttataatttccagagggggagatgatatcactccgaatatcgtaaacaggctgtgagtccaccgcggatcctaaaaaccagggagggaagaggggctggcacttactccccgcatcgcggggggtgtctcaaccccttgcgatgggggtcctaagagccagggggggaagaggggctggctattacaccccgcatcaaggggggtcccgtcgatgggggtcctaagagctagtgggggaagagggcctggctcttattccccgactcgcgagggatgcctcccccctctgctatgggggtcccaagagccacaggggaagaggggctgcctctcagtccccgcctcgcggggggtgcctcctcctcctgcgatgggggtcctaagagccagggggggaaaggagctggctcgcagtccctgtctcgcggggggtgcctccccccactgcgatgggggtcctaagagccggggggggaagaggggctggctctcagtccccgcctcgcgggaggtgcctccccccactgcgatgggggtcccaagagccagggagggaagaggggctggctctcagtccccgcctcgcgggaggtgcctccgccccttccgatgggggtcccaagacccagggaggggagaggggctggctctcagtcccctcctcccgggggtacctcctccgcctgcgatgggggtcccaagagacagggggggaagaggggctggctctcagtccacgcctcgtgggggatgcctcccccccctgcgattggggtcccaacagccagcgggggaagaggggctggttctcagtccccgcctcgcgggggatgcctccccgtgctgcgatgggggtcctaaaagccagggggtgaaaaggggctggctctcagtccccacctcgcgaggggtgcctctcccccctgcgataggtgtcctaatagccagggggggaagaggggctggctgtcagtccccacctcgcgaggggtgcctctcccccctgcgacaggtgtcctaatagccagggggggaagaggggctggctgtcagtccctgcctcgcgggtggtccttcaccccgctgcgatgggggtcctaagagcaagggggggaagtggggctggctctctgtccccgcctcgccgggggtgcctcgcacccttgcgatgggggtcctaagagccagtaggggaagaggagctggctctcagtcacctcagcatggagggcctttctgttctggttttgcccaagagtaagcttatttgcatctggttctagcaagggaattgctgcgaaggccctcaaacaggggggccatcctttcgaatccctatctagttgtttagagatgtaggccaccggcctcagccaaggccccacagtttgggttaaaagtccagctgccatcttttctctctgacgcatacaatggaaaaggctttgtgagatcgggtagcccctcggctggggctttcagaagtttttcctttaagtcatgaaagacttgctgttgttggaatccccattccaaaagttcccggtccccgcccccattgtgacctcatacaaaggcttggctaatactgcaaagtttgggattcccagtctacaaaaccccacagctcctaggaattctctcaccacccttgtgcctttaggcttcggtagattgcaaatgacctgctttctttcggatcccgggctgctttcggacacctgtcgaatagtaaatcccaagtaaggtacctgcggtcgtcggcagatctgaattttcttcttggacacct

SEQ ID NO: 41988 - DNA, 2300 bp, Homo sapien
gctgcgatgggggtcctaagagcaagggggggaagtggggctggctctctgtccccgcctcgccgggggtgcctcgcacccttgcgatgggggtcctaagagccagtaggggaagaggagctggctctcagtcacctcagcatggagggcctttctgttctggttttgcccaagagtaagcttatttgcatctggttctagcaagggaattgctgcgaaggccctcaaacaggggggccatcctttcgaatccctatctagttgtttagagatgtaggccaccggcctcagccaaggccccacagtttgggttaaaagtccagctgccatcttttctctctgacgcatacaatggaaaaggctttgtgagatcgggtagcccctcggctggggctttcagaagtttttcctttaagtcatgaaagacttgctgttgttggaatccccattccaaaagttcccggtccccgcccccattgtgacctcatacaaaggcttggctaatactgcaaagtttgggattcccagtctacaaaaccccacagctcctaggaattctctcaccacccttgtgcctttaggcttcggtagattgcaaatgacctgctttctttcggatcccgggctgctttcggacacctgtcgaatagtaaatcccaagtaaggtacctgcggtcgtcggcagatctgaattttcttcttggacacctaatacccacagccctccaggtcggtcctaaggatcttagaatccgcgatgggggtcctaagccacgggaggaagagggactggctctcagtccccgcctcgcggggtgtgcctcccccgtgtgatggggatcctcagaggtgggcggggaagaagggctggctcttagacaccgcctcgcggggggtgcctcccccgcctgcgatgggggtcctaagagccaggggggaaagagcggctggctctcagtccccgcctcgcggggggtgcctccccacctgctatgggggtcctaagaaaaatggagggaagaggggctggctgtcagtccccgccacgcggggggtgcctctccccctgcgatgggggtcccaagagccagggggggaagagcggctggctctcagtccccgcctcgcggggggtgcctccgccccctgcgatgggggtcccaagagccagggagggaaggggtcccaagagccaggggaggaaaagcagctggctctcagtccccgcctcgcggggggtgcctccaccctgcgatgggggtcccaagagccagggggggaagagcggctggctctaattccgcgcctcgcgaggggtgcatccccccactgcgatgggcgtcctaagagccagggagggaagaagggctgactctgagtccttgcctcgcggggggtgcctcaccccctgcgatggggatcctaagagccacgggggaagaggagctggctctcagtccccgcctcgcgaggggtgcctcctccccctgcgatgggggtcctaagagccaggagcggaagaggggctggctctctgtatccacctcgcggggggtgcctccccgccctgtgatgggtgttctaagagccagaaggcttaggggggctgtctctcagtccccgcctcgcggggagtgcctccccttcctgcgacgggggtcctaagagccagggggggaacaggggctggctcagtccccgccttgcggggggtggctcgctcccctgcgatgggcatcctaagaaccaggggaggaagagggggagaggatgataataatttcagcatcgcaggctgtgttcacccagcctgttaaatcgttatttatatcctgaaagggagaggatgatattactccccgtaatagacagatatgactccccatcgtagagcacgaggtgtacacccgccctgtgattttcttcctcatattcagagaccgagaggttgatgtcactcccaatatcggaggaagtatacacccccgtgtgagatggtccttaataatattccacggcggagggggtgatatgactacatacatggcagaaagtggaaacctcccagggatattgttcccacgatcctggagggaagaagatgatgttactttcaatatgacagaaggtggatgaagtggtggactgcccctccacacctgtgagtatttctagttgggtgggtgggaggagagactgagaaaagaaataagacacagagacaaagtgtaaagatacaacagtgggtccaggggaccggcgctcagcccaccaaggacctgcaccggcaccagcctctg

SEQ ID NO: 41989 - DNA, 2300 bp, Homo sapien
gaggagttcgagaccagcctaggcaacatggtgaaaccccatgtctacaaaaactacaaaaattagctgggcgtggtggcatgtacctgtaggcaggaggatcgcttgagcccaagagggagagggtgcagtgagccatgattgtgccactgcactccacctgggtgacaggaactttatgggaaatgggatcttggagactgagtagagactagaggaaaaaaaaaaactacctccccgactggccacactattcttttaaaaaaatgttaattgacaaattaaaattgtatgtatttacggaggtatgatgtgatgttatgatatatgtatacattgtggaataattaaatccagagaattaatagattcatcacctcaaaacctatcttttttgtggtgagaacatttgaaatttattgtcttagcaattttgaaatacacaatacttcattgttaactacagtcaccatgctgtgctgtagatctcaacaaaatatattcctcctgtctcaactaaaacattgtactctttgacaacatttccccattcctctcaccccctccaaaaacacccattctttatgttgaagagaatggctaaaaagtcccagcaggtttcaacagacggcttcagtggttgtcccatcacacttcaatgttattaataaaaaggggaggggcaatacataattcggacaggctgaaagtaccattgtaaccactttcttgacttcacagaaaaagtcctcttgttttcatctgtaaaatgggaactgcatgaataccattcttcttttcttcagcctccaaagaaaaaacagatgcaaagcctttaatcaattgcaaaacagtatacaatgtgtgttattactcacagttgtcttactgtgaccaaacactttataagcctgcggcaagtcagccttactctcagtaagtggacaatatttggggaaggagaagcagcaggatatttcaggacagtagccttggtgggtccaaaaattccttgagagaaatgggagatagaactttcttcctgctttgggttttatcctgttagtcttttctctcttcactcctattttctatggagaatttcctggttttggagtttgggtgcgttttatggagaggaggcagaaaatctttagctccagcagaatgaaaggatacatgcaaaggaacctagcacagtatctggtacccaggtctcctttaacttggctttattcattcactcctggtagggcattaataagggatttagccccctcctattgaaaacgattaattcaaggaagagttcagacagtgtggacagatacagtgtaggaaagcctatttctaaggcaggagctgggtagggagggtgagaagggcgagaagaatagggaaatatgtgtcgtctgtgttgctgctgttgcaaccaccacaacaaacaaacaagtgaaaaaaaaaaaaaaaaaaaaaaagaattgtccataccggaaagtgtgctgttttggaggaggctggggaaagtgtggatggctcgagtgggtcctgttggattgaagtctgacagtggtgattcccttcaacaaatggtcggggtgggagggtacacacacacacacacacacacacacacaccccacacgcagcgcccagcctccgatttcagcgctggcaggagataaccattcttagctcgcctttccagggttatttttggctgaggctgttcgctgatggcaaaaggtttcagccccctcccaaatccctccccgtccttgttctaaagagaaactggtgtgtgtaggctgcgcactcccagggagacagggagacgggccgggcgccggagaggaacccggactctgcccaaagtctcgccgcccgccggctgttttctggcggagggtgtgccccggagggcggcgatcgcgggtgaaggctggggccaggcgcgggtggaggcgtcaccggggtcgggctagcaggccctggaatcaggcttttgggacaccccgaaagtgagtccaacttggggagaaactgagggcagctcgggcggtctggcagcggagaaggtgggtgggagaaaactttacaggaaggcagaagcaatctctgccgagagagtcagccgagcggccgcgcggagaggaggggcgggcggtccccaggcgggcgggtgcagggcgcagggcgccgacctgctggagagggggcccgggcgcgaggcggagtcccggcgcgcagccaggctggtggaggcccccggcaggctgcagattccctccggctccggg

SEQ ID NO: 41990 - DNA, 2300 bp, Homo sapien
aggctgaggtgggaagatcacctgaatctggggaggtcaaggctacagtgagccaagactgtgccattgcactccagcctgggcaacaaagtgagacccagtctcaaaaaaaatgaaatttaatttaaaaaaagaaaattgctttgtaaaattaactttttcaatcaaaaccaagatttttcagatatagagaatgcagcccactggttagatttgtcagttcaaagagaataaattctagttttctatttttctagcctgcttatgagtatccaataggatatcaaaaaagaccaaagcctttgggatccaagttcagtattcctgagtctaattcaggatgccaaatcaggagacaagcacattctcatcaattttcaatcattcaagaccaattttgcttataattatccagttcttttagaccacctttctcctgaagccagccttatggctattcacttcactttagcataagcccccaagaaggtgaacaaaatgaggaaaagattggttaaagttggctgtttgaaattctgaaacatgtccaccattcccttcacccatgcccacccctcttagaagtagtactttcagattatttaagagtcgatgcttctatgtggattttaatttgtcatctgtcctttataacagctagtaggtttaatttgaccctattttaagcatatattgacctatgctaattatctgttaaaataaattccactcttagagttaataaagtgtgtttgtcatagaagacccattgaagtaagaagctgaggagtccttatggtaaagtgggacaagaaataataagacataataattttcccatgcaaatcaacaaccgtagcttcaaaaatatcctgacccacaacaagtattggacaggccatgtttctctcactccctaaaaaattggctcgggaagaagtatgagagctcccatagctctcccaaggctcgttattctccatcactccacaggaacagcctgtcagagaagagtgaaagaccatttgtcaacctctcttcaactccctgattctagccaaacttcatcaatcccaagtgaggagccagagataaatcaaaccccatatatccagcatcattgtctactggagtcaaaaatcacaattccactacccaccccaacaccactggccctgtttctcccaattgcgttttattatgtttttaaaaaaatcctctttccccatccctgcaacaccgagaaggaggaattatagtagataaatatgaagcatggagatcctttaaaaatgtttttaataataaatgagaaaatgaaaaggagagggttgggaaggaaggagggaattcaaatgccagggaattgttcagtttcgcttttaaagatgttaacactcatttatacatctgcaagacactttccttaaagaaaagttctatgagtgtgggtctggttgcatgaataaggataaaattacttttttagacgatgtttcccacatataattcagagacccctgaaattaggtatccctcttgtagatgtccttgagatgctgctggacctgggaaagaggaaactgggatatgggtctatgccaaaaggtgcttctagttataggacagagaggaaaggggcagagggagaaaaacctgaagtctgagaatctggattgcagaagactaccgaggtcgtgggagaagggagagaaaacaaggatgaaaaccgaaaggggaagaggcatgaaatgttgtcaaatgccaaaaggcatttggagagaagttgggaattgcattaagaaaaccactgcaaatctcatttcagaccatttagagatatgccccctgggaactgcgagctcaggctgtttagcatcaaacaaatggatccactccatccctaccctaattaaataaatcattcagtaattccactgggttaaagaaccaaaataataaaaaccttcagggcctactcttgccaaatatgtcagggatcgtgtgtgtgtgtgtgtgtgtgtgtgtgtgtgtgtgtgtgtgtgtgtgtgtgttctgagacaccactactgttaaataggcagagctaagacttaggggactggcagattattgcaaaaagggcacggggcagagggactatgttgtgagcctgcgaaagaagtttgtgtggggactgtgggcagtgaatgcgttgggaacaatatggaaaactgggagctgccttggaatctacagggccgggtaagagaatgtccgaaagaaaaatgagcaggtgcgggatgtgcgcagagtcggag

SEQ ID NO: 41991 - DNA, 2300 bp, Homo sapien
aagggtctgagaaacggtgtgcctttggaaataacgtaactgccagtaaatcagcctttggccctttgacagttacaaacagcaagagattatccgaagcagcagagcttagcagaatgcctgttccactccaaccagctggagtccttactagaagaaatagctcatgcagctgacagcccacttggtatgtgagtcagcctaggttgtcatggaaccttgtagaatttggagaagatatagattataagtccatgtctttatcatctttccatgcctatctgcacctaatatgtgccctacaatgtaggtgagctagagcaatgcctcaccaaagacagtatatttaaatagaatcttaaatgatagacaggagtgtcagtaaaagcactggtaagattttgcatggagggtcgaaaatgaacacagtacatctcagatatgcaaaagacacagtataacttaatctataattgaggataactgaccttatcctcaccttctggagtggtggtaaggcctactcaaactttctgctcaaagggacattatgagattacaatactggagggccttcaaccctgagaacttcccttccccattgacatatgaacctaccatccacaggtgagagaagagaatgagcaaagactctttgtagtggggatttttctcttttcactttcttatgctgcatgtgctctccctgtcattcatggaattgctgtttccaatccttgaccgtaaattttataagcttcagaaggaagagcagaggcagtatctatttatcttgagtgaatcctctaggggatgactactatattattattatgaaccacaatcggatatttttgtctgatttgtccagtggattttaattgctgggtctctcgaatgtagaatttgctttgtgtcctacccttgttctcgacacatgattcagagtacatatgcagtcgctggaaactgctctgattcacattgccaagatattatttctgccttacatgaaatgttaaaaaaatgaacaaataactactggtattttattttcaaaaagacacacccaagttattttccaaatcagcagttagagttcaataatgtttgggtttgcagaaagatcaactcattctgacactgtgttagtttaaccagagaataatactttgacttatggtcttttattgatttttttttctgatgcaaaaaaaaaatggcaaaagagaaatttaagtacaaaatttattgcggtaaagagattaaaactatttcttatgtaaaccaaaatcaacatttgtttcacttgactaccagtagttggaaaaactatctattacaaatgcaaattctggacaaaagaccaatgatggtccttgttcaagtcagtaaatgtgctcagaccaccagggagaatttcaggataactgtcttagtagagagatagaaagagatgacaagaggaataataaattacattactaataaatgatcacttccctattggacaaccatgagtgaccttcatatctttatgccctcaatgccaaggattcaaataacagattcccaaattcatgcttcatggacaaggatttccttttatgaagcttcttatgcatttttcaggatatacttaatctatgcattcagcaatgatggagaagatgaggccacagaggaggctccatcccatctggaccaccctcttcctctttgaaagatgtacatccttctcaccaactgtctaaagcccttcctgtgcccattcaccaagggctatctccattgggaatcattcttcatcatcaatataatgatcagggggaaactctgctatgaggcaagggaccagtttctaggcagaaaacctggaggacattttacgtattttaaaagaagccgattaaccctaaagcaatctctgccacttctccaagggctttaagatattgcagcaaccctggggctccattttctgttacagcccattttctgaagggagagagaaatccaaactgtctcctagaaggagagaagttagacagggctacctagctcaaaagtgtgaagtcagtcagtcctcccatgttcctctaggaaccgttcttcaccctcctagaagtcattgtgttattggaaaagtttcttaacttctcacaatgtcagttttatgcatatgtaaaatgggaataatcataatgcctgtctcttaaagatggaatgagggctaacacgcatggaaagctcatggcacagagcctgccatataacaggcattccacaactgtgaagcc

SEQ ID NO: 41992 - DNA, 2300 bp, Homo sapien
caaaaagaaatcatcactctagaggcatcttctacaatcacttcatttctcttaatttttaatcaaacccagaaactctgctggttagtataacattggaaataagttttggttttcataattattatcttattaattagcataaaggatgccaaaagtggatgctcatgggtaagattacttatattcaagatacatggagtagctaaaatattttagatactttctactcttgcacgaagagggcaaaataattatagtcttgtagcctgtatcttgagaatgatgcctagggtgttatccctaaatggtcctgtggctagccaagaattaggaggtttcttgttgcctgatactgactataagattaactgaatcttttttttcttgtggtaaaatatatatgacataaaatttactgtttttaagtgtatagctcagtggcactaaatacactcatattgctctacaaccatcaccttaaaactctctactcattaaacaataggtccccagtctctccttccaccagcccctgggaccactgttctactttctgtgtctgtgaatttgactacgctaagtactcatgtaagtggaattatacaatatttgccctttgtaactgacttgtttcacttagcataatgttttcaacttcatccaagtggtggcatgtgccaggatttccttcctttttaaggctaatattccattgcatgtatataccacattttgtttatctactcacctgttgatggacatttgggctattatgaataaatgttgctacaagcattggtgtacaaacatccatttgaatccctgctttcagttcctttgtgtataaactcagaatgtagaattgccagatcaaacagtaattcaatatttaatgtatagaggagtctccacactgttttccacagtggttgcaccattttaacattcccaccagcaatgcacagcgttccaatttattgacatcctcaccaacactagctgtttggttttgttttttgatgataactatcctaatgtatgagatggcgagaaagaatgaatcttgcctctagaatattatcaccttcccctgaaggaatgttttatgcaaggtgagatcacaacacctaaaaggacagtaaactgggacttttctgagctcacagagattccaggactcattttatgcctgcttcttcatttgttgtgtggcagaatttggtctgggacttgctttccttagaacctcatagccaggttatgggaagtaactaaccatcacctgccactaattaatgacagctgccatgatataacaaaagagcctgggtttctaaattggcttaggtgggttttcactgggggtggtggtagggtttctctgagatgagttgcccctgcgtcatggttttccccaaagatggcgccactcttcctaataacaaccccagagtaattccctgacaataaagctttggttctagacagacagcccatgggacatgtaagtcgctccatagtaggatcagaaattactcagatcttacacaactcagcccatctcagcccttcttggtccctctgcctgtcagcacgtacctgtctactgtggccacgggcagggccccatgagcaaggtgttgtcggagcatgtgcctcaacactcctttgctttcagtcacctggcgatagttgctccagaaaattccactcagaaggatcacaaaccccagaggcagaagcaaataggccgcaatcaggctcccctgacagtcgaatatggagccccaggaaatgaagaaggcccccaggcagaccatcaggaaacccatcaggagggcaagagcacagagaatgaggccagttctgttctgcatccttgcaccttaggaacccagcaccctgaccctgctgctcctctgcttccctgcttgctccaagagaatgagctcattagccagcttgcagctttatatgctctgggacccactggcctttggacaactaaatgaaacaggcacttagaagctattcattaaccattgaaagtaagtgtaatatccttggagaattagccaaaaaacatagcattgtatactgcaggcaggagtggcttcgtgtagctgttttgttcttcagagttgggtgggacactcagctgttcccagttatttgaacgtacagccctcctttgattaaaaggcgctggtctcttaatccccatggagggcaattccccactaaaagctggagaagttagcactctttaaagaacgatcttctttgaggtttggtaa

SEQ ID NO: 41993 - DNA, 2300 bp, Homo sapien
ttcacagggcactctctgtgccaggtactatgataaatacttaacattgattgtctcttctgattttcaaagttctaagagaatttttttagttatctactgctatctaaaaaatggccacaaaacttagcatatttttaaaatatactttttttaaacttttgacctcttttatttgttaaaatagtgacatccataaacatgaaatgatttgatcataatgcattcattgattatggctcttgccatcttgtggcatccaggaccctggctgaaacgttttatctcacagtttctgtgggtcaggaatccgagtatgacttacctgggtcctctacttcagggtcactgagtcaaggtgatgcttgggagcagagtcatctcaaggctcagtgggatgaggatttgattgcaagctcacgtggtcattgacaggatgcagttcctcatgggctgacggactaagggcctcagttcttcagtgactgttggccagaacctgccctcaattccttgcctcatgggcctctccaatatggcagcttccttcttcaaagggcgtaagccaagaggacaatagagagagtctgctagaaagatgaaaaccacaatcttgtgtagcctccacggaagtaacttccgatcaccgttaccatattctattgattagaatgaagtcactaggtccagcctacactcaggggagaggattacttacacaaggacatgaatatcaggaggtgggatccttagggatcatcttagaaatattccatctcacagtttggggaaggagggaataagagctgttttaagattacaaagacaatatcaagactagaagatcaaggtagttcaaggtcgaaattgaagctaagaaaggtaaaggctaagggttggaatggagaagtgccttatatagtttttgatccatagtgtgtacctctctaatatccgtgtctcccagccctaacatgaaggtagagctaaggagatggtgagtgtgagactaaaggttatatgagggattattagggcacgccacaaaaaactgctgctctcattgggaaagtaaatggaaaataatggtaatggagtagtggagtggaacagcagcaaagaggaactgaagataagctatcctgagtaaaagcaacccagggttcctatgggaaggagacttttggcagagacatgccacattatcaaataaaaaagggcagagccagggcataaagcacgtctgaaataagctatccacaatcaaagacagtcaagctaaagaaaacaaattccagccaggaaacagaaggctggttctggaaagattttttgaggcaatgctacatagagcagaggtgtggaggagaggacagggaacatttttagcagcatcctctaaaacgaattctatttcatatgtactttatgaaagggggaaagattgcaggaattacaggcccaaaatccccccaaattcccgaggctctgtctattatagtccttttctccagcactctcctttccctcccactcaggctctttcgatcttgtcaacagagcaggaaccacgaagttcacactctgaacttctgtcttggaattatgccagtatcatagtgtgggggcaataagtggggattcattgagggaggcaagacaaacatgttaacagccttgaagaaatgcctttttagtacagaaaaagggagaaggaatcaggaagggatttcttaccaaacctcaaagaagatcgttctttaaagagtgctaacttctccagcttttagtggggaattgccctccatggggattaagagaccagcgccttttaatcaaaggagggctgtacgttcaaataactgggaacagctgagtgtcccacccaactctgaagaacaaaacagctacacgaagccactcctgcctgcagtatacaatgctatgttttttggctaattctccaaggatattacacttactttcaatggttaatgaatagcttctaagtgcctgtttcatttagttgtccaaaggccagtgggtcccagagcatataaagctgcaagctggctaatgagctcattctcttggagcaagcagggaagcagaggagcagcagggtcagggtgctgggttcctaaggtgcaaggatgcagaacagaactggcctcattctctgtgctcttgccctcctgatgggtttcctgatggtctgcctgggggccttcttcatttcctggggctccatattcgactgtcaggggagcctgattgcggcctatttgcttctgcctctg

SEQ ID NO: 41994 - DNA, 2300 bp, Homo sapien
tcatagctgaagtctgagaagcaggaaaaggagagactgggattaccattcccagattccaaactagcctgctagttacagcggtatgatgctgccccctatacagtgattcgtaccagtcagatgaacggttctttgatcggttcttctgtcctccaccactggtctatccaccccatcttgaactttgttaatacaatatttctgctagttattgttcagggattgagagtcagggaaactgtgttctggtccttgggttacttaatgtcttgagaccttagtttcctcatctgtaaagcgggagggctggactagatgtatgttcctcctgctctgagctgtgaagcgtctaggatgccaggagaaaaccagacccaagtcacagggttctaaacaaaccataccttaaatctctcagtaatggccagccacatctgcaagaagcaggctgggaaaacagctgaagaataacagatatttgttttatttgtcaattatggctcagtaaagctaaaaaaaaatagatacttctgttatcaagaaattattgcacttgattcaaggctgatattaaaccatagcagactcactcaaggtggggggtgagagaaacaaagagattacaaaactgaaaagaggtgttcatttgcagagaactaagggagtatccttcaaacagaaactggaagccagagatctctgaagataaggatcatgaaatgttgttattccccagacagaatgtatcccacgttttccaccggcgttgtttttggtaaagaagggtaagtggaaggaagtgatgaggctgaaaaataccatttgcttcaattcagccgcgaaggatccgctaccttttggttcctattaagtgaatttagctttagctttcatgatagcattttcccaaaggagtcctttagatctgacccctaccctcttcgcagctagactgacatcaggtgacgttgcaagtgcccccagcccactaagcgctatcagtaggaattggccctcagccccgtcacagcgctttcccatgacatcccccagcttctctctcctaggacctcctcgccagcctacccctacctgttgggtaggtcttacttgctgggaacacctgctgtccttagaatgggagcaaccaacgccttggaatcctggcctgtcccttcctcgtgaagggggcgcctgcgctcaagtgccggcttcgccgcctcaggcagagtctagcaggcgggcgaccaggcgtagctgagttctgtggcctggggaaaggggacgccctatccccacagccctgtttcgcagggcttcaagacgctgagaacggccgggaacccctggagtcttggaggcacccgccaattccaggggcccaccccaaccccgctctcagtctgggccagcggcggcgggacaggcgcccggtccccacacaccggctgagacgcccagcccactgcggctgaagctccggccgctgttgcggcaggtgctgcaaaccggtctgccttcgctgcagggcttgcggggatggggcaagtgggtggagagaaaaggggaagagcctgggcggccggcaggcggggcctgcagcctccccagccgcggcagccgccgcgcagccggctctctctgcgcctcgctccgactccggcgcgcaccaagcgggaacccgcgcccgagcccggcgggcgccgctgctgctcctctcggtccccggttcccggtccccgaacgcgccgcggcgaggctgcgcccggcagtggagccgctcggagctgctgggctttggcggccgctcgctgctccgtctggccggaggaccggcggggaaggaaggggaaagcggggacacacacactcgccgcggcgcgcgcgcactgcacactcgtagccgcgcgcccccgccaaggcgcgtccggagcgagtttggccccgcggctccagccccggcacctgcccgccctcagcgttgcccccggccccggccccgcccgccgccccctccgccctcccgcccctcccgcccctcccgcccctcgcctgcactgctctcccttcgctgtggggaagcgacaacgtcccgataacttgcagactgtggcgcaactggtcttggtagcggaggcacccgaatgctgcccgggtgaggtaagtttcctgtgcgtccccggccccttcccactagacccttctgaggggcttgcgcttaggggctctgcatctctgctgaaacccgtcggtctctctacccttccactttgcctgtctgcgttgtgctgggggtg

SEQ ID NO: 41995 - DNA, 2300 bp, Homo sapien
tgaagaaatggaagatcttgggacggatcttttggtaagatttagatgttgcgtagctcctaacaaggctgtataaatagaagtacttaaagcctttaggacatggacactctcagaaagtgtttttagtttatctgatttctatacatgtttttgggctgactaaatgttaagtagttctaatacagtatgatacaatgggtctctacagtctcttgggttcagtggaagttaagtggctgttacatgtgtagttcacaacagtagaagacagaaataacctgtgtcttctccataatcacagagatacctcgcataaggactaaggtgccttttaatacatttttatcctgaagctctctgatagtggtcttctatgcaatgcgggagttcaaacttcataactagcactctggttcagtagctctgatgaaatcactggggctcctttagcaactgaattgtttgcatgtcataaaattatgatatgcttcaaaggcaaatatttatttagtgagaaatataggtgtgcacagtaaggcttgtgccttcctcatggcgtatttccttatgaagttcattagtctctgactctaggcaacgtgatataatgggagtggcacagaccataaatgtcacaagatctgagctcaagccatggtgtagctagttatccccgagttggaagacttcaggctcagaagccacttggtgtgtcagaggtcttttacctacaaacctgagagggactgggggaagttttagatcaggtcatttctaagaagtcttttagctttaaaatctcaaattagtatttctaaatgccattttacccacttttatataattacttgcccatttaaccacacttagaaaattaagaaaaaatatatctactctttcattctcgaacacagataaaatcattgttcatgttctggagtattagcttccttttttctgagcagatatatctaagaatgcctaaaacagtgtgtgtacatacatttcaaaaattggaatcacatattttttcataaattgatttttgtttcatttaacattatcccatgtcatctgagtagaacttagagtttttatccaaaactagatttccttggtcacttttgcagtttctttggaattttccatatcgaaggcaatgttatgcactctccaaactaagcacccttggcttctgaatgtgctgtaagtacagtcagttgattccattccagagaacaagcagtagaaatatcccagagcactctgccttcttgctgtcactgcgtgggtagagactgccatggccaggggtcaaggtggaggatgaggggtgacccctaaaaaatgatattagcatgtgaccaaacagtgtctcaaatcgtctcgaaagcccaccaatccattgtggaatgacctctacaaatagttttgcttctgcacaaccaggtgagatggagctgactctaagcaaagagatagagaagggaaacttggtaaccaagccttttctttctgttctctgcctcccttctccacgcctcacctcttcctctctttggcatttctcttcaccctctctagccccccagttatcactttctcctccatgggcccgttacattttgttcatgctgctgatagagtccttatcacgtattactaattggaagatttgggtggtagttgttgggggtggggagaaccagggtaggttatcatggccctactcataagaagtttatgtctcctcacttctatatgagtttcagaactggaagataatcttagctgaggttagaagaacatgtgaagctgaaatattactgaatatttaaaaattattttccactattacttgtttccttgcatgtggtttcaatgacattatgggttacattggttttggtggccttgcttagaatttcaacatcagagagcctatattaagaagtcctacatttagtgggaagttttactacatcactagatgtactataaggtcatctagtttctgattctaaagttctgtgatttgtagcactgtttccatgggaaagtgcattccaagttctaaacagctgagttttggatctcagctcctttgagagttgtggaccagtcagacacaaaattatctttaaatatacagataggggtatgtaatttgtgttgtatgtagaactaaccaccatttgagcccttattatgtgtcaagggctataataagagccttcatacattcacttattcccctcttcaccatgattgtttgaggtaggcattattatttccat

SEQ ID NO: 41996 - DNA, 2300 bp, Homo sapien
tcagtcatttgtgtctcctgttcatcctctgcacagcatgctattaggttctgttgttgccttgtctcccaaatccatctccttctgcctttcccaactttggttttagacctttgtttcgtctcagaattagccatccttctctaattcatgcgaaattctctctttaatccatgtgaaattcagaaaaaacaatacaggtttttgaaatgagtccttgattcaaattggttcagatctttgttcttccgtgtactggctgtagtgccttttgcaatttttgaacctcaatcgttccttcgtaaaatgagtataacaatatctatgcagtgaggattaagtgggattatggagtgtttaaagtgcctagcagggagtaggcacttagaaaatgttggttctttccaccttgtgttcttctgcttcagatctcttaatttctacaactctaaatgtgctattttcctctctcagtaaataatactaccatctcaccagtttaaataaaaaaagctatgagtccccttcgaataatctatttctttcacaatctaaatttaatccatctgcaaatcctatttgttctaactcaacacatatcctcagtctctctgcttctccccattgacactgctacaaccctagtccaagaatcttatctgtactgttgccataggtcctgaattcatccttctgcctccactctggtcttctttcagcctgttttccacagagcctaagtgatatttaaaacataaaccagataatatcagtcccctgcttaaaaccctccagtggcgtttcatcatattcagaatgagatccaactcttaccctctcctaacactcccgctcttatgcttcagcggcactgcccttttttctttttctgctaactcatcaaactcatggctgcctccggccttagcacttgctattctctctgcttggaatactcattccccagatgtccacgtgacttactgcttcttgtcatttagatctcaactctaattgtcccctgacttctatcagtagtgctccatcacaccatcttacttttcctaaggcttaccactatctgaaaatagcctgcgtttctctattttcccctcagtaagaattaaaagttcatactagggcccatttcctagcagtgtttggcacatagtaagtatgctgaaaaaaaaaaaccttgactgactgaataaatgaacaaataaactcacttttaatgagatatcaaggttttatattaattacatgagccaagaattgtggtttcatttttaaaatgtgaggacctactggtttaatccttcatacttcacacatatgcttgtgctggaactatgactgtaaatcaatagcaataccatcctctgttttggcttcttcccctaacctaaatagttctcagatttacttttctctccatctccactgccacactgtcaccttagtgcaaatgaccatcctctctggccttttttctgtaaggttttaatctcccaatatgtattctccagactgcaggccagtgagcttttcagttgctgttacacccatgcttgaaaaccctttaagttttcattgttctcaagataaagaccagaatgtggtctggtccaccacctcacgtcaggccagccctcactctccactccaggccacactttctcctcccctcctggttcccgcctgccaactggctgggtagccgttgcttcccgcttcctgcaaagttctacatcgcacccatttcgcccacttcttcagatttcaggagattgttccttcctcgaggaagccctccctgattaggccaagcgccactccacgtcatacagccccacatcaccatgggcctctctttcagggctttgttttatgagtatgcaatccagaatatgacaatcttattgacatgcgtcaacgcgagcttgcgctcaatagctatttgccgaaggaatatacggactagcggcccgaccactcctcgcccctcccctaccactgccgcgcacatattacgcattaagcaggcgccgcgagtacggacatcgcgagcgcctgcgcgaagggctacgcatgcgcagaggggccagcccgctgacagattctcggtggcggcggcagcggcggcggccctggactgcggggaatgggaatcctaggtccctgactgagcacctcccccgcctccctgcccccgacatggctcaggagaagatggagctagacctggagctgcctccgggtacgggcgggagcccggcggagggcggtggcagcggcgg

SEQ ID NO: 41997 - DNA, 2300 bp, Homo sapien
ggcgcggtggctcacgcctgtaatcccagcactttgggaggccaaggtgggtggatcacaaggtcaggagttcgagaccagcctggggtgaaaccacatctctactaaaaatacaaaaaattagctgggtgtggtggtacacacctgtaatcccagctactcgggaggctgaggcaggagaatcgcttcaacctgggaggcagaggttccagtgagccgagaccatgccactgtaccccagcctggacaacagagcgagactccgtctcgaaaaaaaaaaaaaaaagaagccaataattatatgattatgaaatatataaatgcaaaaaaatacgccaccaaaataacatccaagacaacaacaacagcaaaccaaaataaaaaccttcaccatcaaagtaatttctctttctttttttgagacaaagtcttgctctatcacccaggctggagtgcagtagcccaatctcagctcactgcaacctctgcctcccgggttcaagcgatgtttgtgcctcagcctcccaggtagctgggattacaggcaagcaccaccacacctggctaattttttatatttttagtagagatgggatttccccaggttggccaggctagtctccaactcccaacctcaggtgatctgctcgccttggcctcccaaagtgctgggattacagccgtgagccaccatgctaggcccatcaaagtaatttctattaagcttcacaatactggatggcttctgctctctaggacaatgtgttttactgttcatatgtggcagagtctaacattataattagttcccttcctagagctcatatccatggaattaagagagaatatatttaggtagatcccagaggtgaggcttaggtagatttaaaaaatggcagtatgggccatccatgaaacattcccaggtagacagcacacattgaaaacagggttgactgtgttctctagctagagaaaagcaccatgaaggcaacaggaattgggaccttttgaatcatagggcaggggtccccaacccccaggccatagactgttactggtctgtggcccgctaggaaccaggccgcacagcaggaggtgagtggtgggtgagtgagcattactgcctaagctctgccttaggcagtaatcagtggtggcattagattctcaaaggagcatgaactccattgtgaactgctcatgagagggatctaggttttgtgtttctcatgagaatctaatgcctgatgatctgaggcagaacagtttcattctgaaaccatccctactctgccgtccaatccatggaaaaattgtcttccacaaaactggtccctggtgccaaaagggttggggaccactgtcatagggcaccgatggcccctgtggctcagaggagcagtacaatatgtgaaagaaggagctacagcaagaggcagggtagtggggttgtggtagcaacatggcactaagtagctgtgagtactgtatttgggtaagacattgaattttcctgtactccacagttcccttctctgtaaaaatcaggagtttggatttgatcaggtcttgctagcttccaaaagttttgattcttagccttagttggtcttctctaactaaagtttgagatcagagtggcatactggaaataaaatatgctgaattggaaatgccttttgctgtgtaagctaatggaaccaataaaggtttaagacacagtgaacaggaaacaattcctggcctaagcactattatttctctgtactacacctcaatggcataattcccatggatagtggtttgctgccagatactctgcaatctctatacttgctgctgtcagattcaaacaaacaaaaattactcagaaaaacaaagctttattcagagccatgttgttatgggttgaattgcatctccctaaaattcatatgtttaagtcctagcccccagtacctcagaatgtgaccctatttgggaatgagtttgttgcagacataattagttaagatgaggtcatagtggaatagggtgtgtcctacttcggtatgactggtgttcttataaaaaggggaagtttggacatagagacacaaatacacaaggaaagctccatggaagataaaggcagagatttacaagccaaggaatgtcaaagacggccagcacaccaccagaagctagcagagaggtatggaacagattcttcttcacaacctcagagggaaaaccctgctgatacctggatttcaaactcctggcctccagaacggtgagacaaatttctgttgttt

SEQ ID NO: 41998 - DNA, 2300 bp, Homo sapien
gaatttccatctgccagggatttgccttgacccaaagcacaaggggcaattgacccccctgctatgttcttgagggaatgtgggtttcccttttgtggaagttcagatgatcaacagtagatttttctcctttcctcttcttcctctctaacctgaccgtctctgaatatacagtcagtacccaagtactggccccagattaaaccgtaaactcggaaccaggccttgcacacaatagacacctgcttgaccaacatctgctgaactgagcggcaagaattcacagtcacaatagaaaccttctacttggagtcaagtaatcagggattcctctccaatttgcttggtttcagcctgcagggctaggtgaaagtgtgttgtttacttgcactagctacaggcggtgtagccagggtgggtaggcagaattagctgtcaaacttaaagggcaagatggagagaaaataggaggataaatgggtattcctgtagctcagtgtttatgatgtaggacagaatctttgtacagaattgactggggagagcagctcagaacccaccctgtgatggctgagtgctggcagtcttctggagggtgtgtggggcggctgacatggtggcctgggggagtgatggaaggcccatcatctatgtactttgacttctcataaactcctgtggcatgtttttaataattgatagaataagtaaacagaaagtcaataagaatatagaagacctgaacactactactagccaacttgacctaagtgacatttgtagaacactgtatcctcaaacagcagaatacaccagaatatacattcttctcaagtgcatatgggccatctaccaagatagatcatattctgggccataaaatgagccccaagaagtgtaaaacattttaggtcacacagagtatgttttctaacaatggaattaaatcagaaatcaataggaaaattcttgaaaaatccccaagtatttggaaacgaaataatatacttttaaatagcttatctgtcaaagaagatgaaaagggagcttagaaaatattttgagctggatgaaaaggaaaatacaacataccaaaatttgtgggatgctgcaaaaaataatacttaggaggaaatttatagcactaagtgattgtaatagaagaaagatttcaaatcagtgaccttagttcccaccttaggaaataagagcaattaaacccaaagcaaacagaagaaaggaaatcatatgtatgtgttaaaataaaacattacatgcagtaaaactgaattttggggggaagtatacagttctttgaggtgtttgtttgtttgtttgtttgtttttgagatggagtttcactcttattgcccaggctggtgtgcagtggcacgatctctgctcactgcaacctctgcctcccaggttcaagcaattctcctgcctcagcctcccgagtagctgggattacaggcatgcgccaccacgcctggctaatttttttgtatttttagtagagacggggtttcactatggtggtcaggctggtttcgaactcctgaccttgtgatccgcccgcctcggcctcccaaagtgttgggattacaggctttagccactgcgcccggccagttctatgagttttaaaacaaatgtagaccaccacccaatacattgtaaccaccagcacaatcaggatacaaacatgtcccaccacttcccacattccctcaggctgtcccttcatagtccaaccgtcccctaaccccaagccctggcaatcactgatctgttctctcacactatagttttgccttttctggaatgtcatagaaatggattcatacagtaagtctcctttagagttggcttctctcacttgcataatgccttttggatttatccatattgttgagtgcagcggcgtgatcttggctcactgaagccttgacctcccaggctcaagaaatcctcccatctcagcctcccatgtagctgggaatataagcggaggccgggcgggggtcgcagcgccgcagccagcgcagccagccccagggggcgccatctccgccgctgccgccgccgccgccgccgccgcgagacccccgcccctgccgccgccaccgccatgggcaacgcccccgccaagaaggacaccgagcaggaggagagcgtgaacgagttcctagccaaagccagaggagatttcctctacagatggggaaaccccgctcaaaacaccgccagctcggatcagttcgaacggctcaggacgctgggcatgggctccttcgggc

SEQ ID NO: 41999 - DNA, 2300 bp, Homo sapien
gtggagaaagacaagttcttgcgaagccttcgtcttctctgatatgctattctatgtctatttctttggccaaaaagatggggcaatgatatcaactttgcagggagctggagcatttgctagtgacctttctatgccagaacttgctaagcatgctagctaataatgatgtagcacagggtgcggtggctcacgcctgtaatctcagcactttgggcggccgaggcgggcggatcacctgaggtcaggagttcgagaccagcctggccaacatgatgaaaccccatctctactaaaaatacaaaaattagccaggcgtggtggtgggcacctgcaatcccagctactctggaggctgagacagaatctcttgaacccaggaggtggagattgcagtgagcagagatggcaccactgcattccagcctgggcaacaaagcaagactctgtctcaaataataataataataataactaatgatgcagctttctctctctgagtatataatgcagttctgatgatgtgaggaagggcctcactgttggtgtggcagagtctgagaccatggctggcaatgaaaacactaccctttgatgcctatgggctctccctttatggtttcaaggagggcttctcaatcttggcagaattttggactggatagttctttgttgcacaggtggggggctgtcctgcacatcacaggatgtttcatccctggcctctacctactagatgccagtagaacatacccaccccacagctgcctgttgtgacaatcaaaagcatctccagatactttgcagggggaaaatgatttctccaggcctggcatatacataacagtatttaagcagctgcctagaattaattaaacacagaaggatgtctctcatccagaatgccctggaccacctctttgataggcaatcagatcccacctcctccaccctatttttgaaggccctgtgccaacaccacttcttccatgaatacttccttgattcccccatccctagctctatataaatctcccactcaacactcacacctgttagtttacattcctcttgacacttgtcatttagcatcctaagtatgtaaacatgtctctcttcacgattcacaaagtggctttggaagaactttagtaccttcccatcttctctgccatggaaagtgtacacaactgacattttctttttttttaagacagtatcttgctatgatggccgggctggaatgctgtggctattcacaggcacaatcatagctcactgcagccttgagctcccaggctcaagtgatcctcccgcctcagcctcctgagtagctgagatcacaggcatgcactaccacactcggctcacatttgacatcctctaaagcatatataaaatgtgaagaaaactttcacaatttgcatccctttgtaatatgtaacagaaataaaattctcttttaaaatctatcaacaataggcaaggcacggtggctcacgcctgtcgtctcagcactttgtgaggcccaggcgggcagatcgtttgagcctagaagttcaagaccaccctgggcaacatagcgaaaccccctttctacaaaaaatacaaaaactagctgggtgtggtggtgcacacctgtagtcccagctacttggaaggctgaaatgggaagactgcttgagcccgggagggagaagttgcagtaagccaggaccacaccactgcactccagcctgggcaacagagtgagactctgtctcaaacaaacaaataaatgaggcgggtggatcacgaggtcagtagatcgagaccatcctggctaacacggtgaaacccgtctctactaaaaaaaaaaaaaaatacaaaaaattagccaggcatggtggcgggcgcctgtagtcccagttactcgggaggctgaggcaggagaatggcgtgaaaccgggaggcagagcttgcagtgagccgagatcgcaccactgccctccagcctgggcgacagagcgagactccgtctcaatcaatcaatcaatcaataaaatctattaacaatatttattgtgcacttaacaggaacatgccctgtccaaaaaaaactttacagggcttaactcattttatccttaccacaatcctatgaagtaggaacttttataaaacgcattttataaacaaggcacagagaggttaattaacttgccctctggtcacacagctaggaagtgggcagagtacagatttacacaaggcatccgtctcctggccccacatacccaactgctgtaaacccataccgg

SEQ ID NO: 42000 - DNA, 2300 bp, Homo sapien
atgctttttttccacctaatcccctagagtggtgtcttaactgtcaaactgggtggagatctaggaacctatgtgatcaacaagcagacgccaaacaagcaaatctggctatcttctccatccaggtatgtaggtatgttcagaagtcaacatatgtaattcttaaagacttccgaaatgtgacattgtggaccatttaagaaatgtcggctgagcacagtggctgacacctgtaatcccaacactttgagaggctgaggtaggaggatcacttgaggacaggagttcagaaccatcctgggcaacatagtgagtccctgtctctgtaaagaaaataaaaataaagtcacagctgggtgcaggcttacacctgtaatcccagcactttgggaggccaaggcctgtggatcacttgagctcaggagtttgagaccagcctgggcaatgtcacaaagccccacctctactaaaaatataaaaattagccaggtgtggtggcacacgcctatagtcccaactacttggaaggctgaggttgagcctcagcctgagcccaggaggtggaggttgcagtgagccaagatcgcgccactgcactccagcctgggcaacagggccagaccctgtcccaaaaaaaaaaaaaaagtcatcgtcttatgttagcatccttgtaagtgagcctttcctgatattttgcagcctgtctcattctcagtagaaaagtttactctagttacataacttctccctgctgacaatttggatactgtaagcaggcatcaggatattaagatctgaagtgagtagcttataacttttccaaatccagcctagacagttttcctctattaaattattgccctgactttaaaagaagctacttttgaccttgtagcgtttgaacaagttgcactttgtcttcaaagcaagttaaagtttgacctctacttgttttgagcctctcaggtaaagggttatttgaattccctttgcaggttggggttgtgtaccctgtggaggtggtagagtgttatatattgctgctccagggcatttaatccctcctgccttttccattgatgtgctttcaatctagaggaataaaagattgtgttggagacacaatgtggcctgcatagcatctgaaagcctgagaacatgcagggagagacatccctcatccctcagcagcctggctgctgttgaagtggttgtaagaaagtaaaagagaaatgcccacaaaacgttctcagatccagtcattcattagcacttccaaagagagcatgttgactgtgaattgggaaagggccagataaaactagcatagaattctttgaaagactaacggtatttgcattttttaaaaattataaccttactctaccccctaacattgacatcatttttaggtaattaatattttcccatttattattctgtgatctctaatgctttgttcagaataaatagtgtgtttcctttccccacactttcatccaagaagtgtgctagagttcaacaaaaacagcactagaaatcactgtcattctaggaaggccctaattcacagattgtattggtttttagacccagttagtgtgctggaggttggaggattttaacctctgtgggccaactagcctctgtggcctcagtcattcttcctgaccctggctgtgcttgagcctgtgtgttcttatccttcatctccgggggaacgaagtggatcagctcggtccagcgatcacttttggggatcagtggctttgtagatatcgggcaggcacttaccccaaaagaactttccccatatctgaagactgaaaacgtccatatcgtatttggacacactgcccagcaatacgctctagctgtgttcagaagcatgggaatttggaaagatctgctgagcatgccgtttactgtcacagatactatcttcctcaaaaaaaaaaaatatatatatatatatgggggacggggcaggttgagactgggtgagactgaagaggtgccttggccagagcaggccacacccagagaccacaggctccccggtccacctcaggcccctccccttcctgcgccgtttccggcagatccagagtggccaccgccggatgggagtcgggggaagggaggcagagaagcgggccctgaggacaagctctcagtgcttctgtgggaagtggcggcaagacggcagctcccagcgggggatggaggccgagtcagtctgctggtcactggaggccaggatgctgcctaacacagccgtcccgctccgggcctcacca

SEQ ID NO: 42001 - DNA, 2300 bp, Homo sapien
cgtgatccgcccgcctcggcctcccaaagtactgggattacaggtgttagccaccaagcccggcccgttttaaccatttttaagtgtacagtgtaaggcactgaaaccgcctttgcaaaagtataactgaggaaattatgacagtgaaagaaatcagacctaactgactctatcttgcttctaacccttaagctgtccttgttcgttcctgggtgtaggcggaactaactttgggaaggaattccgttcatgatttgactctgaaacaaagttgctaacagccctttcctgaaaaagactcccttcttgcctggggtccagtctgcctttgcaggactaacaaattagctacaagattagaaattacagtttaggggtcttgctgcttccggatccaagagtctgaacctctccaaatttgctcctgtggataacatcactattgtaaaacctaagagcagtgcttgagatattttgcagaccctgcactcgatggatcagctgacaccacctggaccagtaacctggcccaaccagttctgccatcgcagataggaacagaagacatatgaaaacctaacttcgacccccgcctgattccatctccaacctgaccaatcagcactccccacttctcaagcccctacccgccaaattatctttaaaaactcagggcgggttgcggtggctcatgcctgtaatcccagcactttgggatgcgaggcgggtggatcacctgaggtcaggagtttgagaccagcctggccaacgtggtgaaatccttctccactaaaactactaaaattagctgggcgtggtggcgggcgcccctaatcccagctactcaggaggctgaggcgggacaatcgcttgaactcaggcgaaggttgcagtgggccgagatcgcccgtgccactgcactgcagtctgggcgacaagagcgaaactcggtctcaaacaaaacaaaacaaaaaaacccgaaaaccaaccaaacaaaatctgatccccgaatgctcgaagaaactgatttgagtaataataaaactccggtctcccgcacagctggctctgcgtgaattactctttcgccattggaattcccctgtcttgacaaatcggctgtctacgcagccggcaaggtggacccactgggcggttacagcattattaggtatattaacactgttgtgcaaacacccccactctcggtctccagaactttttgtcatcccacattgaaactctaccgattaagcactaagttcccattcccttcccagggtttttaacaaggccacgttaaacagaaggggcacctgcttgccaggtggaggcctgggcactggcagggttctgccctcccgactgagcaggggctcccgaggtgactaagcaggctctctgggtagtgctcccgccctcacctattgtccgggtggaggaaccggtatttccggatgggggcctcagacccagtgatcccggctaagggtgaggctggcgggggaggggaacggaagcgggtcgtaaaagttaactttacactaaaatcattaacttttctcacaccccccaataaaagcagtcacctcccccccccaagagccccccacgcacccacagtggcccacaaccatgcttcccgggggctttgaagggtagaggagctgacatcctccttgcccagaccctggaaaggattaggaagcggacctgggcacgaatagagaaagaagcccagcaaattcctcttgcaccagctctgggaggaagctcagctgcagttctacgtagaagaaaagaggcggcaaagtaggcgcgcgggctccagtgacaaaggtctcccaggcagccgcggcccctgccccaccgctgagtggcgtgcgtgcaggcccaccctctccgcctttcccgacaccccaaagtagcgctgcgagcagctgcgtctccctcccggggctcgcgcgcccagaaccctccggtctcaaggaagcaggtgacagccgccgcccacccccttcccctccccgccgctgctctctggctcgccaccgcccaactccccctgcccccaccctggattttttttccccttctctcaaacctctaaacaggaaatagcccgaatcacaataatatacgggagcagccgcggaggccgctggcgccctcccattcccggggagcttcccgcactccggcttgggtgaagtgcagccagcgacgcgcgcagggagcgcagggggacaccagcccagcagctagcgccgcgccgcccagcgccccggagagccgccttc

SEQ ID NO: 42002 - DNA, 2300 bp, Homo sapien
cagatgctgggctctctccctgaaaagttgcttcacttcctgcctgatcaaaacaagtctagaagtttcgtggaaaaacaagtccagtagatgcctctccagaagtgttatgcttctggactcctttggagtaactaagtccacgcctctggataaaaagcactgtgagtaacgtttcccactttgcctcgagtctccggacttagacattttggttgtattcctgatgtaaggcattgctctcctgatctaagcacctatttataaaatgtttcccaaatctggccaggcacggtggctcatgcctgtaatcccagcactttgggaaggcaaggcaggagaatcacttgagcccacgagtttgagaccagtctgggcaacatagtgagaccccatctctattttttaaaaattgttttaatcaaaaaaaaggaaaaaaaaataaaatatttcccaaattaggtggtgctgactaataaaaatgatagcacttgaaaggtggccacaccttaatgatgtgggcttagagccactaacatttaaaaaataatccagaatgtggcagttacatctactgactgatttccttttttctctctagagcggcactgttcaataagatgaccacttgccaccagtaagtgtttacatttacatgtaaattaactaaaattagaggaaatgacaaattcagttcttcagtcacacttgtctcatttcaagggctcagaagccacatgtggctaatagctaccctattggacagtgcaaatatagaatatttccatcaatgcagaaagttctgttggactgcactactcgaaatgatgaaatatttatagacaaactccattcttctggcacaacacctgacagatgataagcattcagtaaatggttgttagaaacacggttcagttgatatattagcttttttgctggtggcagtgtaaatcaatacaactctttggagaaacaatttattagtcatcttcttcacgtgtgggtttgcacattttgaccccactcctagaatgtgtttatccaaagaacttctactccgcagggcgcggtggctcatgcctgtaatcccagcactttgggaggtcgaggcggacagatcgcgaggtcaagaaatcaagaccatcctggccaacatggtgagaccccgtctctactaaaaataacaaaaattagctgggcgtggtggcgcacgcctgtagtcccagctgttcaggaggctgaggcaggagaatcgcttgaacccaagaggcggaggttacagtgagacgagattgcaccactgcactccagcctggtgacagagcgagattccgtctcaaaaaaaaaaaaaaaaaaaaaaaaattcttctactcaacaggtacttactgaacacctctgtcaaccccttgataaaatactcaggatcctgccttaggaaactcagtctattgcagtagacaatcaacaagtaatgataaactgtgtaagcactgagattcctggcaggctcagagtggtctagcaggagagacttagggaaggctttccagagatggggttgcttatacattctaaaggagaggtcggaatgagtttttaagacacaaagaaggaaaaaagccttccaggtaaggggaataaataacacagagagaagtaaggaaggaagagacagcaggcttactcttgaggtgccagaaggtgaagttgcccaggcaagtataaagatggatttgacagttggtgggggacaggggttggtgggggaggagaatgttagtaagaatgacaagaccggccaaaaatgcatttttgtgggaatgcaggtgagagatgacgtggctatgaagttaggcagtgttagacaaaagggagccagattctagagaaactaaggaagtagatcagcaggctggatgactgcctgactagatatggggagacgcgagcgggaagtgagcctacgctgactctcaggtttctggcttacttaaaggagatgacggtggcttttatcaaaacagaacacaggagtgggagcagatcttgggaggagcttgaagaaagatgatgagtttagttacagactgattttcaagtgctatgggtcatccaggtgaagatgttcagtaatttaacaaatatgtatcaagtgtctcctatgtgctaggcactgatgagtatttgaggagagagatttgggagtgatttgggtatcatcaatgtatcataaaagttgaagtcttgggaggggacaatcccacattcagagacgtgatgtagattaagccaagag

SEQ ID NO: 42003 - DNA, 2300 bp, Homo sapien
gattacaggcatgagccaccgcgccctgcggagtagaagttctttggataaacacattctaggagtggggtcaaaatgtgcaaacccacacgtgaagaagatgactaataaattgtttctccaaagagttgtattgatttacactgccaccagcaaaaaagctaatatatcaactgaaccgtgtttctaacaaccatttactgaatgcttatcatctgtcaggtgttgtgccagaagaatggagtttgtctataaatatttcatcatttcgagtagtgcagtccaacagaactttctgcattgatggaaatattctatatttgcactgtccaatagggtagctattagccacatgtggcttctgagcccttgaaatgagacaagtgtgactgaagaactgaatttgtcatttcctctaattttagttaatttacatgtaaatgtaaacacttactggtggcaagtggtcatcttattgaacagtgccgctctagagagaaaaaaggaaatcagtcagtagatgtaactgccacattctggattattttttaaatgttagtggctctaagcccacatcattaaggtgtggccacctttcaagtgctatcatttttattagtcagcaccacctaatttgggaaatattttatttttttttccttttttttgattaaaacaatttttaaaaaatagagatggggtctcactatgttgcccagactggtctcaaactcgtgggctcaagtgattctcctgccttgccttcccaaagtgctgggattacaggcatgagccaccgtgcctggccagatttgggaaacattttataaataggtgcttagatcaggagagcaatgccttacatcaggaatacaaccaaaatgtctaagtccggagactcgaggcaaagtgggaaacgttactcacagtgctttttatccagaggcgtggacttagttactccaaaggagtccagaagcataacacttctggagaggcatctactggacttgtttttccacgaaacttctagacttgttttgatcaggcaggaagtgaagcaacttttcagggagagagcccagcatctgcatctcctctgggacagaccacaccttttaccttctacttgtgagcctaggacgagttttgctttccaattaagggaagagcagggcaggcaaaactattctcttacaagatggttttttaagatttcaaacccaaggttatatttttaatcggtacctgtttggattctccaaattaatttatatgctcttaaaataaagacacttaacgtcactgcacaattctttgcacatggaggacttcgaaaggaataagcacactgaattgcattagatgaatcctgtcagataagcacttgtgacctactggcaaccttttataagctgatgatgggagaggagtttcaatctctttattggagttgttggaaatgtgccaaagagataacctggaatatattgtcctgaaaagtcctgttttaatatttaatacgaacatcttataaccctcggaattcgggtaggcagttgttgggctgagaaatgtggggtacaaggccgtgtatgtgttggttagccgggcaggcctctagacaggacctaaaactttgaggttttcccagttcgactcttcgtaggagaactgaagctgcctgtgtgaggccctgcgaacctcgccaaaaagtcttcctacaggatgcccccgcgacctcaccggggaaacaccgcggacagtcgggccagcagcgcccggagctcactccaggtctccaaacttgcagcacttcccagagcgcgcgcgctcggagcgggacctgcttgctccagtgcacgccgcggagcgaaccatcgggctggcgggggtggaggggtgcaggcgtgggggctgcgggccgctcgggccttgggcttctcctgccgccgccgccgcctcccgcccccggccaggagtcgcgcgtgacgcggttcgccgcaggagcctcgaaggcgcggcgccggcgagcccttccccggcaggcgcgtgggtggtagcggccaatttgacagtttcccgggccgggcggccagcgcggaggcgccacgctcgggtcgggggcgggctgacgccgccgccgccgcgggaggagggacaaaggggtgggtccccgcgggtcggcaccccggcggttgggctgcgggtcagagcactgtccggtggtgcccaggaggagtaggagcaggagcagaagcagaagcggggtccggagctgcgcgcctacgcgggacctg

SEQ ID NO: 42004 - DNA, 2300 bp, Homo sapien
tgctggtctacccttcagattttagacttaccaatcccctacaaccctgtatgccaattcattaaaataaatctctttctcttcacatatgtatatgaaagctagaactggcaaaatgaccccaactgaaaagaggttcgaaaaggagggagaagattgactgggaacctttctcttaaaagacagctgcgattgcttaaatggactgttcctaaccaactttacttcatataaagaaatttgttagtgtcaaattactactgatgttagtgacatcagtagcatctgatgtcattctggaagacccatcgctcatctatctcactgggctagaagcacaggcataattctatcatagatgcaggtgccgctggggccacactggcttctggagagctgcagagtcctgacggcgcagaaaatgaacacggctctcactcatggctctatcttccctctactgatactcttctccctgtttcttcatttgcttagcatcattttttttttttcattatgttccatgtatactgtaggcagctttaaatctttcccagaacaaaggaggatatgaataaaaaggggtggtgaaggcactgggggtccatcaggcacactgctggacattctgaggaacagtggcactgcccgcatcacaaaattgctggaaccagacgacaacccagctcctgctgaaagcctcctcgcctccccacctatgtttgcaaagggctcattcctggatttaaagaacacaaacaaacagtcttatcatatagttaactagtacatttttctcctgttcacaaaaggtggcttttatttatggaatatgcaaattttagtcaatgccctgaggagtgttcagaaattcgagatacattaaatgatttataagtgacagcacccatattggaagagacataagcaagggcacctttatagtataactcagttaccagtaagccaaatttctgccaccactaaaacacaagcctaactcctttgtgtcaattcatatcataaaagacccttaatggaaccaagactcttttctccttttccaaattcattgttctttttattaatacaagccgaaattcctaatctgtcttgcttaaattctaaatttattttagtacttcaagaatgtaagtggtgtttgggcatagtggctcacgcctgtaatcccagcactttgggaagctgaggtgggaggattgctaaaggagttcaagaacaggaccagcctgggggcagcaaagcaagaccctgtcaaaaaaaaaaaaaaagggaaagagagaaagaaagagagagagagaagggagggagggaggaaggaaggaaagaaggaaggaagggggggagggaggggggaagggaggaggaaagaaaggaaaagaaaggaaaggaaaagaaagaagaggaggaggaggaggaagaagaggaagaggaagagtggatgtgggggtgtaaattgatgcaacttttctaggaagctatttggcagtaaacatcaagggccttaaaaatgttcctattcttttactcagtaattctacttctgagaacttgcctgcagaaaaatactgaaatgctgatcaatgatatacaaaactggattacatacaaagaggtgcatttcatgtttaaaaaaaaaaaaaaaaaaaaaaaaggcaaacaactggaaataatccgaacagccaacaacagaattgttcacttatgaagcagccatgggatatattgctctgtggttgttaatgatgatgtgtacaccacgctttaaataccttgctgcacagttgtaaccacttgagaaatgttagtgatagaatgataaacagaaaaaataggaaatagaactacaaacacagtacaccctcaagtatcatacacacagacatccacaaatacgtaattggagaaaatacaccaaaattatctgagggatgggattatgggtataattttctttttcacgtttccattttccaatgttcgacaaggaggttagtaatcacttctatgattagtaactgaaataaaagttgcatttaaaaataggaagtagcatacaaatccaccacaaagaaaattacggattgcaatgtattcctttttattaaattataaaactgttgtcaatacatgtgcttttggaaatagtgttttcctcaagtatctgcttttgtgcagcacttgggtttaaacaaacaacaaatttcgataccaacttcttgggcttcaagctattgagcacttatagccaaactatcaagtatagttatgatatagac

SEQ ID NO: 42005 - DNA, 2300 bp, Homo sapien
aaaaacgccaccctggtggctctgcctgtgggctctgccactggcctctatgagtgttcaggaaaactacagaaggatggatattccagacaaggtaggaattagacccgttatgccacctattctgtttgtctgactaagtccagccaaatggtgggtgcatttcatttctctaaataccacgggccagtaatgatcttgcatatatttttaggaatttgctctttataaaatcataatctattgtcttctcaaacatagctagtttaggattcttaaaaactattttttgtcttctaaaattaaaagctgaaatcagtttactattgtgaatcatttcagaggtaaatgcacttagatatcggtcaagccacagttgaatttgatgaagtaccaaaagaaaagaaaagaaaaaaaaaggccttccaccagaaggtgaaggttaatactcctggtctgctggctgggtatgtccttgtctccaggtctgggcacaccagaggagagaaagaaatcagtgatttggaactgacaagttctctgctatatgtctttccccattcttccccatactctccaaacacaggtctatatgcaactctataactgttggctattcctactttttgtgacttgttcctgagattgacctcagaatttgcaaagtgacaacagaagcagtagatactgtatttatagaacaattaaatacaaatttaagaggatggctttaggcaccatgactctcttggtgctttaggggaaaaaagccttgtatcacatgttttgaatttatgcatgtgacagaggttgttttttaaaaacctcgtgttatggaaaagtttacatttatgcagtatacgatgaacccacatatacctttcacccagcttcaacaatggtttcatctgcacccccttcctgggctctgctgctggccttgtgtcttctgataaacttcagaaggatgaatattccaagcagggtgggaattagatccttcgtgctccctagtccatttgtgagattaaattctcttattgtttggaagcaaatctcaggtgtcacatttcatctgtatatattccaatgtgtgtatttttatcacaagaaaatataaccagcataggattgagtgggcagtccgaagaaccattcccttcaattttaaatcttttattataaaaatttaaaaactcaacaaatgtagaaagaagggtgtaatgatcccgcattttacccttcacccagtagctatcaacacatggccactttatacctaacgctgctcccccttcctaacacccctggattattttaaggcaaattccaggtatcacaacttcagccattagtattttagtatgtacttataaaagaaatgggcttgataggacattgtaactaattcaaagacagctaaactaaggtttctataaaaaaaaaagttggaagattatgagttgagaactgcagaattaaaaaagaacacagctttgacatatattcacatgccatacaacttacccatttagcatttaaagtgtactggtcaatggtttttagtaaattcacagttgtgcaactatcaccacaattttagaaaatgtttatcaaccctaaagttttgagtagttactcctcattctccaccacccccacccctagccacccactgattaacccactttcagtctctgtagatatgtctgttctggatatttcatatacaagggatcatataatatgtggtcttttatgattggtttctttcacttagcatgttttcaagcttcatccatgctgcggcaagtctcagtacttcattcctattttattgtatggatatgccatgtttatttattcactcacaagttttattggcatatgaagctaggtagttgaatggaagtgccaacttatgtctaaggttacttcaaacccacataggaacacagtagaagaatatcctcatatttcaagctttgaccattaggatctttagcctgctatatcaactgaacccacacatcttctttaggcttcactgaaaattttgcttgtgtatttgatacaaaattaggttcaagagacaaatatatttatttgaaatgactatttgttgaacacagtatagttcaaggatattttttcatatgtatttccttaagagagccctgagcctgagattttggaggcttctttcacttgtttgaactttgaaggtatattttatctattttaaaaaacacttaagaattaacaaattctataaagcatcttttttcatagttttcatt

SEQ ID NO: 42006 - DNA, 2300 bp, Homo sapien
ttttttgtggctgcatagtattccatcgtgtatatgtgccacattttctttatccagtctgtcattgataggcatttgggttggttccaagtctttggtattgtgaatagtgctgcaataaacatacgtgtgtgtgtgtgtctttatagtagaatgatttataatcctttgggtatatacccagtaatgggattgctgggtcaaatggaatttctggttctagatccttgaggaatcaccacactgtcttccacaatgattaaactaatttacactcccaccaacagtgtaaaagtgttcctatttctctacatcctctccagcatttgttgtttcctgactttttaatgattgccattctaactggcatgagatggtatctcattgtgtttttgatttgcatttctctaatgaccagagatgatgagctttttttttttttatcatatgacacacagttttctaaagtggttgtgccaccttatacttgcacaagcagtgtctgagagtccaagtgttcctcatcctcaccagcacttggttttgtcagtcttttacattttaaccattctagttggtgtgaagtggtatctcattgtggtttttactttgcacttgtgacaactaattatttgaagacctttacatgtgcttattggctattcttatattttttatgtgtctgtatgaaatgtctatttaagtcttttgccccaatttttaattgggctgcttgtctctttattattgatttgaggagttacttgtatattctggacacaagttgttgtttgttcaatatatgagtgaaaatattttctaccagtctgtagcttgcctactattgattttcctaactgtgtccttcagtgggctggctttaagattttagtgaagagattttgggttcagtgttaggagtaatgggccctcacccattttatagttgataatgttaatttttattggcgtactgatgggcattataaccacacttttttttcaaggcattgtatattatcgtaaaagaaaatttccaagggaaaactcgagacttttccatagtaacagtgattgtgttattgggtttaaggattacagatatattagatctctttgagtagcaactgctagtgtgtaatagaagcccatgtgggaagatcaagtcctgtcctttgccaattatgtattctccttttccaagaagctgtggcataatcataaatgatacagtgcaagaggggacatattctatatgctgcccaagtcaagtccaatagacactggggaatccagcctgggaaacagtaacaacagcagcttccattagtattttccccaagatctgatgacaggctgcatccaaattaacaataaaaggaaagaagccaaacttctcttggagagaagaaggaattccccctaggtaaagtggcatcatgtgatattaaacattgactcataaaatgggtctcgggaaatgctttcaagcttgacttggaataacaatagttaaagaacagggtttctcccttagagttcatatgtgaacttgtttaccagccaactctgacatatcagctacttgaattgatgctttgttctaacgctgataattattgcctctaatcttttatatttgcttttatatttgcaataagattttgattttcttaataatcatggctctcaagttgaaaagcctgcataatctctaacttgtactaagtaaatactggcttctcagttgactactatcaattttttaattatttggagtaatatttgtaataattaactttagagaaaagcacatggaaaatctttgtgtgcatattctttagtacctaaagtgttcagaactgaaaaaaagacccatttttatgtccatttacatactgtgatttctggatagtaaaggctctgagctccttcatgtccctgtgtttcacttatattccagagttctgtatttgtttatttgctgctgatcccacaaaactaaaggaaaaaaaataagagtggctcaaggaggaaatagctagggcttagtgtaatgtgtgggtggaagataagggagtaagaattattttcaaagagagaaaaataaggacttgaggttattgagaagacttaagagtcagtggcatccctcagcacaattttaagaagtctaaaatgtgaaaaaaagtttgtacattgaaaacacggttctgatctttttttaaaaaaatgttctcttggaagggaatatgagtttttaaaatcaggtaaaactctgtctgaatttagctgttatc

SEQ ID NO: 42007 - DNA, 2300 bp, Homo sapien
gagattttagtcctaagcggagtaggttcccaggacaaggaattgttctcagcagtatcttttctcctgcttatctcatttattattacaaattcaaccattttattgttctatccatcgcttttaaattggggtagaagttacagtgaaaaacacaaatcttaagtgtgcagttcattataagttttgaccaatgtatacattcattttgacaaatgtatacactcatgttatactccaaacaatttctatactccaaacaaaatattgtttgttgtactccaaacaatatttctgtcaccctaaaaagttctttagtgtctcttttcaggcagtctctactctctcataggcaaccactgttcctgtttctttcaccatgggttagttttgcatgtccttgaacttcatgtagatggagtcacacggtttgaaagtttttgtgtctgacttattttgcccagtgtaatgttgttgaaattcatccatatttttatattgtatctgttgtttgttccttttttcaggacactatttcattttataaaaataccagaatttttttgtttttttgttctcttgttgatggacagttaggttgtttccagtttgggggtattatgaacaaagctgctgtgagcattattgttttggggaggcagttttcatttctcttgagtgaatacctaggcacggagctgctggatgatgcggtgctaaagagttttccaaagtggttggggaagtgagtatttttaatttaaaatggatagtcagttccttcattaaagggcttaaactcaccagtgactggtgaatttctaccagtggctctccacgtctccaccagcaaagagagtttctctctttttaaagttgtgccagtctgatgaagccagagtgagagcttgctgtcactctaatttgtagttccctgagtgcttaagatggcatcatcattttttaaaaagctctccagaaaattcaaatgtacaggcaggattaagaatgctgctattgaaaggtgacagggggaagacaaagatctgacctcttcaggcagtagcaccaagaatgcagggtggatgttcattatttaggatcagggagacttctacaaatttgtttgtggataggctaaagtgactgatgagaagtgagaataagtttttagaaatattgggcagagatgggattaagaatggaggtgaaggtattagattctgcaaggatcaggaataggggagaaggaacgcacagtgcacagttgcctggaatcattttgcacagtgcctgaggtttctttgtatccagtgggaaaattaattggtattcgtgatcatttgtataatgagtaaactttcaaatagggttgtttaaagggactgaatttcacccatctggaaaattttgccatccagactggctcactccagaggtgccaggtagctgaagtttctgaagagctggacatctatgttatatggtgtgtgcagcccacataggcctggtttcccacttaactaaacgctttgtatcaagaatggacttgtttgggaagggaatattttgtaagatgatgcctagtattgtctgagagagatagagctttcaggttaagatcttgaggcttgcaccaagtgcaaaaaatgaaaatcagagtgcattgtgttggggaaaaaaaagtgagtttggttccttttggggaagagtgggactcatgtacacgagcagaatggaggctgatacttcatctcatttagctgcttgtttgttagtactaaacaggattagtatgaaaacaggaagttctcagctggagactttaaaggagaaaggaggaatattaaaattccctttgttttgtgaaagccactgaaatttaggttttggttgttaccatgctataccctagcccatcctgactgatagaggcattgcctgacacagaaccctgccatcatctcattctacaggattggtgctccatggtagagccagggtattttttcttaataattaaagtatttttttttacctttcctccgttaaggtggacttaggtgaaggcaagatttgcttctgttgtgaagaatttcaaccagccaagtgcacagacaaagaaaatgccttgaaactctttccggttcagccctgtagtgctgttcaccttctacttaaggtacctcaaacagattcccacccgcacggtaaatacaccacggagcccccaaagaaggcaaacttacttgaaatattcctgttctattacctccctcaaacaattaagctgctgaaag

SEQ ID NO: 42008 - DNA, 2300 bp, Homo sapien
ggtccacaaagtctgcctgcctctccagtctcatctcacttcggccccacctgcttgggccttttcacatttccttccctttacctggaagtgtctcaatgctgcctctcctgggggatctgaaatgtcatttccttagaaagccttacctagtcccagagtccacattaggttttcccgtgcaccttagcgcctttgcagttgagaatttatcacagttgcacttagtctgattgttttatttgtttgtttgttttttgagacaccaaggctggagtgcagtagcgcgatctcggctcactgcaacctccgcctcccggttcaagcattctcgtgcctcagcttcccgagtagctaggattacaggcgtgcaccaacacgcccggctaatttttgtgtttttagtagagacagggtttcgccatgttgaccaggctgatctcaaacttttggcctaaagtgatctgctggactcagcctcccaaagtgctgggattacaggcgtgagccaccgcgcctggccagtctgatagttgaatacctatttccttcagcgtactgtgagctctggtggaaaaggaccatgtctggctcgtacatatgccaaataagtattcaccggaaaaaatatgagtaatgtcacaggacaagcagacatcttcctagtatataattttaaattttactaaaatctttttgagaaggtagctattgttttattaaagcaaaaaaaaattacaaagtacaatgcaaaattcatatgaattttaaagctaaaacaagactttcagaatgctttaggctacacccccagacttctctagagacgtgcttaaaataatatggaaacacggtgtggtaaaagatccatttcccaagggatctggataaccagcgcttatcttcattttactggagaatacatgtgcggagagggctttgcaaactacaaggctttgtgcattataacattattatggaaaaatctgtgtttctaagagggggaatgatttagctattgcattgccaattacaggtggggctggcgccagagcccaggcctcccggggcctgtctagcccacagcttttcattaatgcacagcacttgccacctggtccctgccgcaaagggtggcctctcgagttaggagccatatctagggcggatggcctgtgctaggctcaaagacacttaagttccgatcaaccagaactgaggagcgggtaggaaaaccaagccgagccttcctcggcttcacaatccgcaggctctccgctgtccccggcgggactcggcagttcccctggagggctgcagcccggctgtcttcgctcaggcccaagcccgcgcggctctccccctggcggagaactcgcaggactgcgacgcattccggagacgccgtcaatctccgaatttgaagcgcaggcgatatctaaggggcctgggaagcgggaaagctcgggagtcactccggagagaacaccctgcaggagtcgacgcggctgcctggcttcgtggtcctgcagcgtggcccgttgcttcgcgcagaggttggccacagctgctggctaggaaactggggaccacctgggttgccaccgaggagggtggaggcccccgtcagtcccctcggggatgcagctgcattttcccctccttgcgtccggccgggagccagaggatggggctgtggaacccattccgaaaggcagggcgggcccttcggaacccggacgcgagggaaggcgagaggcgcgggtgtgccgcacgcccaccggcgccggggcaggggcgctgcagccggcggcccacggaggacatcagcggtgccgccgccgccgccgcgggctcgcgggccgcgcgcgcacgcgagtgggcgagggaggcaggggcgctactagcaggcggcgtgcgcgcgcgcgctcccccgcgccctccctcgcaggcccgcccggccccagcgcgcgtcacgaggggccagcgagctagctggagggcgggagggagggtggggaaagggggtggggccgcgagaccggaggggtccgagcagcggctgcggagccggagctgggcgagggcggctgcggtcccggcggcggcggcggcggcggcagctgcggcgggagaagatggtggcgctggaggcagcagcggctggagcggagctttattcccaggcttggcaccagcgctgtcactagcgccgcctgctcccgcgggcccgcggacccagctgtcaggcaaggtaccacagccagggaggggtgggtgagaaggggtgcccggcgctg

SEQ ID NO: 42009 - DNA, 2300 bp, Homo sapien
gaatttttttaagaaattgattttgttgaaaatatatatatatattttttttcttttttgagatggagtcttgttttgtcgcccaggctggagtatagtggagcaatctcggctcactgcaacctatacctcccaggttcgagttattctcctgcctcagcctcccaagtagctgggactacaggcatgcaccaccacgccctgcaaatttttgtatttttagtagagacagggtctcaccattttggccaggctggtctccaactcctgacctcaggtgatccgtccgccccagcctcccaaagtgctgggattacaggtatgagccaccacgcacagccagaacatcttttatatgtgtgctatttttgcctcaaaattaaataataaactgcaattttatacatagaaatatccagttagaaataatctaaatgttttcatattatataagttcattttaaataagtggagtactcttttcaatccatgttaagaagccatgccaaaataaaaaagctgctgtattatagccagaatgttctacaggtttatttttcaaaaatgtaataaatgtaagattgatttttatttcaggtaggagtttatctggtgctatttttcttcaccttttaaaatcaaataaagatactgttttccatttctcagatacttgccagctatagcctctggaataaatttaggtggctatgaataaactcattggaacttaaaggagatgtttaaaacatatcactgatacaacttgactatcttggctggaagtaatcttactatttgccttatttattaaattgttcattcatttcataaaatatttatgtatccactttgatgtcagtaggtatagggggattgaagtatcagataggaatgaataaatatcttaaagccctcactcactgagtttaatgagaatgaagagatgcactgaaattctttaataaatgtgatggaatacataagtactatgggggttcagcaaaaggaaagattcccgcggaagaaaaatggtgtaagaaatggaaaaaagatcatggtacaggagaaggcatttgcctgggacctttgacaaacaggtaaaggtgtcattcagcattatgctgtctgtattgttaactgttcacaaatgtatgtcttttttccttagctggtctgaaaatcctctgacggaacgtggtaggcacttgatatacctttcactgatttatgtttgcgacctgtccaagacactctcaaataaattatttttgcataggtgctgctttttaaaaaatcatttcatttgaaattctttagtttgcaagatattggtatcacaaagatttaaacaatttgctgctgaattttcagttattttaaaacccatttattattactgttaagtaagtttgagacagttaaagtcacgagctcttgaaaaaatcttattattagtgcatcatgtttttctactaatcccttataattaagtagtgagcaagacagacacggtctctgccctcatgacatttatattgaagaacaaataatttcactgagcctattgtagagataataagttacatattatacacatttattaaatgtaaaataaagtttatatcaaagtaatctgagtttatatttttgcttttacgtcagcattacttgtaaatgaataccctaatgctcatcattattttagaattttattttccttctctgtgtgtaccaatcagaatgtgagtagtcaaggtctagggaaaggatgacaaatgagtccttaaattctttagtcttaaaaaaaaatctatcacttttatatgggaaagagaaaattcgcatgtattaagcttccactaagtgagagcactgtgctagacattgtgtacaaaatattggtaagaatggtcttgtcaaaaaaggaacaaatcaaagagaaatcagaggcaataatggagaaagaagaacctttgggaactcttcttcttacttcccttttttcttcttaaaagattcttcttgatgaactatcttctactaaacattgggcatctatgcacgtttcagaccacagtggatttcactaccgccagtttttgcttaagtctttgattagccaaactgtgatagacagttctgtgatggagcaaaatcctttgagaagtgagccagccctagttcctccaaaagatgaagaagcagcagtttcaacagaagaaccaaggattaatcttccccatcttctagaagaagaagttgaattcagcactgatcttattgattcctacccagga

SEQ ID NO: 42010 - DNA, 2300 bp, Homo sapien
gactttactaattcttaatcctgtcccaccttgctggctacaattttgtgaaacttctatctcacttctttttttttttttttagatggagtcttgctctgtcgccaggctggagggcagtggcgcgatctccactcactgcaacctcctacttccgcgttcaagcgcttctcctgcctcagcctcccaagtagctgggattacaagcacgtgccaccacgcccagctaattttatatttttagtagagacggcgtttcactgtcttggccacgatggtctcgaactcctgacctcgtgatccttccgcctctgcctcccaaagtgctgggattacaggtgtaagccaccgtgcccggtcctatctcacttcttttacaaccagaaggctaactccagcctttataaacatacccacaggaaatactggccactgagtatagtaaatttatatttttcgtttatatttctcattcactttacatgcaatagatagcttttacttttacaatcataaaaactacttcaaacgctccgcatatgttcacattaaacacaccatgagtttatttttttaatagctttttaaagatacagatttctttttttttttttttgagacagagtctcgctctgtcgcccaggccggactgcggactgcagtggcgcaatctcggctcactgcaagctccgcttcccgggttcacgccattctcctgcctcagcctcccgagtagctgggactacaggcgcccgccaccgcgcccagctaattttttgtatttttagtagagacggggtttcaccttgttagccaggatggtctcgatctcctgacctcatgatccacccgcctcggcctcccaaggtgctgggattacaggcgtgagccaccgcgcccggcctttttttaaagacggagtctcgctctgtcgcccaggctggagtgcagtggggagtagctgggattacaggcgcccgccaccacgcccggcttttttttttttttttttttttttgtatttttagtagagacggggtttcaccgtgttagccaggatggtctcgatctcctgaccttgtgatccgcccgccttggccccccaaagtgctgggattacaggcgtgagccaccgcacctggccagatttcaagggtggaagaataaaactgaaccaagggcagccagatttttctaccagaggtgcaaaagaaaacctgatacacaaaaattttagttatggcatttcaaaatcctaaataaactagaaagctcgtttttcctacaaaaatttatttttgctattatgaacaaaccctgtcagagccttgatccttttttttaaattccaaaattgacgcaaaggctaccaaatgcagtacaaaatgaagtcgaaaaatctaaaaacgatttcacttctacttcctacatacagatggcaaataacttttccttcactttcctttctcttcctttaataaatttaagaattttaattaatgttttttaaaaaggctgctttcaagttcagagacaaaaattggcacagttagaaaggaggtcaccaacacggtcaaatagggactcgctccgccgcaatgcctctggacctcttcatctctcaggctgggaaaataaagcagacaagctctgaaaaacgcccgggactaactgttaagaggccctgcatcctcagttgaacattccttcaggaatgcccggggaccttgctgggggggttcaggaaggtgtctgactctctgggagtgtgtcttgaggtttcgcctaaaacttaaaataagaaaatcggaggcctgagagaactttgcaaacaaatgtccagcatcttctctgacgcttagaaagtccgttacccgcgcggaggcgaacttctccactcactggaaggccaccaaccctagctaacgccacgcccaggccgccaactggctgacccggaagtgctcggcggcggccgcggcggcggggacgcggcctagccgaagcacccgcgcgcgcgcgcgcgcgctcgttctccgcggaactcccgccggcggcccggctcacgcggaggcgcgcccgaactgtcgcggccgccgccaacatggccgagaccagcgaggaggtggcggtgctggtgcagcgggttgtgaaggacatcactaacgccttcaggaggaacccacacatgtgagtcgcgcgcctccgccgcctccgagggtcgtcgggagcgggcgggggcggggccaagcgtccacccgacctcgggcggcgggcggacagcgggtcctggcccacga

SEQ ID NO: 42011 - DNA, 2300 bp, Homo sapien
gtgctgaaaagcttttaaatctctgtggtacttatgcactgtggaaagagcttggccttgggcagcttccatctttgagagaaattgtctgcagagatctgacatattggtttcacatatattatgttaccgccactctaaacgtaagtaaaatgaacacatgaacagatgacagcaatgatgataatatttttggaacaacagcaatattctgtgctttgattggacagaattgagcttgacatggatcatatttccccttttaaagttaacttatgtttttcttttcattctgcctagaagaaagcagctaaaatagcagtcagcactctcctagcatttggctggtgatggtggactgtttatttggttttaagaaatatattttaactgtggctgtcagtaaaatagagaccttagcataccacaggcacccacactatgaaccacagaccacggaaaagcacttagtagttatatgtaatcaaatttgtgccatctgatacagaagagtgcctcactatttatgggagcactataacacatcttttataaaccgagaatctatttgtagtgtgaatggtctcttactctgttttaaagtttgatttttttgtgtagatgtggtcttcctcaagtaagacacttttggaaagtaaacctaaggtaatcaaacataatgaacattcattcattcattcaacaatgaagatatctgtattaaggactatgctgggtaagtgattgcaaggaggaagtgctttaatgcccctcaggtactcgactaaggccagggaggagagaagaattctgatgtgttacatattcttttcctgcaaagtcaaaaatgaaacaaacgtcttttcttctgtaacatatctatccaataacttcttgaaggcaatgttttcttctgtaacacagctatccaataacttcaaaaggcaatctttttaaaatctccttcccacatataacacacagcacaaaaatgtgatgaatttgtgttgtcacgaaatatcaaaaatgtcaatgaggagaacttgacaagtcccggggatctgaatgcccggagtcctaaactgtacctagagtcttgcagcgtcatagccagaagggacttgcgattcttgtgcccactccactctacggtcccgttccctctttcgtttttcagaggaagaaactagtgttcagaaaggtaggggaaggatctgaaactggagctaggctttttgatcttcaaactttttaggtgatttgctggatgagtctgctcctcctcttttgcaggcaggaaagctgtatagaatgacaaactttgggtttcaggggatgttctctcgttctcttttagttaaacttattataaataactcgtaagcagaaggtgtggtggcaatggatgatggacggtaaaaagaacttccccaaaggctgggcgcggtggctcacgcctgtaatcccagcagtttggaagaccgaggcggacggatcacttgagttctggagttcgagaccagcatggccaacatggtgaaaccctgtttctactaaaaatacaaaaaattagccgggtgtggtggcgagaccctgtaatcccagctacttgggaggctgaggcaggagaatcgcttgaacctgggaggcggaggttgcagtgagccaagatcgtgccactgcactccagcctgcctgggcgacagagtgagactcggacacacacacacacacacacacacacacacacacacacacaaaagaacttctctaaagacagcccgaacagacccactcggggttcagggaatttgctcttcccttggtccttaactgacctaccactccccaataactgcgctcagccactcttaggatttggcgggtggacaggcgaaactgcggatcccaggatgcagttccccccttcatcacctgtgtagcccggtcgctaccctcactgcattctgggaaatgtagtttcttatcagtaacgacaacgtctaggaaacgtttggccgtcaggttggagggatccgcccctccactggccccgccccaggttgcttaggagataagagacgccgaatcttggtacttacgttcctgccgggcaggacaggtgcatagggaactcctcagaggtctgtacctcgagggctcccatggatagccttgacagatcctgccaggactggtgcgacaggaagcaacactggttggagatcggaccaccggacttggtggagcgcaagggctccctgaccctccgctcccatcacaagaaatactcgaagccg

SEQ ID NO: 42012 - DNA, 2300 bp, Homo sapien
tccttctctcctcaccaggttcctcaccttcttctcatttgtgttcttctgtggttttgctattgatgtctgtaactttcacaatgcaattttcaaagtaatagtggtgcagcagagagcagaagcactgtccctttgcaaaaagtctttctctttaacaataacttctagtggtgatttatggtatgactcaaatctctgtggggtaacagagtcacagaagagctaagtgttttgcttgagagctatgaggtaagccctatatgaggctaaaagaggatgttctgtttcccagtgtagttttggattccaaatctgtataacttctcatactgagttcaaaggaggaagagagacagtttcagggttgagaagtaaaagcagaaaggtaaacttgttggaaagcagggaataggctttagaaagtttgcaagacagaaactgcaggggtcgcatatattacatgaatgaatgggatgaagtcgggcttagccttagggctagagtcaaaatcactcatttctttcaaaagcaaaaacataaagtagacaagatttgtgacttcttttcatttcttttttttcttcacgcccctcccaaatattccaaccactccaaatgtaattactatcaacagcagagccaggaaagttaattcaagggaaagaatttgaaaagtcctaaaagtttccacttttcttccagttatacatcacagtgttgctattggtcactgtgatatttaataagagaaagtgaatttccaggtcaagttctaaagcacaagaagtaaaccaaatgcttcttggggccaagcaagaacttacacgagggaagttcctaaagacagaacaacacccatcttaaggtgtagccagtgctcagctctggtacattcatagttccccagagaaataaaatcctctctggccaagactttcaaattttcaaagatacaaccctggatttactgtgaatctcctagttttaaatgtggccaactaattaaaatgaaaaaaaaaaaaagtaaacagagctcatgccaaacaatgtctgttggccttaaccagtgggagatgccagtttgcagtctctggccagaaaagttcttgtatgtagcctagaaaatatgaggggcctcgttcaaatcactccatgtacaccctacccccaggaagtggcagccctggaggctggtcctctaaataggcatctccctcctgctgtgcccctggcctctaattccttttatgagtaagtgcctgtgtcagaaatgtgatttccaggcctctgacagcacccccttttcaccccctatttatacacacccgctctgtgtgaatgagctaaaacctcaggtggcggggatttggctgctgcgtggcccagtgtgtggctgggagctgcccctgaaaggctctcctatttcctcctctctgctccaaccctctctcccactctctctatttctcctttgaaaatatttctttcccttttctttcttttctctcttttcctccttcccattcctctctcgtctcatctttttctcacctttcttctcatttccttctttctctacatttctcccccacttttctcattcttttttccgtttcctctgtcgtctccactcctgtcccctctctctgactctcctttcctttcctgttccatcctttcccctctctttcctccccgcagcacccgggaacttgcgaggggacttcgctcaccaggaatacaccaacaccggcttcgagtatttcttgtgatgggagcggagggtcagggagcccttgcgctccaccaagtccggtggtccgatctccaaccagtgttgcttcctgtcgcaccagtcctggcaggatctgtcaaggctatccatgggagccctcgaggtacagacctctgaggagttccctatgcacctgtcctgcccggcaggaacgtaagtaccaagattcggcgtctcttatctcctaagcaacctggggcggggccagtggaggggcggatccctccaacctgacggccaaacgtttcctagacgttgtcgttactgataagaaactacatttcccagaatgcagtgagggtagcgaccgggctacacaggtgatgaaggggggaactgcatcctgggatccgcagtttcgcctgtccacccgccaaatcctaagagtggctgagcgcagttattggggagtggtaggtcagttaaggaccaagggaagagcaaattccctgaaccccgagtgggtctgttcgggctgtctttagagaagttcttttgtgtg

SEQ ID NO: 42013 - DNA, 2300 bp, Homo sapien
aatggtaaacacaataaatgttattattagctactacctgaggcaaagcatataaataaaaaaagatacatatacaccaaatagcacacactaatgaataaatttttgaccatttgaatcattgtttacagaaaacacatgaaaatttgttcctacctttaaaaaaggattccagatatattttccttattagggagaaggttactaattttctaatactgaaagtgacatctgagtgaagacctcattaggcggtgagttgtgtggctctttgtggaagagcattttgagcagaaagaacagccagtgcaaaattctgaaaggatagctggactgtgtttgaggatcagccaagaggtctgtgtggctagagaagagtaagcagggtgattgaagtcagagaaataagagggtggggctgggtgcagtggctcacgcctgtaatcgcagcacttcgggagtccgaggcaggtggatcatgatgtcaagagattgaaaccatcctggccaacatggtgaaaccctgtctctactaaaaatacaaaaattagctgggcgtggtgtcacacgcctgtaatcccagctacttgggaggctgaggcaggagaattgcttgaacctgggaggtggactttgcagtgaacagagatcgcactccagcctggtgacagggtgggattctgtctcaaaaaaagaaaaagaaggaaagcaagaaaagaaagaaaagggtggagcaggtcctatagggcctggttggtcatcgtgaagactttggactttactaaatgacttgggaacttgttgggtcttgagctaaggagtgacatggcccaatttctgtattaaaaggataaccctgactagtgtgttcagaatagagtagggtgggcagggcagaaaatgaagggagaccgtggtcaggaggccactgcggtatcccaggttgatggcaagggcagcttggaccaaccaaggcatcaccaccatgggcacagagcatggtcagcatctgctgtgttttgaatcctgagctgatagaaattggcaatgtctgacaggaacggatgagctgaagatgcctccaagttttctctcctgaacaactggaggaaaatagttcttttactgagatgaggaagacacaggggacgggcaggtttggcaagaaatatgcagccttcatgttgggacctgttaagtatgaaatagctctgaagcatccgattggaaatgttgaggtggcaatgagatcgaagagtctggcgttagtgagtagtctgggttagaaatataaatgtgggagttatcaggctatcattggtatctaaaactatgagacttgaggacagcattgaggggctggatagagaaagaaacaggagtgacagggaagaacttggaggcactctcatgttaaggggttacagaggtaacgcaaagaggccgagaagcggcggccaatgaaagaccaggaaacccagcggtctggaagccaggtgaaggcatgggagcaggttgaactgatggctcaactggagtttgttaggccagtggtcctcaaagtattgttccaaacccgctgcggcagcagcagcctctggaaacttattagggacgtgcagcctctcaggcccactccagagctactggatcggaaacggagggtgaggcccttcagcagattctgatgcaccctcaggttttaaaaccactgccctcctcacaaaattgcctgcacaaaattataaatgggagaaaggaggaggaggaggaggaagaggaggggaggaagaagaactctttacaagaaaagaatattgttggagacccacttagtgcccaaagcaaacagcttcctcagaagtaactccctccccaacaaccccctcccagtgtaaagcctcccattaatcaatctatcatggctctttggagagaaggaatgcccccatttcaccggacggagggaatgctgagcaccaggcatgccagacattccaccggctaaaaaaagtgggggtggtattccagggttagcattgctggaccgtaaacgctgaaactccttagatataaagcttattccacccaaccgtttccaaattttcctccaggctgtccttggagaattccaccctctttcattctggggagaagaagttaaaattagggccagccctgcgggactgacatgccagatgcagggaagctgtccccagaaataagcgagttcccaccgcggctgggcggggcgggagcctcgggtcccaacccagcggagggactcctggaaggcctgc

SEQ ID NO: 42014 - DNA, 2300 bp, Homo sapien
agacccaaagaagcagataggcctgagagcttcaacaccattttaaacaaaggatgataaaattgcggagaagtagcaagacaaaaaagggtcagggggcttaagtttccaggggcagtaaattgtgggaaagtgactaggaaatatatggaggaaacaatggaagatgagggttatgttagtaggtttgtttgtacagatccattttggtgtcaactcccagtctttagggacagaatgttcctccctttctgggacagggagaacaccttgttcacaggaaattttatgacctgcttttaagtataatagaaaaggggaggtcaaaggatccttcctgcctctgctatttctcaagtgactttacctcaaaataatcaaaatgccaaagtgacatagtttggggtggcatgttctgatccccttctttcacagtagaaagaaatgaagagtgagctctgagacagaatagagggaagaatctaatttgggttcaggattcagggaaattttctctgagggaagctgccattagctgggagagtgggagtgacccaggcagagggaacaacatctgtgaaggcctcgaatttggaaagagctggtcacaccacagaataggaaggtctgtatggctgcaccgtggggaggaatggtgacgaggagaatggaggaaaatgatgtcagagagggagatagattctgggtgtggcaggccacaggaagcatttggaattttattatagaggacatgagaagccactgagaggttttaagcagaaaaaacacagatgaaactgaggtttcaaaaaggtttttctggctgttgtatggccatccataatagtctgctcaggcagccataagaaaataccacagactgggtggcttaaacaacagacattatttcctcacagttctggaggctgtgagttcaaaatcaaggtgccatcagggtggtttctggtgaggggtcttttcctggcttgcagatggccaccttatcctgtgtcctcatatgtcctcttggtgtatggaggcatagagagctctggcatgtctttctcttcttttgagttaaataactgggtaaaactaaactgtatacaaagactgaggcacccaaaagaaaactgacaggaggaggagcagaaaaaagaaagagaaaaaataaggtgttattatttttttcttttctgcccaggctttccaggatacacaaactcattttaaattgaccatggggatggtgggagggggaggttcctgatcttatttttctttatgttgtttaggaggaataaaggaagaacatagatctttagcacctgggaggatccatctgatgaaaaacctgctcttcaagggcaggtttaacatttgaccaagagaggagtaggctctgcccagacacacaaacttccacaaagactgccaggccagcctgaaatcccaccatctctatcggtcactaaggagataataaggaagaatctgctctgggccttccattcactatggttcagtcctcggaatgtacaatctaagtcagatggttgacccaggcagctggtatctccaagatgacttcatcctttttgtttcatgaaaagtgtaaatcctaattaatgactggaatctgggcatattctatagaaaatctgtactggtttataaagtttacttagaattgaatgaggtatcatttcaatagaggcacatggatattttctgtcacttaagccacagacattagaaaatgctttctatcatttaaagcatagctgatagtctttgctgtctagttctactttaatcatattttaccacttgctaatctagattagattattttgcattgctgatatgctttatcttctttgcagggtattacctgctagccaacacaaagttcacatctcagcctggctacattggaaggctctatgggccctccctaccaggaaacttgcagtattgtctgcgttttcattatgccatctatggatttttaaaaatgagtgacaccctagcagtttacatctttgaagagaaccatgtggttcaagagaagatctggtctgtgttggagtccccaaggggtgtttggatgcaagctgaaatcacctttaagaagcccatgcctaccaaggtacagcagagccaatttctcctgtgtccatgttcagttgctggactagttttgtgaatgtccgtctagctactgtcaactggtgatgtattattttccttctgttcaggcctacggcctcacccttacaccctactcccagccacat

SEQ ID NO: 42015 - DNA, 2300 bp, Homo sapien
cactagaaatagatcagaaaaagtttagatgttttctgctggatcaatttctaggaatgttccaaaataccaatcattgtattttctaggagaagacactctgctttggtgtgaagggtctttggtttatgaaaaactgtgcttttcacatataagttgtcacagctgttccaggccatgtgtggtctcttagtagcatgtaggtttggaaaccctagtgaggcagtgtaggcagaatatatagccattagaaccagacaaatgtgagattaagtctttgctccaccagttactgctccaccagtaagtgctggccctggaaaggcacttaacttccctaaacttcagcttcctcctgcaaaacgtgggaactttcacttaccttacaggttgtggaaaggatgttgaggttcctagcgcagtgcctacacgtggtaaatgtccaatatagtagtgccccctttatctgtttttgccttccatggtttcggttacccacagtcagctgtggcccaaaaatattacatggaaagttccagaaataaacaattcataagttttaaactatgttctgttgtgagtagcatgatgaaatcttccactgttccactctgtcccaagcagaacacaaatcatctctttgtccaatgtctccatgctgtctacactctctgcctgtgagtcacttagccatctttgttatcagactgactgtcacagtatcacagatcttgtgtccaagtaacctttattttatttaattatggccccaaagtgcaagagtagtgatgctgacagtttagatatggcaaagagaagccataaagtgcttcaagtgaaaaggtgaaaggttgtgacttaacaaggaaaggaaaaatctgaggttgctgagatctacagtaggaacaaatcttctgtctgtgaaattgagaacaatatattgtaattattctattattggtcattgttagtgtcttattgtgcctaatttatagattaagctttattataggtatgtatgtatgagaaaaatatattgtatatagggtttaatactgcctttggtttcaggcatccactaggcatcgaggaacatatgccctgcagataagggggaactactgtaaataatcactgatattatatttccctagaaaattagttattaaagtaatttcaagaacaagaacaaaacaccttcaacctaatgctatatttgtaggtaccctgggcacagtgtagcaaaacttgtttttcttatttacattgttgtacatgggaataaaaagatataagtggtaaaagagttagttagaaaagtggaaggtgtcttgagaaatttttgaaaatctatattgaagcaaatgaaacagagaataaagaaggcaggccctagaaaaaatttactttaaaaatcagaattttctgtgttgtgcaccagagagttttatttaatatgtcaaatattcactcaaaataaatgttgaacacactaagtttgtgcattcaaaattttccacaatatattcatataataacatgcactctatttttgctatgaagtataacccgaggcagctgaagcatctttcaaagtttttaagaagacaaagcaaacacaaccaaattattttctttagacaaagcaatactatgttagctaaagtgtgtccacataacccagaaataatgtaaatacaggagtagaattaggagcaatttaatatctactatatgtgcttttgttagattttcatagactgtgtatttatgaggagaaggtaggacatggtctactagtcaagcaagctcagactataacattattttagcataatgacatgaggagcaggacagggcttggttgtcagccatttaacttaagagtttaccctgttccttcaatgttcaacccattgccctaaatcctgggagtgggttcaattgtgtcttctccaaagaggtatgttgaagccctaacccacgtactagaatgtgactgtatttggagatagaaccttttaggaggtaattaagtcacaatgggattgttagggtgggctgtaattcattatgactggtgaacttacaagaagatacatatcgggggtgcactggcacagaggaaaggccatgtgaagcaagaaggcagccatctgcaagccaaggagagaaatttcagaaggaaccaaccctaccgacatcttgatcttggactttaagctgccagacctgtgagaaaacaaatttctaatgtttaagccacccagtctgggatattttgttatggaagccctggc

SEQ ID NO: 42016 - DNA, 2300 bp, Homo sapien
taatccattttccacacagcaaccagaattattatttaaaaactttaaggccaggcacagtggctcatgcctgtagtgccagcacttcgggacaccgaggtgggcggatcacttgaggtcaggagttacagaccagcctggccaaaatggtgaaacctcgtctctactaaaaatacaaaaattagccaggtgtggtggcatgcacctgtaatcccagctactcgggaggctgaggcagaagaaccgcttgaacgagggaggcagagtttgcagtgaactgaggtggcactactgcactccagcctgggcgactgggtgagactctgtctcaaaaaaatcaaataaaaaaaatcaaataaaaaaattaaaagctttagtcagaacatggccctctcctgcttaaaactttgcaatggcttcccattgctttaaaaataaaattcaggcttttccacgatggacaaggttctgctctgcaaccttgttcactgctctgcagcaacactggccttcccacctcagagcttttgtccttactggtatgttccagcaaaattcttttgcctggggtgctcttttctcagatcgtcacagtttcttctcgtccttcagagtttatcttaaacaccaccacctctctaagaggccttccgtacctcccacccatcaggttcattttgttttcttcctaacacctgtcacagtctgacattatgctaatcatttgttgtgtcagccttaagtagtgaaattcagaaaatatcattaagtatagagtttattctaacgcaaagcttgaggacagccacctggaaacaccaactccaaacaaatagggtcaatgttccaaagtgaagttaaggtttcatttacacaggcagaaacagagaaggttcagcaggagtacattttcaatacaagagcagtgcataaattacagcgattagattagttatagatagctacattccaaggaagataactatattaatttatgaagggggtagtgatctgagggggtcttacctctgtctctgtttggtcttcctgattataggaaaaaacaaggcagacattgcagctgtatgccatgggactcaggccccatcgccacattcttcgcaaggctcagaataatttaaagttccaacagctttaagtttgaattatttaatttcacagttgattcacttgttcttttcctgtctcccacaatagaaaataagctcccagggatgcaaccttggcaggctcctaaactgccacggctccagtttcttgtagattagatattcactgttggttaaatgaaagaagttctagacaggcctcggtgtgctgcctcctctttaacgagagggcttactagatgaatgtgagcagacggaagcagaacaccctcttaatgaaggcagcgcattccagctcagggatttctagaaacctcgggggcggaagtttaaccagagaattaggaggcaaggggaagagtagcaatgaggttaacctgtgcagtgtagtcatttcacgagtttgagaacgcctagcacgatgccttaacggagcgtcgggcacagagtcatttgggaggatttctttttcggatttttgagacaggaacctgatttgaagcaacagggaagaacaccaagaggacgaagagccaacgacgggcgtgcccgggagctctcacctggaaggggtgggagcaagcagggcctgacgtcctcccgccttggcggccgtggacgccccaggtgccacccacagcagcctcccaccacacatgactgaggctcgggaagcaataaagtggctttcaaaatactaaacgcaattgagattttttcctgagttaaaacaaaaaaaaaaaggaactgaatgccgaaatatacggagaagaaactccagttgccacgtccccgaacgtctccacccagtcctgcctgctgtttcgccctcagtctgggcctcgcacagcgcggcggagcgcgggaggggcggggcgggcctgctgacgtcgccggacctgaactgcgcaggcgcggcgcgagatcgcgggagcgagcgcgcggtaacagttcgcggcagttcgcgcgggagcggggcgcctgggtggatgggcgcttgggcgcctgggctgccggacggtgggaacggaagtcgctgtgggacgctgaggaagccaggatggcgactccgagcaagaagacgtcaactccaagcccccagccttccaagagagctctcccgagagacccttcgtcggaggtcccgagcaagaggaagaattcggcccc

SEQ ID NO: 42017 - DNA, 2300 bp, Homo sapien
gcccagaagttcgaaactagcctgggcaacatggtgaaaccccatctctacaaaaaaattttaaaacattagccaggtatggtacgcgcctatagtccgagctacttgaaaggctgaggtaggaggatcacttgagaaggggaggtccaggcttcacggagccctgatcatgccactgagctccagcgtgggcaacagagcaagaccaaagactttcatatcttctttacaaagccctttctcatactcgtagacaaaactaaccacttcatcctttgtgaaggatcctgatatatgttgttatggtatctaactcatttgattacatttatctttcctgatctggattcaaatagcaatgcaactatgtaacagctgcgtaaaactgggcaaaataacctactgagcttctttcagcaatggaaattatcaagatagagttgttatgaagaaagaatgagtgcactatgtacctggcacacaataggtgcttgaaaaaaaaaggtagtattgttattacaattctgttatccttatgccactatgtgcaagctttaaaaagacttccggccggacatggtggctcacgcctgtaatcccagcactacgggaggccgaggcgggcagatcacctgaggtcaaaagttccagatcagcctggtcaacacggtgaaaccgcgagtctactaaaatacaaaaaaaaatagctgggcgtggtggcggctggctgtaatcccagctacgcgggaggctgaggcaggagaattgattgaaactgggaggcggaggttgcagtgagccgagattgcgccactaccttccagcccggacgacagtatgacactccgtctcaaaaacaaaaactagccgggcgtggtggcgcgcgcctgtagtcccagctactcgggaggctgacccagaagaatcgcttgaaaccgagaggcggaagttgcagtgggccgagatcgcggcacagcactccatccagcgtgggctacaggagcgcaactccgtctcaaaaaaaaagaggaaaaaaaaaaaaaaaaagacctggaacaaatgaactggaaggtgctaggcaaatacatgatatatttaaaacttactaaattctaaagcggtaactagttgtctgaaggggagagggaggaaccagggaagaaaactgggtttagtggggtcaagggtttgtagggaggtccaacaattgccagtaagtgtttaatttttttgtacctgtaacctccattcccgaacaacctttaccgtcttatctactcctctctggcaaatgcctaccctaagaatccgccacagcatcactatcacgccgaattaactgttgcctcctcttaagttcccggggacaatacttctgtgaattccagaccagggccgctatggatcgcgactcccagcgggcagagacctactccctcctacaaccactacctgctacatgacacctttggaaaaccttggctgactaaatttaaaaaccacatcacccaaggcacacatctcctacatcatacacgtcaatctccacagcctacgtaggaaaatcctcaagggaaccccggcacgaattcaaggccagacccacaagccaggtacacacccacacgcccacgcccgcgcgctgccggagccccggggcctgctggccagcacacctccacacccgcggcgcggcctccgggcaacttacaggaagttctccatcgagatgcggacgatagagccttccacgaaaggcccggacgactgcaacagcggcagctgcggggccgaattcttcctcttgctcgggacctccgacgaagggtctctcgggagagctctcttggaaggctgggggcttggagttgacgtcttcttgctcggagtcgccatcctggcttcctcagcgtcccacagcgacttccgttcccaccgtccggcagcccaggcgcccaagcgcccatccacccaggcgccccgctcccgcgcgaactgccgcgaactgttaccgcgcgctcgctcccgcgatctcgcgccgcgcctgcgcagttcaggtccggcgacgtcagcaggcccgccccgcccctcccgcgctccgccgcgctgtgcgaggcccagactgagggcgaaacagcaggcaggactgggtggagacgttcggggacgtggcaactggagtttcttctccgtatatttcggcattcagttcctttttttttttgttttaactcaggaaaaaatctcaattgcgtttagtattttgaaagccactttattgcttcccgagcctcagtcat

SEQ ID NO: 42018 - DNA, 2300 bp, Homo sapien
ctgactttgctagttgtatgggccgccttttttgaaattttgttggataggttaaaaaaaaaattgctagatgcagtggctcacatctgtaatcccagcactttggaagacccaggcgggagaatctcagaggcaggaattcaagaccagcgcccccataggaagcatggaaaaactccatctctacaaaaattttttttaattaaccaggcgtggtggcacatgcctgtagtcccatctactcaggaggctgaagtggaaggatcacttgagcctggggggttgaggctggagtaagctgagttcgtgccactgcattccagcctgggtgacagagtgagaccctgtctaaaaaaaaaaaatgtatatctcgtatattttgatcttccaaaattcacttggtctgtatttctaatttagtactttaaaacatataatttatattagatgtgcactaatagttgttttacgttataggtaatacaagaaacccgattaaaacagatttatacagcagaagaaaagtatgtggtgaaaacttctttttattcaaacaaagttatttctagtaacacatctctaaaagtagcgcagtttctcactgtcactgtggacctagagcagagaagacacttagaagaacagctaaaggttggttaatttgatctgaatgttagaaaagaatattaactggatttctaatagtttcactggaacagttttttaaatatgttaacaatttttaaatattttataggaaattcatagaaaattgcaagcagtggattcagggttgattgccttacgtgaaacaagcaaacatctggagcacaaagacaatgaacttagacaaaagaagaaggagcttcttgagagaaaaaccaagaaaagacaactggaacaaaaaatcagttccaaactaggaaggtatcttttagcctattcaggggggagagcacaaattactgtatgggagaatattaattatacactgtaataacaacagcatttccacaagcacgctttgtagtaatttctctttaatctttaatcttactgcataaaacacaattttattccatagggcaaaaggagatgaatcttgagtgttgcaagttcttctgttcttccagtctctggactcctttatatgcttaaaaattaatgaggaccttgaagaggttttgtttacatggattgtatttattgatatttaccatattagaaattaaaactgagaatgtttaaaatattcattaatttatttttttttaggtggagatggggcagtaattcattttaaaaataaacccattatgtgttaacataaaaatgtattaaaaatagctgttttccagacaaaatacatttagtgagaagagtggcgttttacatttttgcagatttctttagttgaagtcagtaggtttttccctacttaattctgtatattgagtttgtagtgagatgtttgagttgaagtatatgaaggaaatctggcttcccataaatatgcagttggaaaaggaggagtattttagacttttcaggtaattgtggatattattctttaatactacatcaaaatttgccaaagtgtagtttattaaagtttaattgcagtgtggaatctgaaaccatatcagtgaacttgtgtactctgttacattaaaatccattgcactttagatggcgcttttacttgtaaatgatttagttatagcatgcattggtcattgggagaatactggttcatcaagtcacatagatatttcaaacgttgacatattttattatgtaatatttttaaaagatcacattgatcactgattccatcagaaaagctgttaagaattgggaagctgtcaagcttgccagtggatacagattttctaaaattcaaattttcatttgaaagtttgaactttatcattggcaacaaatattgtcagttattttccttgaaatgacaagctcactttattcctgtttggaaaaagaaaaatgaccaaatagccaagtccagataattatagtttgtcatttttttaaataaaaatggtattccatgaaaaaaatgtctagtataactccaaacttagtcacacaagtgcttttccttgaaacaacatttatacttttgaatatactacaaatatttaataagcacagcctgccctccatattcgtgggttgcacatccatggattcaaccaaccacagatcaaaaatattcaagaggccaggtgcagtgtctcatacttgtaaccccaacactttgtgaggccaaggcggaagga

SEQ ID NO: 42019 - DNA, 2300 bp, Homo sapien
gtaactttctcttaacaaaggttaatagccagtggggggtcagggttggaactcaccgaatctgcatcacatagaatcaggtacctctcacattcacgaaagtgaattatttttaatgaattgtgctgacagtatgcctcttgcaaaaagaactagccctagattcttttctagctatcaagatggaaaacaaccacatcgttaattcagacggaggggtaaaccaagttaatcagactccaagacccatactaattgttgaccaagtaatgccacagtattccatggctaaggatttccagcttgttccagtccctaaaaatctgttctgcacagttaatatttcacaaaaccaaaagggcttagttgcaagcacaaagagctagaaatcaggagacttgtggtttctattgagttctatcattatctgtctaataagataaataagtcacttctctgtaactcagtttccacatttgtgaagtgagggaagagaaacatgtcctaaaaaccatgcaggggctctggaaagaaaaagagctaagaatggtgggttttttataaaagttacacaaatgaatggtttttgtctccgtttttctgaaagtgggttaaaaatagcctccaaataaagctaaaagaatttatttagactaaattgcaccagagaagtagaggaattaagagatatgacaagcaaagatgggatgtttcaatggaagaatctcaggcagtaaaaaggctatgctgtaaaaccagaacttttgttagcactgcatttttaagatgaattggtcatagttaatgtattggatggaagaatttttaaacatctgccccaaagtatgctgcatccaaaaaatatataacaaaacgaattcttactcatttgtgtttattcttggacttatcctgacataatggggtttttttaattatagattcacactgcatttattcatcacccctgtcctctcatccataactcaaatttactaccagcaacacaaaatacaaagatgtgtccagtttcactacagctcttcgcgtttacaagtgtcgagcgcttgctttcggaacgcccttgtgattggccgagccaatgccagtgacatcaaccaacttacttttgattggaaggctggttgctgggactgtagcgtttgcaggaagtcacttaactgtttgggagctggaaaaccgaagctgaagttctcttttgccataggaacgagcgcaactgactaggaaagatgtgtcccaaagctccgcaagctggaacgtgagccaggaggcccggaccggccacgggaccgcgaggcactccgaaagtgtgcggctgccccttccctgcctcccagctgttacccttttaaatgtcagtgttcgaggctgtaggggtagcacgaggcagcgaaacggaacagtcggattggccgcacgcctcagttctagacgcacctctccaccgaaggccgttctgactggcagggggagaaagtaaacagagttgaatcaccctccccactggccaattggagggggtttggtttgtgacgtgatgggattctgcgaaattgttactgagcaagagaatgccggaacggtgcggaccggccggagcaggggttcagaagccgtcagtggactcgggaaaaagtgtctcttagacctggcgctcggcgggaccctcgccacccgcgtcggggtgatcgggtgaatgtcctggggctttggctcgacggcgaggcggccgagggcgtgcacctctcttgcagtttcctctcccagcgcctcgggggcgttttcagtcgaataaacttgcgaccgccacgtgtggcatctttccaagggagccggctcagaggggccggcgcgcccgtcgggggatcgcggccggcgcggggcaggggcggcggctagaggcggcggcgcggcggagcccggggccgtggatgctgcgtgcggaggcgctgccggttacgtaaagatgaggggctgaggtcgcctcggcgctcctgcgagtcggaagcgccccgcgcccccgcccccttggccgccgcgccgtgccgcgccgcgccgcgctcgtcgtccgaggccagggcagggcgagccgaacctccgcagccaccgccaagtttgtccgcgccgcctgggctgccgtcgcccgcaccatgtccgcggccgcctacatggacttcgtggctgcccagtgtctggtttccatttcgaaccgcgctgcggtgccggagcatggggtcgctccggacgccgagcggctgcgactacctgagcgcgag

SEQ ID NO: 42020 - DNA, 2300 bp, Homo sapien
agcagcagttatgtttgtaaatgtgtgagaaattcatgtagatgaaatctcagttttctttcattactttcttttgtaactctgaaatgagtgagtttggagaattcagtgtttatgtccagttcaaacaaagtgaaattaaagggaattaaagaaaagctggcaaggagtaaggaagggaaaagtttatatttttaaaaaacctaaagtgactgatgtattcaaattcctggattatataatcttcaaggaaagatacagacttttcctctattctggaataatgatgatggtggtcctagggctgtctatagatgtccaggcccgagcagtctgtttcaccagtacaatcccagttaaaatgcaagtctgaggggttgtacaggccatgatcatagagatcctggagagatcccgctggtatatgcactgggccttgaggcaggcaaaggtgcaatttctaagtgatcgtgtatcctaggggacaaaatttgtcccagaaaaatcatgaagtaggcaaactcccctgggcttcagtgaattcttttctaaaattaagagattaagttctaaaaatgcaagaactccaagatggcttggagttttttatacactgtatacctaccttacagggatgcatgcagggtgcttggtacagggcctgacacagagtaagccctccatgaaaggggtcggtgataatgatgctgatggtgatgatattcttggttgcccagtatcccctatctacacctttcttccacctgcagtcacctactgcaatatcttccctgtaccactttaatatttttgttgttgttttctttatttttttaagctgtacacttttattgaactggtcttgtcaggtttgttattttttaattaaaatctattatactcttacttacctgagccacccttagttatgatttaaaaaaaaacaaaaaaaacagggccttgctctgttgcccaggctggagtagtacagtggtgtaatcagggctcactgcagccttgacctaggctgacgcagtccttcagcctcagcctcctgagtagctgggactacaggtgcgagccaccacgcctggctaactttttttttattattattatttttgatgtaccactttaaaaacaaagtcaaaagaaactactgtagatctcacattggtagagtcaatttgagacccttgcctcggagaccagaacctggtgtaactttctcttaacaaaggttaatagccagtggggggtcagggttggaactcaccgaatctgcatcacatagaatcaggtacctctcacattcacgaaagtgaattatttttaatgaattgtgctgacagtatgcctcttgcaaaaagaactagccctagattcttttctagctatcaagatggaaaacaaccacatcgttaattcagacggaggggtaaaccaagttaatcagactccaagacccatactaattgttgaccaagtaatgccacagtattccatggctaaggatttccagcttgttccagtccctaaaaatctgttctgcacagttaatatttcacaaaaccaaaagggcttagttgcaagcacaaagagctagaaatcaggagacttgtggtttctattgagttctatcattatctgtctaataagataaataagtcacttctctgtaactcagtttccacatttgtgaagtgagggaagagaaacatgtcctaaaaaccatgcaggggctctggaaagaaaaagagctaagaatggtgggttttttataaaagttacacaaatgaatggtttttgtctccgtttttctgaaagtgggttaaaaatagcctccaaataaagctaaaagaatttatttagactaaattgcaccagagaagtagaggaattaagagatatgacaagcaaagatgggatgtttcaatggaagaatctcaggcagtaaaaaggctatgctgtaaaaccagaacttttgttagcactgcatttttaagatgaattggtcatagttaatgtattggatggaagaatttttaaacatctgccccaaagtatgctgcatccaaaaaatatataacaaaacgaattcttactcatttgtgtttattcttggacttatcctgacataatggggtttttttaattatagattcacactgcatttattcatcacccctgtcctctcatccataactcaaatttactaccagcaacacaaaatacaaagatgtgtccagtttcactacagctcttcgcgtttacaagtgtcgagcgcttgctttcggaac

SEQ ID NO: 42021 - DNA, 2300 bp, Homo sapien
tgagccttcatctgaacttttagtaccagaatcaaccctggacaggtctctcttcttggagcaaagcatagtacccccaaaatcatgacaacaatgctgtgttgcaggtattgctgttgtctccattttatagatgaggaaaactgaggatcaaagaaatcatgtaactttctccaggtcacagtgtcccactcacaccattttttctaaatgcagacctcatgctctacccatggtcaaggttgtcccactttttctcagggagtattggtcagcactctctaaaattcccagatgctcccccacaaaagagccttctgaatgttggccaaagttgaacacaaaaagagaaggaaagtaaattctccttttttgctctctaaagtgtaggaaaagttggtttcaaatgtccagtgaagagcattttaccctctttctgccaagagatattatcaatgaaagtattcagtgtctggagaaaaatcatggcctatgaatagtttagcgaacaggctttttacaaagaaaaagactggctgtctacgctgctaagctcatttttgttacaaagaggtagccactagccttttctacttgtttgaaaagaaaaatatttgagactagacattgggaatttttcatgtttagctgaaaggcaaaactgcaaatgttacctttgtggtgtgagaatgcagaggcccacctggacctgagggtctctgaggcacggtgggtgctcttttcatgtggacaatgcatgaacacccagaaatgattccatctgatattcaccattactgaaacaggatgcagtttctttgtgcccctcaaccatggctcatgttgctccttgtaaaatgtgcactgtcacgagtattaggcaattactgccttcggtgccacatgcttgcctaaacctcccttgtgagagaagagggaggtgcaagactgaagtactgaggaccaaccagaatttagcacagcttatagacatctgagtcattggcagagtcaagattaattatggttcaacacatgggggcttataacagttaacaccattgagacaggtcaaatcaacagctcagttgtgctttagccctgtatataagagtatgaatttagtactgatgctgcattagagagaagatgatgccatgtagaaataacattaaatgttgctctagcaacttccatcttaaaggcttagagaaggaatcctctgagcagctcattgaatttcatgggagactccgctgccattgcaaatgctggtaaagaaaactatgaagggatgcaggatggacaactgctttggaacagagattgtacagttttccgagacatcctttgtccacatgggaacccaatctcagtggcaggacttctgggtggatggacccaacagagcccattctaagaagctgtatatgctctgctgaagggcgtgtggggcgcacaagaaaaaatgtgctatcttacttttttccaaaggcattacctgtaaaattttggactatgataaaagcatttatcttcctcatgcttttattttcctccccccccccaacccccctgtacttagcactgttaattagaaaaaagcatagtgatacattagggcttttgagttatgcaattctcttgccatttttctttccttctacaaggaaaatctaatggaagtgtcagctgtgaaaaccttatgcttatttagatgcatttcttcccactactgaatacttgttttctataaggttacaaacatactattctatccctccaaatttattttctctgcaaatagcattgtctttctgttctgaatttgtacatgattccatcactaacttttttttattatggtcagttcctttaattctcaatattgtgatgttaaataatctaatcagcaggtacgggaagtaattgattttgttatatttagtgtttatgtgtgaaataatcacaatttcagttcaatttgtgatatactagtctcttatgtgattatgaaattttgctttctagttaaaaatatttcacggtatgttcacctttctttcttttttcttttttttttttttttgttttctttttcaggctcagaaatcctggatagaaagagcattttataaaagagaatgtgtccacatcatacccagcaccaaagacccccataggtaatcttgctgtctataatgttgagaacatgaagtagtaattatacaaaaaacctgcaagagtaatcatgacctgttacaagggaaacactgtcaaattaaatatcttttatattg

SEQ ID NO: 42022 - DNA, 2300 bp, Homo sapien
ctcccaccttctcatttcccccactttcctcctcttctccctttgtttctctagaaaactcaccctccacattataaaactttcttttccaaatcttccccactgatccctctatctttttacttaattctccttgctttgtctcttcctgagatactcatccgtaataacctcctattatcatatggttaagcttgacagttgaaaaaaaatattttctgactatataaaatatagttttctgactataaacatatggttacaggagaaaactttggaaaacatggaaaagcaaaaagaatagaataaaaattagctacatagttaccaccttaaaaatgtttcctacctatcacctctgtatctatttaaaatttataatttttccacccttactgttttatggcctgcttttttcacatagcaacatgaaaatgtttatttctctacgtaattaagcagtcttttgaaacctgattatcaccaccaaatggcatgaaatactgtttatttgattcatctcctgttgatagacttcatttgtttccactttttctgtattataaataacactgcagtgaacatctctgtgtgctcacatctctgatgattcctttggaataagtgcttgggagtgttacagctgcagagaagcaagtttatatatgtcattaaggctgtcaccaagtgttattctgtagccaactcctgaagacaggcaaagggacttcctccatcatgtgtttaaagctaaaactaagtttgatgtttcatttggttcttatttatcataatgtttccccaactgaaagtcactaggtagtttattgtttctttctctggggaaaccttgcaagttacagaccagaaaatgtgggagtttgaagaagattgaccctggaaagagcagagggctaaaaagatggctcaggaccgaattcaagtttgaaataagtcattcgtttcccagtattatgcttattgagtgtccacatgacacgtactaggcgcattaacagaggattacggaaaaatgaaaaccaaagccccattgccctcacagatttaccatccacaagaaaagggaagagtgccatctcttagcacttatttctgtgtttgggaagagaaaagtcctttggagatgaagtgctcatatactcactttttaaaaagtatttttgccttcttgaaatttaagctcttttatctcccagtttgttcacttatccaatcaagaatactattatctaaaatattcactcttggatgatatatgaaagagccctttctatgtgactgaataccagctggaatctctccattgggccaccccaaataaacatatcagggcatcacaacttttgatctgcatccataggccaccgtggtcacagctcacctctttttaataaggaagcaggactgtaggtttctaatcatacatttgcaattgctagaggggcagcaggataagaagtatgatcggagaagttttattattgacattttagaagttctcgaaggtccccgacaaactccaacttcattcttcttaggcccatgttcagggaccaaaatattctactgaaacattcagagattttagcagtttctctttaaagaaatgctaccattccattctttggggatggtggaacaatgccgcttgtgtgctccaaccactaggatcattcatacactgtttctttagaaggatttgctttccaaagttgaactttcagaactcagaacaccttatcacactttcacaagctttctctctgaaaatggaaaaagaaaaagggagggagggcgggggagcctgttaggacctgtgccagttaaatccgatctctccggggatttgtttttcttctggcgtcagattagatgttcaaatcaagcagtgtttgagggctgggagggaatgtccatgggattcttagtgaggctaatcccgaagcagcacattccaaggggctaatctgcccaagttcattgcttacttgaaacgtctcttgggggaagagccgaacaagtgactttttttttccagtgggcggtcataagagcattattaacggaatgaccagccctagctgcagcaaaatgaaagcaacaggagctgctccggggactgcttttgccagtacccagaatcagtgctcaggtaaaatgatttcagctaacttttctcttgttcaacttctcaatattggatctggggacctagaggaagaccaaagatcaacaccgagggaggcttggagggaaagggcaaaacgaacttatgaatt

SEQ ID NO: 42023 - DNA, 2300 bp, Homo sapien
gtctcccaccttcctctttaccccatttattaaactcatagtaactcacaagaagcattcagttttaatttgtcttgcttgacttcattacctactaccatatgtatgcatgcttaatgaaaattgtcagtgggcttccagctcagaatcagcacatgctacccagaagatggatcatggtacaggtatttagtatatgccaggcactgttctaagtgctttgccaatattagcttatttagtcctcacaacaaccataggcataagggtttattttaatctccattgtacggataaggactccaagacacaaagaaggtacgtaaatctcccaagactagcttcaaaattggaatttgaaccatgcagcttgattccagaattcatgctgttaactaatacatcaacatcagaccaaagtaataatctgaaagaaatgctgagcgtttcttctttaaagtctttaactcttatgtaagattaaattaccaaaaaacagaggcagtggttttattcctgaagtcccttttgaaagaaataggagacaagagaaagcttgtctttacagcctagtagactggtttcaatccagattccagttatactagtatgttagacttgttactaatttctctggacctcacttgcttaatctgtgagataagaaaatgaccataacacctactccataaggttgacatgggcataaacctatgcaatgcattgtgctaggtgatacatgtgagccgttattattttaatactgccttcaatcctttgtggaaatagaatagtaacagaaaatgaatcagctgtgtatgagatctattaaagtgatattgtttggtagataatcagagacataaattttactatacgaggtaggtcaatggtctgccttccacccgtggactagttttctgcaatatctttcttaaatttttgacacaagaccattgtgagtgaaatggtgttgtagcgcagtgtgtcaggtattgatttcatgctggggtgggcctgtgttgtcccggttctgaattacagcagtgtatcacatctgcttgcaccactcccagttcagctctgactgcataatagtcatggagctgggatttaccaatctcttcaagttaattagaaatggaaaatcagcatggtcacagaggaaaaaataaataagatggcgatgctccaaggatgtggggattctccccataggagttgtcaggtcaactgctcccactgaggtccgatgcctgggggtacatgggagccgaaggggggttgtgtcaggaactcccttctcatctcaccgtcccaacttactatgtgaaattatccaatttctaccttcaaattgaaaaactgtcctttaattctctctctcaccacaggagtcctaaagactatacattccaactcagcaactatttcatacagcctccttagaaaatgatgggggtggacaccccacttgaggaaaatccattctttatagacagcatcccatgtggcactttatgggttaaacttgtgttgcagagaagcggtatcaagtggctttccaggagataacccccatttaaaaactgccatctctaaaaggtgagccaaatgcccatgagtttaaactgctttgtatgaaaggaacaacccagtgtgtttgagtttgcttctgtctcagtgtctgtcatctatgcaaccgattatcaggatgaagactgtcaatcacggttaataaaaacctcagaacacgacacagatctcttttactatagatgtatttgatgatagcctcactttattatgtcacataaatcaaaagggaagcatttatctcatcattcggaggcaccccttctctccctgtgtcctcacccctccccccgtaccagttctcagtccctcaaagatgctttgtgcaagaaagtgcaagtttcccgttctggcttcatttttgttcccttttgcgatcctcctggctcccccccaaaccaagctagcaaagcaatggccccggttcccccccaacgcctgacctgcgtttactgggaggagagcgggagagggagcgcgcattctggagcaggctgctttgactccgaccacaggctgttttgtgcaggctgtccctcttcttcaaaatcgtgcatcccctccccgaagcagcaggcagtgtgcctccattcagccacatttggtatgcatgagcacggctgcagagagaggggaggtggctgttttaagaaggttcaggggctcaggcaaggctacttgactagtcttccaagttccaggaa

SEQ ID NO: 42024 - DNA, 2300 bp, Homo sapien
tcatgacagataccctttatggcagggtcattttccccttcatgggtggatgtgggtgaaccagggtctcttggccctgcacagtgaatgttcttggatgatgtgccttgatatatctgtttaggtatatcttgatatacctaaagagtgaactttcaaggcatccaggttaaaacacaggcttttcatctcttagggaatttatatagtcataccgatatacccctttgtaagcaactaaaggaaaaagtaaatgtttactttaaggaataatatgctgacttttattctaccccctagttggtatttggttttcatacctgtgtaattttgtaaactaagcataatcattttgatttgtttttgcgagggggaggaatctggactaaattacggtatttccatgaaatgtcactaataatttcaaatccatgaacttagatagggagtgagaaaatgtgaaatggagcctgtggttttctcattaaatggcgttgtgtgctgcaaacattgtttagagtcttattttgtttaatatgggtgtgtgatttctagacacagagggttgtttaaaaagataggatgtatgccctgtgagtctcttttacttaaaatggcaggattaatattcatgtaacactacacacaggggcacagctgtgggattttagagctctgtattccattcccgtaaactagccagtttcagaacctctgcttaatcacactgaccactgcaactcagattatgatttttacagctagtgccacaacaccaattttcccacagcatttctcaccctctccccttccctcttaatccttcttcacctttgcctcctgggaagatctggcaatattcaaataggacagagaatgcttgatttcagaaagaaatgaaaatacatctgttgccattgcaacagataagcaaccagacggcccttttcaaccgggagagattttaggcatcactccctttaatggtgagtaaagccattgttttcaggttttgttaatttgtgatgcccccaactgccctctctcatttgatcaaggacatgtggacagctcagtctggtaaaataactgacacaaaactcatgagggccagccggctgtcctaatgagcagaaggcaaaaacatgaaagaacaacaaggtgcaggggtcacagaatacacaacacacaggagctccaccacgaatccgtctcatgtcctcctcgctgcttaaccgcccagggtgagaggggaaactgaataccccattcctaccccggaaagagaaatgagttgaggtaaggagaagtaacagccttcccttcccaagaatcctcctctgccttaccgccacagtacaggcccttgaaggcccttaattgctgatggggatggagcagctagaatcaccttgggagcttttaaatatcctgattcccaggccacagccaggccaattaaattagactctggggaatatcaccatttaaaaaagagaaagagaaaaaagatccaggtaactccagtgtgcagccaagtctgagacccagtgggctagtctgagcaagctggagaagaaataagtgcggcatctgacaaggggatgaagctccactctccccaaggatacttaggagcgagttgttgttgcagagagaggggaagaaagggagcaggaagaacaaagttgccccttcctgtctttttctaagtcaactgcagtctccacccatccagtgcgggtaacctaggcttccacacgcagctcggggtggggggaagtgggtcccctggtctggggtcctgggcagggtgaggtgaccgctgggagcgctaccctgcggcgcatcaacagcctcaggcgtgggccctgcactctccagagaaggcggcggctgccgggtggagagcaatttggggacgcaaaagaaagctggctcgggcgcaggtggcgctcgcagccccagcccacagttgagccaatcgcgggcgcaagcgcagcctggtggcggcggcggtaacggagcgcggggctctggcaggagccggcggaggcaaaggcagcgccaaccgagagccgcgcgcaggctggagggagacccgcggcgaggagccagcgagagcgctcggcgctgggctgtttcccggccgagggaggcgaacttctcatggggaagaagtggagggatgcggcggaaatggagcggggctgctccgaccgcgaggacaacgcggagagccgcagacgcagccggagcgccagccggggcaggtttgccgagtcgtggaaaaggttaag

SEQ ID NO: 42025 - DNA, 2300 bp, Homo sapien
cgctcttacagagcactagtctgattggttttctttgatgtctctgaagaaagctgcacaggagagaaacctttctttttctgggttggtgagaccctgcctggaggcaaggagatgaactcagggtgttttctgcctttgccgcagatgttgatttatacacccgctttcatttaatggaaccattaaggaaggaacttaagctttccccaaattaaaggcctatctagctttagaatcattttccaatagcttatgctttatagaaccggatgccaataaattctatgaagtcactggattatttggatgtaacattaaatgtatatatgtcgttctgtcttctggcttaagacacttgtacagcctcaattttcttgcaggatttaaagatttttcctaatgttgaaaatacatgcactcacttcccctaaaacaatccaggacataaatctcaccacaagtatttaggacaacatggtagtcctgcaaggtaccccatagatttaagaggtaaaaccaactcattaacagaaaggcttttaagatactggtaatgctgtttcttgatctgcctctggttatgcagataggtttcgtttgcaaaaattcagtgtgtgtgtaacattttaacaaagtgttaagaaggtatggagcaactggcagtgacttctagggagactgagcacgtgtctatgtgtatagggttgcggggtgacctgtaaatgatcttatgggtaattctgacctattgaagaaggtcaggtctgcagggtagccgtgcttagactgctgcactaattttagattgtgtcaccactgctttagaaagactacagtaggccaggcacggtggctcacacctgtaatcctagcactttgggagtctgaggcaggaggatcacctgaggtcaggagttcgagaccagcctggccaacatggtgaaacctcatctctactaaaaatacaaaaaactagccggcatgttggtggcacctataatcccagctactcgggaggctgaggcaggagaactgcttgaacctaggaggcagtttgcagtgagccaagattgtaccactgaactccagcctgagcaacagagcgcgactctgtctctaaaaaaaaaagaaagaaagaaagactaccataaagaacccataccagcatgaaacttaaggtacttaatcttaagaaccatcgagacccacattaagacataccacacaaatttcaacttcctgtaggtatccttgatgactctgaaaataaatcaatctaatgttaccttttaattaataagagctactcagagccccctaaacactgatttgttcttgaaaatttttgtttcagtaataccggccaagagttcaggcacagtggctcatgcctataatcccagcactttgggaggccatggcgggacgattgcttgaggccgggagttcaagactagcctgggcaatgtaatgagaccctgtctctatgaaaaatttaaaaattatctgggtatgtgggcacatacctgtagtctcacctactgaggaggctaggacaggaagatcccttgagcccaagagtttgaggctgcagtaaactatacttgcatcactgcattccagctggggtgacagagcaaggaccctatctctaaaaaaacaaaagaaaacaaaaatagttgcccaggctggagtgcagtgatgtgtccacagctcaatgtagtcttgacctctcaggctcaagtgaccctcctacttcagccttccaagtagctgggactacacgtgcacaccaccagcctggctggttattttttgtttttgtttttgtttttaattttattatttttctaattttttgtggagatggagttttgctgtgtttcccaggctggtcttgaactcctgggctcaaatgatcctctcatctcagccttccaaagtgctgaaattaaaggcatgagccactgcacccggctggccaagaacatttctgattaaagtttttgaaagagtgagtttgtatgtgtacacacacacacacacacacacacacacacacagaaaataaatacattattaaatatattgctaaaggatatgcaacagaagttgaataaaaggagagactctgtttctgaatggaaaattaataaatgttaatttcatggaccagtttcatggaagataatttttccatggactggaggtggagggggatggtttcaggatgattcaagtgcattacatttacttagttaaaatataaatttgacacatttccattagtgtcccaa

SEQ ID NO: 42026 - DNA, 2300 bp, Homo sapien
gttcttcatatgattatttacatgtgatatagttcatatttcagtgaaagctcatttttctcttcctgacttaggctatcttacaagttgaccttgagtttttgaaaatcactgtgtaactgtggaatatttgctttcaactttctctaggctgcatctttccactttttaattccaatcctgttcttctggggtcctgttggttttgactgcttttacccagttacagtctctcagcctgtgggctatggtaggctccatctcctgtactcttccagcaggtagcgtgttccttcagcctttctcctcacgcagacattcctcctatatgccattgtctatgcactataaagataccaatggaaagaagatgcatttcttctgcaaactcaccgtccattgaggaatgtgggcatgtaaatcaagtcattagagaaggaaaggttgaatgctctcggttctatattcaatgtggcttttggattgcctcagaagttcagcctagagtaaccagtgacatcctgagagggtgatcctggagctaattcttgagaaacacttaggaggagatggaaaaagaagtgggtgagatgtcttacacagaagagacagtgtgcacaaatgcatgggggcatggtagaacatggcattgcgtgtttggggaaaggcaagaagttcagagtggggagaagggtggcgagattgacttggggaatgaagtcggggctcagttgttaagtgcctggttagcctttaaataagatgcaactcatttgccctcccagtcccccaccagccagtgttatcagcttaaaagttttattgtcataattgtctccaatttttaatttttctttctttttctttctttctttctttttttttttttaagagacggtgtatccctatgttgcccaggctggagtgcagttcacaggcatagttgtggtacactacagccttgatctcctgggctcaagtgatcctcccacctcagcctcacaagtagctgctgccaccacacccagcattgattttcaatttttgtttagacttaaacaactacctggactttcattctgtagatgatagaacttccagattcccacttgattttccacaagaataaaaagaatatccacatttggaaggatagtctggtgacaagttaatgattaaaagtgtaaaaagatggaaaatactttctgatctgggtatttcaagaatcctgaggtcctaattctttttattagattggtgcaaaagtaattgcgaattgcgggttttgcctttttttttttttttttaatgctctcagtcctagagatactcagtgtgccatttgagctgatttatacctcataatctcaactttgtactgtttattgacctcattaaaatgtgaattcttcatttctagtaatcaatcacacttgatcaagtttttttagaatcttgacttcctttggtttggaaggactgggtttgctgatagagattgaactgctacctggaagttagactttttcattcatcttggcagtgggaagataattcagaatgggtgggatggactgttcattttgcctggttttggccctaatatagaccgaaggaacccaggtccatctgctcttcataaatatcacaggaattgatttgagactttatcttggccttagccaaagaagtcacagttcctgtttttattatttcagttttatgccttaaccaaaatgatttatgaatgagaacaacaaaaagaatgaaccacactaatttaccaaatcctaaactcaacacattatgtataaagtgttccaaggaatttttgagccaaaccaaatttcatccccccaaattacctatcgaactaattcaaaccagaaatcagctttgatatgttccacaacaatggaagcagggtatgacatatttcctaaagtgttactgcatttgacttaggacccttgaaggatagaaagaaaacagaaataactattcattttgtaatttatgttttaaggaaaagttactaattggaggaatatcccttttggccatgagctgatttgaggaattttgtaagtttttgagaataagtctaactacatggattggtttctgttttgtgcaggttactgtttttgtatctcaaagccaaaagccacaggcatggccacagttactgttcatctcagggatgtgaaagagtcaagatccaagcagccacagactcaaaggacatcagtaactgcatggccaaagcatacccacagtactacagaaagccgtcagtg

SEQ ID NO: 42027 - DNA, 2300 bp, Homo sapien
aaattccctgtgttgggaggctgaggcaggagaatggcatgaacccgggaggcggagcttgcagtaagccaagatcatgccgctgcactccagcctgggggacagagtgagactccgtctcacaaaaaaaaaaaaaaaaaaaaaaaaaaaaaaaaaaaattccccgtgtcctgggattctgattctgaagtgtcagagaatgggagcagatgataagttgtcaggatcatcttggggttatggaatgaagagaatgtctttttgaagtgagtttcatgttttctttgttctaatattcttttttttccttgctcatatcaaccagaaacccctcagttcctgcacatgggtgagatcatagacggtgtagacatgagagctgaggttggaattcttacccggaatattgtgatccaaggagaagtggaggactcatgctacgcagaaaatcagtgccaattttttgattatgatacctttgggggacacattatggtaggcaaaaggatttgattatttctttgaaatcctggttgctaaatatatgtttgaagaaactgtcaagttttggaacaagatataaatggatattaaaagcaaatcatgttttgtttctcaaatgacaatgaggaggttttagatgattaaaatagaatgttatgacttcagttagttgacctggacctctagttaaaccatttaagaattgttccatgaagagtcaaatcaatatattgggaagaaccaattacagagaccaaaaaacaaaacaaaacaaaaaaaaactgaaggctcttggttggtatccatgcatgcgatttctgaaagaatcaattagtttttttaaaaagcatagtattaccaaagggttagcaatactagcaagcacatgcaaaatatgttcctataaaaatattttttgtatgcaaatttttgttctggaaaaattttgagcacttactatatgctaggcagtattctattaatatatactaatctgttggacttctgggctgcattttggctacatgtgtttttaaatcactttttgtgcattgagtaggctgtggttgtaagtagtatttctgttacaaggaattttttttttttttttgagatacagtctcattctgtcacccaggatggagtacagtggcatgatcacaactgactgtgggctcaatatcctgggatcaagtgatcctcccacctcagccccgccaaatagctgggactacaggtgtacaccacagtgcctggctaatttttgcatttgtttttttgagacaaggttttgccatgttgcccaggctggtattgaactcctgggctcaagcaatttgcccaccttggcctcccaaagtgctaggtgtgagccactgtaccccgcctgttacaaggatttctgaaatgtcgatcagtactattcccttgttgttagtaatacgattgaaaatctagtgtttaaatatattgagagtgctcaaactttggatcacagaagaacttttaaaagtaacttaagccaacaatattatgtgctaactaaaacactggggaggatctagaaataaataactatttatcagactctgatggaggttatagaagtgaaagaacaagacgagactgggaatgaccaaaatatttgaacaaatcaaaacacttagcagagatcattattgcagctttcctgattacatttgcctttattcctaattggaggctatttttgtggctctttaaagtatttgcttttgtaaagaagcatttcctaaattattaactggcaatctgggaaaacaggatgcaaaagaaaatcgaatgttttaataagtattctcctttggatgttttctactagaacaatattttttgctacttccctattctgaaaagtatgagtttgattttagtaccttgacttacagataatgaaaaattttacttcagtccatctttcttatgtggaattgaaacacatgggtcagcagcagatggggcgataccctgttcattttcacctgtgtggtgacgtggattataaaggaggatacagacatgcaacatttgtggacggcctgtctattcatcacagcttctcaaggtgcatcactgtgcatgggacaaatggcttgctagtaagtagcctcgcattaggtcaacccatattattgaaatagttaactctctttaattctcatgtcttctcaattttatatatgtaaactgtttagccacatgccttgctctatcctgccttttctgagcattccacgatttttctgtctgaaggaagc

SEQ ID NO: 42028 - DNA, 2300 bp, Homo sapien
gtgctggcattccttgccttgtggaggcatcgcttcaatctctgcctccacagtggccagccctcctctgtgtgtgctaaccaccccctttccccttataaaagtacatgtgactgcagttaggacccatcttgatcatccagaataatctccccaactcaagaagacccttaattgaatcacatatgcgaaggccctgcttctgtctatgtaaggtaatatgcacaagttccaggacttagaacctgttatctctggggagggaacatttttcagcctagcacacgggtgacacagtttctatctttattaagcacaatccaaaacacctttggaccatgaaaacagtcttttgtcccttccatcttgttattcaaaactatgttccttattttaaaaacctttcctccctgcctatcccagaagggacagcggctctcaaaggcagctgggtgaagtttctgtaagatctcagcactagctcgcgctgctgttttggaggcatctttccaaggctttaattaattagaggatgcattctagccctgtttcccaaacttacatattcccgatacctctgattcagtagattgcgcgacgtctggcaatccaattttttctaagtgccccaggggattcttatcatcagccaagatttggaaacagtaatttcttatacaaagtcctgaactaatacccttgaaataggggattccccttcactgccgggtgtgtcgcggttacaggactgagtttgttgagggaggaggaatgaacaaccctgaaaactaaactatcctaccttgtatattattcactgaaagagtttcctggagggaaaacttccaattccaattaaatcgaggatgacgacggcccggatttggcagtcctgcagctgtcactagctcgggacctcgtgcgtctgagtgatccagcccgggccgcgccctcacccagagccaaggctgtgagagcagctccagcgagggggcagggtggcggcggcagggctgcttcagggccggtgccggtgtcctcagagcggcgttttggcactggggtgggccggggcgtggctttcggcgccacctctgcaagcggccgccactccagagtggcgcaggtagggggcgtgggaagacctaagtatatttattccggcctgcgagcgggatgctggggttgctccaagggaccagaagagctgccctgtgtcccagagcaggctggttcttctgacagcgctgagaacctggcgctcgcgcctggccaggtaggggctgtgactggacgctcagaacatttgtgggagtgtggaaatctctttacgggtgatggggctcaaagtctgacgcagccgagggttgatggggtgcagtcacgctcagccaggggactttgggggcgcagtgtcaggctcagccagggagtgacaggcgcagtaccagccttatctgggggtgctggaggcacaggctccggttcggccaggcgggtgtgcgcgcccaggaagggtaggagcctgcagccgcagcggggggcgctggctggggctctgccccgccggcagtgcgctcgggcgctgttccagcgcgcggcagcgagtggcgctgagcctccgctttcgcagctcgcggggagcggggccggcgggaggggccgggcggggccaccgcctcctctgatggcaggctcctcctctccctccgcctccctcgctctccaccgcccgcccgcccgcccgcccaatccacagttcccggcccagccgagccgggctgcttgtctggccggcggaggctgagcgcgaccctagcaagccgcggcgcccgccgaccagggacaagagcgactcctgggaccccactctgccccgcgccgccgcctcctcccctgttgtcgcggggacgctcaggcccgcgccgcccgggccacgattctcctcctctttctcccggaggggaaggaacggagaaagccgagcggcggctccgggagagagcgagccgaggcccctgcccccgaggctcggggcaggaggaggaggaggaggaggaggcggaggcggagggaagtgcgcgtcactctcgggaggagagtatttcacctccaggcagaggctgcggctgccagttgagtacgagcggcagctgcgggcgccggcaatcgagtggcttcctggccatggagaggagatctggacccgaggacgccagggactcctctccgtctccctggaccgctgtgtaggcacctgagttaacggacgctaagcggggtaggggaaggtaagaagc

SEQ ID NO: 42029 - DNA, 2300 bp, Homo sapien
tactagcaatcatgacaattttcaaaatactggctatcattagatgtcacccaactgaaattcatgctataaacatatgtagagaaactctttacggaaaaaagttcattttaatgtaaatttccctgttaatctaaacagattaacgttattacaacatgtatctggctttctactccgactcattaggtattatagtttcatatgttggcacaagatctccaaagatttattagaggcataaaaaaattccaaatgaatcatctatagatcaagcatcatatatcacaaaaagtattaaacaggaacacatttcataaacagcgaaatttaaaggtcaccctctgtattccgttattcatccttttgcttaccaaatctacttcacactgacttaaagcatcatttacaaaaaattctcttctggcattggcagagatctcaccaaagatcaaagatctgaactttttttttttttaaacaaaaaccccaggttaaatacactctttccttcacgagagcccccacacagtacaatctaatttgacataactttgtttcggggttaaaaaaaatcccaaacaaaacctttaaattttccaattcaaaaacgattcctgataagcctaccttagagttcgaaaacaaataagattaaagcccaaccatctaaagaaaaagaaccctacgacagccccaccggaatacacaaatcgccaagccccgtgcagattcaatctaaaatcgcgcccgacagagatataaggacattcaggagaaagcttttaggcacccgcgaatctctcagtgcgccagtgaggggaatgggaacctgaccccatcttttcatccactgagagaaaagcaaaggaaatgaaatggaacccttctcttcaccgaggaggaccaaagaccttcttagagtgtcggtcggtcctccctcccccaccccctgactccggccgctccacggaccgcagggactgtcctaccgctccccttcacgcaaccatcagagaatcctctcaaaaacacagacccgatgaggagtggcttccccgcctttcccctgtgccgagaagggatcccggtcgccaacaacaaagacgcttcccgctcccctccccccgccggcccgggctcgtccctcccgcgctgcggctcccggcctagcgccccctccccgagccgggctgcggcgtccccaaaccccgaggccgcacgcacctgcacctgagcggcccgggccgaagcgccgggcagaaggggtcgagagagaaccgcagccgacgcgctgtcctccacaaggcgagatccgcgctccgggcgccgtccgactctctccgcctgcagactggcccgacagaggagcggggaccagggctacagcccccggcgccggggcgaagaaggacggcggcgccccaggggccccgctcacgctcccgagtctcgcctcgcgccggccctgctcctccacaagagctcgcgttctgctgactaacggccccggtgcggggcgctggagcggccgccgctgcccgtcggttgctctcgggcctcacgtcccgcgcggccgtggtcgcagccgccgccgccaccgcctccctttctggcactgcagacgccacccagacctagccaggtcttccttctctttaatcctgctttctttgctcctcctcagcctgccaagcgcgaggctcgttccggtagcgggaggaagactggaggggaacggaggggacgagcacaatccccactgagccaggagttggccactgactggaggaaggtgccaaagctgaccccggctccagcctactagcgggcggggggagagacggagcccagccttgcctcacttccaccaatcagaggccgcccggcagggtgggaggcgctctgagctcaaggagaggctgagctcgctcagcaggaggcggggattgcggaaaagaagaaccaataggaacaaaggttccccgcccctttgatttgatggactacacattcgggccaatgggggaattctcatttcgaagaaagtgggacttgttctccgggtttgagaaagaggctgcgcggagccggaggggtcgaggctgcgccgcgtggagtggcttggcttaacagcagggagggcagagcgatgctctttgacctcccagaagagtcacgtgggctgacccagagccggggcggaaaggctgcgtttgtttcttccgggtcattgacagaagcgtcaattcctgggagtagttcgttggttttctttcccctcatccttttgcctgctc

SEQ ID NO: 42030 - DNA, 2300 bp, Homo sapien
aatatttgtagaataagcaaagaaagaaagaggaaaggaaaaggagatcacaggttaccaaaaacagatgactttgctttcccaatcaatgtcgggaaattaatcacttattgaacacttactatgacctaggccatttatgcataatcatatagtttcgcctcccaacaatcctgacaaatttgcatttgagaccaaagtaaggctcagagaaattaaatattatacaactcactcaagccgcacacctagtaaatttgagctccataacttttgtgaatattaggtttatctgagtgatgctggcccctaatatgcccctgttgtcaatgattttctctccatacagctatggagacagggagagagattcacagcaaagagcaaattagtagttttttgtttttgttttttgagacggagtcttgctctgtcgcccaggagtgcagtgatgtgatctcagctcactgcaaccaccgcctccagggttcaagcgattcccctgcctcagcctcccgagtagctgggattaccggcacccgtcaccacgtcggctaatttttgtatttttagcagattgggagtttcgccatgttggccaggtcgttctcgaacttctgacctcaggtgatccgcccaccacctcggcctcccaaagtgctgagattacaagcgcccgccaccacgcccggctaatttttgtatttttagtacagatggagtttcgccatgttgaccaggtcgttctcgaactcctgacctcaggtgatccacccgcttcggcctcccaaagtgctgggattacagcactttgagccacggcgcccggcctgcaaattagtacttatatacaacccaagtcctctggctatctagacagtctgaattttttagcaggactttacagaagtcctgctaaagataaacagcaaaacaagtatttttacattaaccaaatatttttatcttcaaaacaattgttacaaaacagaaatttcacacaatactagtgaggacagcctaagacagcttaatcattcacatttcctctatgggcttggggtttttggaaaaaaaaatcgtagctgcataaacttggtgtaaaatttgaaaaagccactcatgccacaatcctcgtttccctctgctaatgtgatccagatgggaacgctgaacgacgtaactgccccatctgcaccttagatttcattagggtcctgttcactctgtgcaattagttaagtgtgctgaccatcaaatatttaccaggagacaacatgtccaggtcaaagaaagggcgtgagaataacattttagaaagagttgcactgcagccaagactaactctgggctgcggtccacactcgccccagccgactcctctcatttcctctctcccctctccagtgagccattccttcctggagtcaaagacggtgcaacaggcaggttcctaccttggtctgcacacttttatcgaacttgtcatttttgaagctaaacgtattctggtgcttctgaggtctggaacgagccacgttgcctttctgggagctcatcgccgaaatcaaagccacccctcgccgggagcaggcaaaaggatgaggggaaagaaaaccaacgaactactcccaggaattgacgcttctgtcaatgacccggaagaaacaaacgcagcctttccgccccggctctgggtcagcccacgtgactcttctgggaggtcaaagagcatcgctctgccctccctgctgttaagccaagccactccacgcggcgcagcctcgacccctccggctccgcgcagcctctttctcaaacccggagaacaagtcccactttcttcgaaatgagaattcccccattggcccgaatgtgtagtccatcaaatcaaaggggcggggaacctttgttcctattggttcttcttttccgcaatccccgcctcctgctgagcgagctcagcctctccttgagctcagagcgcctcccaccctgccgggcggcctctgattggtggaagtgaggcaaggctgggctccgtctctccccccgcccgctagtaggctggagccggggtcagctttggcaccttcctccagtcagtggccaactcctggctcagtggggattgtgctcgtcccctccgttcccctccagtcttcctcccgctaccggaacgagcctcgcgcttggcaggctgaggaggagcaaagaaagcaggattaaagagaaggaagacctggctaggtctgggtggcgtctgcagtgccagaaagggaggcggtggcggcggcggc

SEQ ID NO: 42031 - DNA, 2300 bp, Homo sapien
ccagctaattttttatttttagtagagatggggtttctccatgttggtcaggctggtcttgaactccaacctcaggtgacccgcccgcctcagcctcccaaagtgctgggattacaggcgtgagccactgcgcccggccaacttatataaaaggtttatgtttttgttctgataatttcgtttctatgaacttaccctaaagaaaattttaaacacaaataaaattataatgaaagatccccaaacacgaggggattattaaataaattatagtaactctatatggttgaatattacaggagctttaaaaatgtattcttggccgggcgcggtggcagtagaatcgctttaacctgggaggcagagattgcggtgagccgagatcgcaccattgcactccagcctgggcaacaagagcaaaactcgtctcaaaaaagaaaagaaagaaatatttaatgacaaaataagtactcaaaatatgaagttaagttttaaaaagaacaggctacaaagttatagctatggggtgatacaaattatgtatgtatgtatatttgagtataggtactaacatatgtattaatacacacacacacacacacacactcatttacatttccccaccatttgactaaaagtgcatacttgagaacaccctttgtcaataataatacatctatttcttcatctctgcaacttgctaggcaaaagatcatgttaatctagacttttagctattaataaatattattttgcaaatctttgattcaatattaatgaggatatgggggaaagtattcatcctctgttggtgggtagaaacatttctattttttttttttttttttttttgagacggggtttcgctcttgttgtccgggctggagggcagtggcgcaatctcggctcactgcaacctctgccttccggtttcaagcgattctcctgcctcagcctcctgagtagcgggaattacaggcgcctgccaccacgcctggctaatttttttgtatttttagtagaaagggggtttcaccatgctggccaggctggtctcgaactcttgagctcgtgatctgcctgcctcagcctcccaaagtgctgggattacaggcgtgagccaccgtgcctggccagtggatggcaaaatttctatagctactttcaggggcaatttgataggccttgggaaaagcaatcccaattttcgggatctgtcttagagaaacaatttgcatatgtgcccaagtccatatacacacattacagcattgtttgttattttaaaaaaaagaaggtatgtgctcatcaaccaggaaatggataaatatgatgtatccataccagaaaatattatatagcaatgaaaaataatgaaagttttttcaaactttcataagaagactgacataagaagatttttaacatatttttgaatgaaatataagggggaaaataatatgtagagtattatattattttgtaaaagtaaaagagaaagtattattatacacaatcctatgttataagtgttatgatgaaaatgcacagaagaaaaagtacccttgaataaactttaggaaatgattaaaaaaaaaaaagatacccaacatattgataatgtggttacatttggaggagacactcactgggtttgatgggaacatagtcaaaggggattttaacattcttaatactttcattttttcaaaaataatgtatattaatttggtactatatattaatttggaaataaacttttttaaaattcaaattgctttctgaatgcactaagtgctgctttaaagactatatggaatttttttaaaaattaagaccaagtactttacataataaatagatagtatgcccacaaggcaatctatttctgaattacctaatctttgcatagtgaacatagcaatcttcagccaaatttagttagtttaactactgaccaacttagccttattatattaatttcatgagtaaggaaattaagttccaaacagatcagagtgttcaagtgaaaaaatattcacatttactcggtcagtttttactgtttaaactgtttggaatctagtggatcagagtgtcgctttcagttgtaacggacttcatcacatcacaaattgtactcgttctcatccttttaagaaagttcagacccaggaaaatttccatagtaccttaatgaaaaagataggtaggtcatgaacaactgaaatattatactttacccaatcttacaatttcttcccttcattttaataagtattaactatcgttaactatca

SEQ ID NO: 42032 - DNA, 2300 bp, Homo sapien
agctcactgcaacctccgcctccggggttcaagcaattttcctgcctcaccctcctgagtagctgggactacaggcacgcatcaccacacccagctaatttttgtatttttagtagagatggggtttcaccatgttggccaggatagtctcaatctcgacctcgtgatccacccgcctcggcctcccaaagtgttgggattacaggcgtgagccatcgtgcccagccagaagccatttttgaaagcttaacattgtggctatatatttctcctgttgtttttaataactgtataatgttctatcaagtagatatattctagttcataaaactagtctctattttttttttttgacatttaggttttcattaaaacctaatcatcaaaaaaattattaaccgtatctgttttaggaaagtaatacatctgttggaaacatctgattgaatcctatctcaaaagccattttcttcacctttctgtctgaggtttttgtgtatacaagggaatgttttcagtgtgctggctgtcggtactgccaggagggagtgcagttggcagaatcaggagaaagtgacaaggagcagggacaagtgtaatgacctcagctgcagagattcctaattctggatccctggtagggtgatcaaccatctgtgtgcatggttctgacggttttcctgaacggcctttcagtgctaaaaccaggaaagtgcctggtaaaccaggatttgttggtcaccttagacattggttatgggggagctgaaggaactgagaagggaacgaatcatttctataagccagccctgtgtcttaaaagcagcaattcagagaaaaactgctcacacactgcaatgaaaccctcaccctttatgtagttgtcaaaatagttatttgtctcaggttatggctctgctcacagaaaaaccatccattcatttattcaataaacatgtatggaacaccggcattgttctaggcataagacacattccctgctcctgtggtgcttctgttattggtgtgtgtatgtgtgtgtgtgtgtgtgtgtgtgtgtgtgtgtgtgtgtgtgtattggtgagagggaaacaggagtaaactaaaaaacacaaaataaagaagaatggacacaataaatgcaatggcagaaacaagatggattagtggagtagaaactgctgggagtccggtgccacttggtggtcaggaaaggtgactccgaagagcctgacatttgagacaaatcagtggtgagaagagctgccaagtaaagcgccacaagagggattaggggcagaaggaacagcacgttagagggccctgaatggaagccagctgggtttcatggaggaacttagtgaaggaccctgtggtcattgtgtagggtgggaacgctgaccctagttatgacccagtccaagctccattttcataagtggggatgataagcacactgaggcccacgtgtcttgtccacagtctcttgattcccaattcagcacccatggtaccattgctgcctatttgacttgagaacttaattttctccctttgtacaactggaagtaaataaaagagattcattcattttacacgagaaaaattggtattggaattgtttgcggacaaacacaagaaccaaaaacattagcctcaaggtgaagagaggaaccttggcgtccacaatgacacccagtttaggggtccccagagatgttcggtaagacatgcttccagaaccttccaggtgaggaccaatactaattctgcagtctacataaactaaaaatgaaactggtcataaggtaggcagccccagctgacctttcacctgtgcctgaactaatgcaagtacaggacctgagtgctacaggttgaagaagtaagtgatcctaggagttgaagggtcagaggagccaggctgacacaactcatagaaggtggaggaagctgatcttctgagcctcagctgtggttgatcttgataactcaaagagttaacacaaccaaaactaacgcaagggtggagagaaagaccacaccccacgggagcgcggagccaactcgcgggagaaaaatcctattggcattgaggaggtagggagccagcccctgggcgcggcctgcagggtaccggcaaccgcccgggtaagcgggggcaggacaaggccggagcctgtgtccgcccggcagccgcccgcagctgcagagagtcccgctgcgtctccgccgcgtgcgccctcctcgaccagcagacccgcgctgcgctccgccgctgacatgtgtgccgctcagat

SEQ ID NO: 42033 - DNA, 2300 bp, Homo sapien
attacaggtgtccaccaccacacccagctgattttttgtattttttagtagagatggggtttcaccatgttgaccaggctggccttgaactcctaacctcaggtgatccacccacctcggcctcccaaagtgctgggatgacaggcatgagccaccatgcctagccatgtttctttcctcttgctgcttttaggattctttctttatccttgatctttgagagtttgattactaaatgccttgaggtactcttctttcgattaagtgtgcttggtattctgttaccttcttgtacttggatattggtatctttctctaggtttggaatgttctttattatccctttgaataaactttccatccctatctcttttcctacctcctctttagaagcaaatctatgagttattgaatttgtgggtttttagatcctataggcttgcttcattgttttttattctttttatttttgtctcctctgactgtgtattttcaaatagccttttttttttttttttttttttttttttgagaacgagtctcactctgttgcccaggctggagtgcagtgtcgcgatctcggctcactgcaacttctgcctcccgggttcaaacaactctctgctcagcctcctgagtagctgggattacaggtgcccaccaccacgcccagctaatttttgtagttttagtagagacgggttttcaccaagttggccaggctggtcttgaactcctgacctcgtgattcacctgcctcggcctcccaaagtgctgggattacaggcatgagccactgtgcctggcctcaaatagcctattttcaagctcacaaattttttcttctgcttgatcaattctactattaaaacactctgggccgggcacattgcctcacacctgtaatcccagcactttgggaagccaaggcaggcagatcactaggtcaggagatcgagaccatcctggccaacattgtgaaaccccgtctctactaaaaatacaaaaattagctgggtgtggtggtgcaggcttgttatctcagctactcaggaggctgaggcacaggaatcacttgaacccacgaggtggaggttgcagtgagccgagatggtgccactgcactgtagcctggtgacagagtgagactccttctcaaaacaacaacaacaacaacaacaacaaacaacagtctgatgcattcttcattatgccaattgtatttttcagcttcaggatttttccttgattctttttaattatttcaatctctgttaaatttgtctgatagaattctgaattatttctctgtgttatcttgagtttctttgagtttcctcaaaacaagtattttaaagtctctttctgaaagattacatatctttctctctcctggattaatccctggtactttatttagttcatttggttaggtcattttttttttcctggaatgtcttgatacttgtagatgtttgtgcctgggcattgaagagttaggtatttattatacttgtcactatctgggcttgtttgtacctgtctttcttgggaaggctttccaggtatttgaaaggactttggtgttgtgatctaagctatatctgctttagggggcaccccaagcccagtaatagtgtggttcttgcagactcgtaaaggtagtgccttgatggtcctgaacaagatctggaagaattctctggtttaccaggcaaaaagactcttgttctcttcccttactatctcccaaacagtctctctctctgttcttaaccacctgaagctcggggtagagtgacacaagcacccttgtggccacaatcacccttatggccacaatcactatgactgtgctgggtcagacttgaagccagcacagcactgggtgttgtccacagctttctgtaatcactccctggctactgtctatgttcactcaaggccctggggctctacaatcagcaggtggtgaagccagccaggcttgtatccttcccttcaggatagtaagtcaccgcagttccctggcagttctagaggtgccgtcagggagctagcgattagagtcgaaagacttagaaagccacctggtgttctattgtactgtggctgggctgaactcaaaccacaagatacagtccttcccactcttccttcccctttttgaaggtggaggagccttaccttgtgtccactgccaccacaggtcccctggaagtcctgccagactactgcctatgttcccttaaagcccaaggattcttagtcaacttgtgaattctgcctggcctgggata

SEQ ID NO: 42034 - DNA, 2300 bp, Homo sapien
cgtgccagagaattacgtattgtgttatttgttaaactttagaaccacaaccaatgcttaatgctgaaaacctctaatcagcattggattgttcagacttaaagctatgtttgtaatagtaacagttagtaggatggattgcaaattaaatagaaacatacattgtaattgaaagctctttaaaaattccccagatggagttaaaaggtaatcacttgatgagttcattgggaaaaaatggaaaaatatttattaaaattattcaattactagaaccctctctgtccctaaagactaatgggggatatcaacacaaagtaactcattcaaaggtattataggccaggtatgtggctcacgcctgtaaccacagcactttgggaagccgaggcgggtggatcacctgaggtcaggagttccagaccagcctgaccaacatgttgaaaccccatctctactaaaaatacaaaaattagccgagcgtggtgtcgggcacctgtaatcccagctacttgggaggctcagataggagaattgcttgaaccgggaggtggaggttacatctagtgccattagaatttaataaatgttaactgatggaaaaacttccaaggtagggtgtggtgatgggagtagagaaagcacatgtttttcctattaaatggtaaatgtccaatttggggttaactggtaacttcagagaactgtgagtcagttgcgttcacggaggcctagcattttgcacaggcaactgcattaagcaaagcaaagtgcatgcattttgttttcctttgggtatgtctgggctttgggaagcagatttcttgcatatcagtaaagtgaaagagtttgttaattttgaagttccttatttcaagtcatttttgaaaaatattttactattatctgtttttcactccctgtgtagatttttatttgtttgcctttttggttcctgtttaaccaacccaaagttagaattggctgagaaaactcttactagcaagtaatgttattgtcaaataaatagacttagggataatgtcagccctagttagttggggtcaccctgcctcttaagatctagaggacataggctcaatcccccataccaagacttgcggaagtccaactcagtcttcaacaattccatgcattgccagagggcttacattctcatgatcagttctggcttcaaactcctattttgctgaatttgttgagtttagagataatcttttcattgcctcttgtgttccttattctgtatcacctcaatacaatgtagatcctggccagccagccagcctgccttcctctcctcctcatccttcttcttctcccccatcctctctcttctcttgtctctctctctctctcactctctctctctctctcacatacccacacccacacccacacacacacacactcacacaggcatttttatatgtagtcaactttgctggagtttgggaaaggtaaaagtagtttgcataaaatgtaaaaaacatgaatacaatattcatcatccttgtccttgttcttaaaaagcaaatctttcattccttttctgccacaattcgggctccagcctccctctcttccttttcccctcctttctatgcccactctcttttaagagaagaaaaaattcctctcattctcttacaggggacaacttagccctcccagaaacttactgggtcattttgactgcaagtgacagaaaacaaagttcaagctgcttgacacaagaggatctactgagccttataacttaaaagtccaagggtggatcttgtttcgggcgtgggtagataagggagctcggccgtgtcagcagatctgatttctgtctcagtgtgttggctccacccttcctgattctggctccctgtctcagcaaaactctccttgctttacattgggcctacccctaggcctgtcagtgtgggctgggaatgcagcacgctcattggcttaggcctcattcccatcatccaaccctggctccaggaggatgggattagtgtgactcaaacacgtggaaaggagtggttcttctgaggaaaaccagctgaagtattacagaaagaggaaatgctgcagagacccagccggaaacagtgctggccagctcacgcctgacccacccttattctaagcatagggtctgcctctgaagagctaaagacttcctgaaatttaaaaattagtgcttttatttgcttgtcctgctaagaccgtaggcaaaggccatcctcctcccattgacagtttagagtgggtaagttcgt

SEQ ID NO: 42035 - DNA, 2300 bp, Homo sapien
aatcacctggaggacttattaagccacagacggctgtgctaacccccagtttgtgactccacaggtttggtgctggggcctgagaatctgtatttctaataagttcccaggtagtctggagaccacattttgagaaccactagaaaatagctgctaaaaaggaatcttggtatgtttaggtccaatacctgcaacattcttgattgaaacagtctcagagaaaattataaatgggtgatagagaagatgaattatcagaaggtgacataatattatggaatacactattcaataatgagcttgcctcattacccttagactttttttaaagtatgcttcttcaggaattatcttgtttcactcactataactccaattctagagaaagaaaaaaattcaagttaaaattcaagttatttttgttctcaataataatcacctccattgcctccctgcccttcagtgccctgggcaagcctttttagtcattgtttctttatctgtagaaagggacatgataatagtacctatctcagtgaattgctgtgaggataaaatgagaccctaaatggaaaatagttggcactgaaaatggcctgtaaatggtagctgctattttttttttttttttactaattcatctgctaatttaaggaaataaattgcagtggtcgtgggaccagtgacccaaactacttaaatctctaatacattaattgatcacagtaataaacccgaatttgttaaaaaacaaaacaaaaggttgttatgctccaggtactttgctaactgtggcggagaactgtttgatttggcagtggtggctcaagctatcagtatagcattcccccaaatacagattataaataaggaccacctgaagcgcaatatgggcccccccccacccccgctcccaccccggaacaaccaaaaccatatccaggggagatgcgtaggaatctttaatcaccccaggtgattttttttctgattaccaactttgagaaacactgaagggacctcttctccattctatatgtggctaatataaaccctaaacatcatttctatgtattcgttagaccgttgtttactagaaaatttcagaagtcctttccgacttagtaattttgttattttgagttgaactgaaattcacttggagcggtcagttgaaaatgttttttgtttgtgctctgaaaaggttcccagtgttccgggtaaagtcatcctttcacccatgggggacctgtgcctcgtgcctgaactgcccgcctagtacctccccccttgaacttcctctcgcaagcctcctcctcccgcttcatctgggcctcgggtctagcttgttttgtcccttcgcggcttttgagtagaacatttggtgctttcccagttcacgacgctttgctggaatcgtcaatttccagggatttcacaggctggccaaaacagtttgttcagaacagcgccgccggggcattggcagccctgggcggccgcgcgtttcctcactccgcacaaccacccgtgaccttgggcgagcgaacgcacgccgccagctgcgtcagggccacgctcgggctggacttcggagctcaaaatgggtgtggggagtgaggaggtttcataaacagaaaagacctcgaagccataaggcaattcttttccttttctgggggtgaatccttacgattcttgggggagggaatgtctgcccagggctggagacaaagcgtgagaactaggatggcgaaaaacgggtttgaatgagaaaatccgaaggagggaggctgagggcggacaattgggttaaaaatagaaacgcatcctccacaggactcgctcttcccagctccaccctaggggccgactgccaggccagtggctgggctccgcgagaaggcacagcaacccgtctcggccccgcctcctggacctactgacagggcaccgggggcgtggccttgggcccgcgacgtcaccgcgctccccgccgccgccgccgccgccggggttttcgctgacgcacgggtcccgccccctccccctcttttccctcacagcccgggcgccgggcggcgagtgcgttagtcggccgggacgcggagctgtgtgcatctcctacgcgggctcgctcgctcccgggagccgcgcagcttccccggcggtggcaggagcggcgaagagcgccatcagcgggcccttacggccccaggcctcgcggcgcgcggtccgctcgccctcctcgtccgcccaacctgcggcctgtggaggcgtgaggcgacgacaggcgagcg

SEQ ID NO: 42036 - DNA, 2300 bp, Homo sapien
catggtgaaaccccgtctctacaaaaatacaaaaattagctgggcatgatggcaggtgcctgtaatcccagctactcaggaggctggggcaggagaatcacttgaacctgggaggcaaagactgcagtgacccacgacagtgctactgcattctggcctgggtgacagagcgagactctgcctcaaaaaataaaaataaaataaaaaataaaaataaaaaacaaatgaaaaccaaccaaacaacaacaacaaaagccaaaaataaaaatgcctgtgagagatttcttagagtcactcattattagttcatgctcccagtagagatatttcttcaatcaagtcccagtttcctcctcttttattgcattctttcgtgaagaaagcttaaagaaatgaattcttgtccttggaaatgagggaggactatactatgctttctctagaaggcactactgtgtgtttgagcatgtttttcaaataattagtaggtgtgagtggttctgccaatagacatactacatttattttcagtgatcacttgaaaaacacacctataagcttataattgctgacattaacaaacaacaggtatgaagatgctgttcacaaaaagtgcatgtagttccatgtgttttatttagtctgtttgaaatgaagtttagcatatctatagcacacagcatgaaacatgtcagtcattttgaatttaacattgtgcataatgtattcataagaattatatttatttattagcatttatcttcaaatcaaaggttaaaagtttcaagatgcacaaaaatggttaactttctgtgagaagtctgagaaatcactgaagacatgaaaatgacaggctggaggaagaagtaaagaacctagaaggccaaaatggaattctaagataacatgaatatagaacatagaaaagagaaaggattgattgaaaaaaggaaaggggaaaaaaaaggaattattaaatggaaacattagattcaagtaaacccaaaacaatcatcaaagtagatgttaacagcattttgagtacatgttgtgagtatgagaagtgcaattctaaatgttaggcccttatgttttaacatatcagcaaatacaatattttgtttctaatttaacaaatttttaagacttatgttagttgtgacatatttccaataaataattatgtttcccaaggacactgggtacaataaagtgggtctgacaattaacttacctttgaaacctgagcccttcattagttacaggaatagactggaacatgatttttcctctcctgcttggagaacccacaagttgtgttttctttatgaatattggaaattctttcttttagccaaatgaagggtgtgcatttcttcggccaggagttaccaggctgataatcctgatgcagcggttctcaaagtctcctcagaaggcccgcagtagcaccagcagcaccaaaggacttgttggaaacaccagttttctaggccgggcacagtggctcatgcctgtaatcccagcactttcggaggccgaactcctgaggtcaggagttttgagaccagcctggccaacatggcaaaaccccgcctctactaaaaatacaaaaattagccgggtgtagtggcgggcacctgaaatcacagttacttgggaggctgaggcaggagaatcacttgaacctgggaggcagaagttgcagtgagacaagatcacaccattgcactccagcctgggcgacaagagcaaaacctctgattagaaaaaaaaaaacaaacaggcgccgtggctcacgcctataaccccagcacttcaggaggttgaggtgggcggatcacctgaggtcaggagttcaagatcagcctggccaatagagtgaaaccccgcctctacaaaaacatgatggcgcgcgactgtttcccatctactcagaggctgaggcgggagaatcgcttgaacccggaaggcggaggttgcagtgagctgaaatcacgccattgcgctccagcctgggtgacagagcaagactccgtcacaaaaaaaaaaagaaaaaagaaacaccagttttctgatttcaccgaagacctactgcctcagaaactatgagggcagaacccagcaatctgtgctttctttcacaagccctccaggagttgctgaaatttaggaatcattgccccaaaaagtggccctcataatgatgccaggtaaggaaagacaacattattacctatgtgtggtgtgttaacattctttatgaaacatgtgtgaagacctaaatcgaagactttctc

SEQ ID NO: 42037 - DNA, 2300 bp, Homo sapien
aatgaagaaggccagctcttttccaggaattaaacattatgaccgtaatttgcctttagagtatctgcccatttagtgaatcagagaaaggaggttagacatagatcatttagaatcagaaaatcattggtcatgagttgttgctagagtctgttcccgttcataaaatgcttatgtgtatgatgtgacgtcattttgagcttgggcattttcaaagtatgtgcagatttaggctgtgggaagtgtagacttcccacactgaaacttttgcagaacagtatagatcaaaagaattaaaatatgtctttataagcatagaattttctaaaaaatcttggacagcaaatgatataatctacttacagaaaaaggttccaaataacattctgagtatttcagaagtggtaccaatagagacgggactagatattttaaagactttaatatacagtcatgtcataaaaacttgtaaaatataagtaatttagcagagggcttttatttatttaaaatgaaaaatgtaggaacacctcaaagcatttactaagtttgctttcaaaatggtctcataattgtaatagtacatagaggtaacattatcatgcagctttggtccattatttatattggttatgtttttgtataaataaaccatattaaaggatgggtagttgattatcaataaaataactattctttgtaagaacctctttaacatatattttagggaccctctgagtcctaggggccaatgaaggtaataatggagattcatgagtaactttacaaatttgataaaaccaaatttaaatttgccttgcataagtttgcacaggataagccaaattttctttacattagtctaaaattatagcatgctgattttgtattatgtcatgctgagatttggatcctgttggtcatacttatataatgttttaataaaaatgacaaaaatctaatagcaattgttttctaaatatagtctggtagttattataattattcacaccacgaagtccacaggagaaaataggaaatgtttagtggtgacagtttgagccgggtatttgggaaaggagatagtcaccagagttacctaaaatcggtatttccctattagaaaattagtacatgttttggattctttttattgacttcctttagccaaataatatcatcataaggttgccaaacatccaggaaataaaaagcacatgtttcctacttttcatgtttctattccttcttctttctctctcccccctctccccacccctgcattattctcttgtctctgaaattatagcccattctttcacttttgaaacttttctacgttggcttccataacattatgtcatgtgttctccatttgtttctctgagttccttctgtttcctttaataaaactcattgtatgtgtttatgttttcggccttaaaagtttacatttgccaaaattcaatatttaggcctaggcccatctcagggaattcatccattctaactgattaaactagcccatatgctgatgattgtcagattagaattttcagtttgaacctcctcctcaagcagattattttccatttcttttggaaatcttgttgtgaagtgcatcaccatatcagaatcagttaccacatagaacaatatgtgttctctgtgtagagactgatgtaaattgccaccttcactataccaggaaacagactgttactactggcacatacacacactcagtcacatgcctctcttgagaatgtgaattgaatattttccctgtcattttattgagatcaaattctaaacgtgcataaaatagtcatttttagtcttaaaaaagatcaaagaagcctagctcagaatcttccaaaattctggcaaaaagcaataataactttaaacaccattaacctagtttctcccttgtgcctccttgtagatgaacatggttatgtccctcctagggatgttctgtccaacattgtttgacttatttgctgaattagaagactaccatcctctcatcgctttgaaatggctactgggacgcatttttgctcttcttttaggcaatttatacgtatttattcttgcattaatggatgagattaacaacaaggtaagccttgtttctggattgtccttgccataagagtgttgttcaattcccagtctcaagtttgccagaaatgcctttgaaatctctgttgtcttcattttagtttctatctctttgctttctagattgaagaggagaagctagtaaaggccaatattaccctttgggaagc

SEQ ID NO: 42038 - DNA, 2300 bp, Homo sapien
cctgtggtttctaggcagaaaagatctgcttaagtgaggttagggctaaagaattatggatgcataaatgatacttagtaaatatttgctgaaattaaatgggcaggtgtggtaacctgtctccaaagcaactccttttgcctacattcaggaatgcctggtataaagggactgttcttacataattatccaataaaatacaattgagaatgatcatataagaagtgagatgacaagccaagtatgttatgaagccttgagctttcatcgcctggacatcaaataaaccagtatttgaatccacaaacaactgtgactctgggagaagaaagcagcaaaacacagctgtttgggcatggccagagcgccactctcaagttatgtaacagctgttgtgtaattgtgcatttaactcaaaacacatttttgagagagaaaacaattagactttccaaaaagaaagaaacagagaaatgttgaaagaacacagaagtttctatctggtcatcaaacataagacacgggggagtcaaaggcattgggaatgatattgccttagaatctagggagttggcccgtgcaccaaatctggcctgccttctgtctttttaaataaagttctataggaaaacaactacacccattaatttacctatcatctacagtttcttttaaatagagtcaagtaaattatatcagaaaccatccagcccagaggctgaaaatatttacagaaaaagttttgcaaattcttgtcttagatgaataaaaagttatgtttaaatgcctgtaagggtgactattcactgagaaaaccaaagcagttgatgcttgaacccatgtaggagttctcttgtggagaatagggtagaaatagtaaacagaaataagagtccaggtttgggagtcagactggcctgaaatgaaattctggtcctgcactaatagatctgtgaccataagtaagctactcaccctctgtatgtctctaaaatggggatatgaaatgagggtagaaagggaaacaagtgctgcacctgatttgggcaaacaattcagaaatttttagtttccctatgtaagtcccatattcaggggaattggcaagtttcactagaaaaaaaaaaattggttgattctccacaatcagagcatccagagtattttatcttgttcctattgtaacgtttgctagagctacaatacaataaagtattgtacttaaaatgggagtaacactgtttaaaaaattgtccttcagctaaatattaatttaagaacttgaattgtttggaagccctgcttaaatttagtctttgtacactgcctatgttgataaatacagacaacttccaaaaccaggattactttcattttaaatgagtattaatagatgatattgccatatttctaattgtggtgattgtgtgtgacagtgtgttccgaattccctaaaagtcctgctggcttttctgttcacatatagaaaataaagataatttagggcttctgagatcacagtaggtctacttacccagcactgaaaatacacaagactgatacgatattttaaaactaacttagggtagggtgtagataaagggcctttcttccccaaacagcaccttgattttctgggagatggactgatttcctgaaagccttgtcctgaagacacctggccagcttctactgagaacaagtgcccttttagactcttttcaatcctcaaattctctgattccaagtctgtcagagaacagaaagttacatagtagcattaaaaagcatgagaagtcaaaaaaataataactggccttagtggccagagcagctgctgcatacacttatcacaggtttcggctttgtaaattaattcatctgcaaatagtgcactgtctccaggtacaaattcgatgctggagcactggtttcttaaggatttaagtttaaagtcaaaggcttcctgccctaggtgttacaaataagtagtgtcgttttctttttttgctctgagtttgttcatccaatcgtatccgagtatgcaaataaactttagcccgtgcagataaaaaaggaacaaataaagccaagtgctctatcagaaccaaattgctgagccagtcacctgtgttccaggagccgaatcagaaatgtcatcctcaggcacgccagacttacctgtcctactcaccgatttgaagattcaatatactaaggtgagtaaaacttctattttctgctttgactcgggtttgcaaaaactgcatttatgtaaagcattaaaggtcaatttaagt

SEQ ID NO: 42039 - DNA, 2300 bp, Homo sapien
aataaattaccacaaatttaatggcttaaagcaacacatatttaacatctcagtttctgtgagtctaggtacaacttagcttgggtttcttctcaggatctaataaagcttaaggtgtttgccagcctgcatacctttctagagcttgggatgcccttccaagtttatgtggctgttgacagaaattagttccttgtggttggaggacgtcattctccattttcttgctggctatcacctagggactgagttcaactactagagggtgctcacggctccttgccacatggcactcacaggacacagcagctcacttcctagagatcagtatgagaatctctctgaccccagggtgggccccaatccctctctttaaattactcacctgagtaggccaagcctacctaggataatctcccttttaattaactcaaaatcaactgattagagatgttaattttatctggaaatgtcctttgccataaaatgtatcatagtcatgcaagtcacaccctatcatatttactatcctacccatacccaaggagaagaaatcatacagggcatatacatccagggccgggtatcccagggatcatattacaatcatgactaccacacaaggtaatatgttgaacttactcaagctagtttaccctgctctctccactttttctcttagtttgaatgcttacatttctgagctgaacaaaacagagtggtaattttgccacacaggtgaagggcttaaatttccattgacctagaaggatcatgccacacttgtccttattctgtttttagggtgttcactgtaatcatttcaaacgaccaccttaagaaaaggcttttgaaaatatatatatgagtcattttatagttatagtaatattgttttatgacattagatttattttggggggttgtttcttttggcttgtcctctgtaagttattgaaatgagtttaaatccactcttggtcatctgctacattaataatattgtcctcctttatggcatatttattacacatatatcaagagacacaagtcactctggatgaaccagaaggctacaaaagaaatagtaagtagctaaaagaagactgaaaagatgaaccaataaagaagtctctgtctctctttctttctcaatactaaatgtaaaccaagtaaaactcctcttaatttgaaatgtgatgagatggtttatttcataaacaaaatccttaatatcatctggtttaacacatacatgagattctgaagcatgtctagtcagtcctcatcaggtccaagagatacaatttatcccaagtaaattctgcacattggtggagatttggaattggcttccctaatctatccagcaaatcataaatactatgctaggccttaatgttaggtttttggatcataccaagcactttgtttgatctctccatgtctgcttctgctcctagtttgggaataaatttcaggtgttatgtatgaaaaagaaaaagagataagaacctccaaaattatctggcaccaagatacagtttcagaaaaaaacagtcaagccttttcaatccaattaataacctcttcatggtataactcttatattatattattaaaaataacctgatctataatactgaaaactgacttctattgggaaatgatgagtatgtgaggaatggggtataaggaagaaaagaggatctaatcattttaccacaaaatgttagaaatgcgaaacaattatgaatggaaagacctaacttcataacgaatgcccaggaattgttttagagacccttttttttttaacttaagtgttctgaactcttcaaaatagaaataaatgctattttataatcttctgtgctaaatgcacgtggggaaaagaaagagagatcagatatttactgtgtctgtgtagaaagaagtagacataggagactccattttgttctgtactaagaaaaattcttctaccttgagattctgttaatctatgaccttaccctcaaccccgtgctctctgaaacacgtgctgtgtcaaactcagggttaaatggattaagggttgtgcaagatgtgctctgttaaacagatgcttgaaggcagcatgctccttaagagtcatcaccactccctaatctcaagtacccagggacacaaacactgcggaaggccgcagggacctctgcctaggaaagccaggtattgtccaaggtttctccccatgtgatagtctgaaatatggcctcgtgggaagggaaagacctgaccgtcccccagcccgacac

SEQ ID NO: 42040 - DNA, 2300 bp, Homo sapien
attttacttgttcttttatttccataaatctactcgacattattattatgcggagaaaaagattctgacagattattcacagcaatatacctacatgattagtggctttctttttgtgttatgtttgggagtttcacttgcctttagtgttacagctggaagttaattttggaaaaacattcttttcactttttttttcttaattctgctacaattatcatatttattgttgctattttaggtttgcctatgtattacaaatccaaacatataaaataattccattcagtttatggcactggtaatagcagcaacaaagcaaaatgagactatacatgttttctaggttgttatattttataaaaagtaagtggaattttttcttcatttcacaagagcatcactgtgcaggaatgttccaatagttccattaccagagttaggaatacaaacgcaaattaaagaaaaaaagaaaaccagattttgtataatcatcttattccttctcacctgatgacataaatatggtattagaaagttagtctacatctgtcaagatcaatttgcaataatatcaattaacttaacttgttagcaggtaactaattaattttcaacttacacatatgatagtaaaaacatatattgacattttcttaaatatttagattagatgatcatcctacttcaggatatgttgacttcattgatattggcatcgagcacttagaatgtattataaaatactgccaatctttagaaagtattttcattaacttcctaaacttcatgttttttatgtgaaatatctatgaggaaaagaggaaaaagaacaaaccactaaatgcagcataaattgagccataatgctgtgagattttacacctgtgcactttaatggaaacatcatataatactttgtagggtttaaagaagaatgaaaatgaaccactatggaagttaccagaaccaattttcctccattgggtgggaaatttcttatggaatgtgttctgtaatagttgctgctccattaatcctttcattttataggtctagttccttgttttggtgttcaactagtctacaatgtcaaagatgtgtatcaaaatgtatatataactgatctatattacagtttatatatatagttctatgtaactgactctatttaaaagaattaatgtagataggccttctgatgtcaatgcttttattgaatgtcataatgatcaaatttttggcattacctttgttcaaaattttgagccaatctggaactttattacttctatatttcttatttataacaacaagctatatctaggaacaaaagtcgtttattttttaaggcaagaaaaatataaatagaaaattattcggcactgtgtaatgttaaaatttacaaatatatgttatttctccattgtcacaagaattctagtgggtagacaacttagataatgctcctatatacaaaagtaaaaacagctaggcatggtggctcacgcctgtgattccaactcttagggagacagaggcaggaggatagcctgagcccaggagtttgagacctgcctgggcaatataacgagaccccattctccacaaaaagcgggggaaaaagacaacaaaacaaaagtaaaaacaggttcagaaaaattaagtatgtccctaaagtcacagaataataagtgatggaggtggaattcaaatgtaatattttgtttgttggtttgtttagttttgaaggtaacatactttttagtctacaacctatttaactacaaaagtgtgccaatcactggtattaggattggggcagatgtatactctgaaaataaaagtgcaaaataaatatcccatctggaaataaaagtgcaaaataaagagggaggaaaaatcagcccttccatttcttttcctttgtaatgccagttgaattggtttagtgagtagttttgcaagacttgtttcactttgtttttggacatagctgagccatgtacttcaaacagaaggcagccaattactaacttctggttgctaggtgtggcttcctttaaaatcctataaaatcagaagcccaagtctccactgccagtgtgaaatcttcagagaagaatttctctttagttctttgcaagaaggtagagataaaggtaagtcttggttttccttttagttagttttggttgttttgaaaacttttctcatcactatgttaaatgttactgcttctacaggatttatggttagttgcatttaacatgataagtcattcataaatctttctgtag

SEQ ID NO: 42041 - DNA, 2300 bp, Homo sapien
actgccaatctttagaaagtattttcattaacttcctaaacttcatgttttttatgtgaaatatctatgaggaaaagaggaaaaagaacaaaccactaaatgcagcataaattgagccataatgctgtgagattttacacctgtgcactttaatggaaacatcatataatactttgtagggtttaaagaagaatgaaaatgaaccactatggaagttaccagaaccaattttcctccattgggtgggaaatttcttatggaatgtgttctgtaatagttgctgctccattaatcctttcattttataggtctagttccttgttttggtgttcaactagtctacaatgtcaaagatgtgtatcaaaatgtatatataactgatctatattacagtttatatatatagttctatgtaactgactctatttaaaagaattaatgtagataggccttctgatgtcaatgcttttattgaatgtcataatgatcaaatttttggcattacctttgttcaaaattttgagccaatctggaactttattacttctatatttcttatttataacaacaagctatatctaggaacaaaagtcgtttattttttaaggcaagaaaaatataaatagaaaattattcggcactgtgtaatgttaaaatttacaaatatatgttatttctccattgtcacaagaattctagtgggtagacaacttagataatgctcctatatacaaaagtaaaaacagctaggcatggtggctcacgcctgtgattccaactcttagggagacagaggcaggaggatagcctgagcccaggagtttgagacctgcctgggcaatataacgagaccccattctccacaaaaagcgggggaaaaagacaacaaaacaaaagtaaaaacaggttcagaaaaattaagtatgtccctaaagtcacagaataataagtgatggaggtggaattcaaatgtaatattttgtttgttggtttgtttagttttgaaggtaacatactttttagtctacaacctatttaactacaaaagtgtgccaatcactggtattaggattggggcagatgtatactctgaaaataaaagtgcaaaataaatatcccatctggaaataaaagtgcaaaataaagagggaggaaaaatcagcccttccatttcttttcctttgtaatgccagttgaattggtttagtgagtagttttgcaagacttgtttcactttgtttttggacatagctgagccatgtacttcaaacagaaggcagccaattactaacttctggttgctaggtgtggcttcctttaaaatcctataaaatcagaagcccaagtctccactgccagtgtgaaatcttcagagaagaatttctctttagttctttgcaagaaggtagagataaaggtaagtcttggttttccttttagttagttttggttgttttgaaaacttttctcatcactatgttaaatgttactgcttctacaggatttatggttagttgcatttaacatgataagtcattcataaatctttctgtagaattacattggatatttatattttaggaatcacaaattacaatatttttgttctacttagttaacaaatacaagtaaaaataagataagtttgcttaatactggctcattgtactcttggtaagttaccatgagaaagaagggaagaatgtgctttccctctggtagccttaaaagaatgtgtttttcctttccttccccttgaaatatttcttcccaagagctgtgtgttttacagagaaatcgtgatgggggctgctttttgggggcaagaacaaaagtgataggagtgggctgcagggaactgtttcaaaatagtaggactttcataatttattttcttcttttgtaaggaaaacaagatagattcagacctcaaagtgctaatcatgctctttgtaataaacatttaaaaatatatgttatatttgcttatgctatttaaaataagaaggtccgcttattacttttttcatttaaagagggtgtggccacattccttttcttgtaggctctgtgtcatatacagtcttttcaagtgctggctggaaaacctaaaaagaagggaaatactttctgggtagtgtcagatacattatcctaggggaatgtcagtgaggccctccaacagctattccacttgattgttgcatgagctaatggccataaaactccttagaaaagcacaaagcaaaactaaagaagagtatttactagtgttggatatatttgtaaaagtgagatta

SEQ ID NO: 42042 - DNA, 2300 bp, Homo sapien
ttggctttgagcccttaaccagctgtatgtgataaaatctgtttcctttagagcaatttcttatatcctgccttgatgctcctgtctttaatctttgctaagagctggtggtgaatttggctgaattcagattccgtttttctctaattgatttcttgaagaaaattctctattggttgcttttctttcctagattatgcttttagtctatccaaatacttcaggctagaatgtaggaacttagaagatacaaatcacaaagctgtctcctctagggatgctctctctttcaaataagtgacttaaacaacttatttttgttatcttgtgttatgtaattaatataccttttcctgggctttctctggctttttttttaaatggacattattcaagtattttttagaagtaaaaaaaaaacagtacagtaaagtttttataacgtttattttgaagttgtcagagacacctttaatattagactggacaatatctttagtctttcttttgctttcttttgaagtttttatttgctaattgaaaagaatggaataataataataataataataaataaataataataataaataatataaataaataaataaataaataaaataaataaataataaaaacatgtttttataagtgatggagtagtactttgccaagtgatgaattttaacactcattttgatgattcttccttatcaaagccttggatgaaatgatgaaaatggaaattttgagtgcctgaagctgctagaattgcttttaaagtattgggtgtgccaattaagaaggtggaatatgaaactccatgtggcaaccgcaattgcatgaaactagactgtaatgggaactaaaaccttgtgcaaaattgcgggttgttactttatcaggaagcaattttaagtctatcaattatatttaggaaacaggctgctttaaatgaatggaaaaagtattggttcttctcacagatgacagaatagtaataagagcaatcccatgcgaattaagtggggatgatttctgctttggatattattttcttcatgcattcagtgttattacttgcaactccagttactttttagcaggtgaaaatggaaagagtttgtctgaacatgctgttgaggaatcagtttatggaatcagtttatgcctcatgagtcatttatcttcatatcaagaatttaaaactgccaagattgtcctcccaacctctctcacaaacattcatgagagtagtctctagaggggtgaaacagaatggtgtagatagacagatcagtgtagaccttgagcaaggcctctgaaaaacatccccagactaaaaggatctgtgatggcattttgtgtgtgtgtggccaaaacagagaacacattaattttcaatatacttaagatcttaaaaatatatgtctcattaaataaaaatattgccaagtcatgatagcaattcaagaaatttcctttaagatagagtttgccaaaagaacatgcatgttacaattgcacctctaggcttcctgctacaacaaaaaaatccagtataaaataattcttttctgggttttttgtgttgggtgggaaaatatgtaggactactatttagacagctcaaataggaagaaatgtgaagatagcaattacttcaatgctgagtacttttatatcaagaaatagaaaaggaaactaaattattcagggagaaatatcacctggatatctttttacaattaaaattttaaatctgaattcacttgtacagattggcacaagttattttaccttataaatgtaatcattggctgggagtggtagctcacacctgtaattccagcactttgggaggccgaggcgggcagatcacttggggtcatgagttcaaaatcagcctagccaacatggtgaaaacctgtctctactaaaaatacaaaaattagccgggcgtggtggctggtgcctgtaatcccagctactcaggaggctgaggcaggagaattgcttgaacccaggagacggaggttgcagtgagtcgagatttcaccactgcactccagcctgggcgacagagaaagactccatctcaaaaaaaaaaaaaaaaaaaaaagcaatcattaagcttttcatctagccattacttttgtacaggctctcattaattccacatagatggtctaatggtctactaaatagtattctaatcctccatcttgtctatctcttagccattctccatgataaaggatgaatggtctttcggaaacataaatgaaaccatgctgctt

SEQ ID NO: 42043 - DNA, 2300 bp, Homo sapien
tattctaaaaaattctttgagtcagttgccttgattttgctaaagctttctaaagaaaaggatgttttgcatgtatcttagtttgaatttaatattcagtgtttcagaaatacaccaagtacagtaagcatgacatgaacaaagttctggacctggagttgaaaggtgacattgagaaatgcctcacagctatcggtatgtagtccagcagttgaaagagttttctaactagaaattgtattttcaaagctatcctatacttaacaagaacaacagcaacaaaaccaataaaagaaaacaaaaaacaatcagaagtagtgcatctgtttcaattgaagcaacgtaaaagattggcaaagtactataaccttaataacaatagatattattccccttttcaaaaatagagagagatagactatacttattgagcacctacttatatcaaacaatgtaccaggctgggcacaccacagaggcaattcagaatggtcactgagagcatgggatctggaataaatgtaacatctggataaatgtaacttcaagtcctggtctactgcttgttaattgtacaatcttgggcaggtccaggagagtctgattcagtgggtccgagttggcctctaaaaatcggtactttttaaagatctcccaggttattcagacaaccatcagggttggggaacctatgttctcaagcagtgtttctcattcatgactatgcacttgaatcccctggaaagcttgttaaaatgcagattctgattccccaggtctggggtggagcttagattctgcttttctaacaagctccccattgatgccaatgctgttggtccatagatctcgacaagatgaagaacactatgaactggaatgtgctagtattatttgggttctgttttatatttaagcccatcctatcccagagttttttcttcatttattcatttatttttacttatttgtttgtgcaactcttactttagacacagaggtacatgtgcacgtttgttccatgggtgttctgcactcaggcagtgagcatagtacccaataagtagttttttgaccaatgccccttctctccctgccctctctagtagtctgcagtgtctgttgttcatagggtgttctttttaaatgttcttatagtaacataaataaagtatttacataggcttgaacacctagtggcttctccactcccaaggagaatatatgttggatagcgcaaactactgaagttgctcttgagatgtatttaaggtaataaaaaaattgatcgtcagggaaaagaatattcaaaaccaccatctagagagtcacaaataccttctcagaagttaactgccctatattgggagatgagaggtgaagaatgatgatgagggatagaacactgttggcaaaattctatatttcctgtttctttcatatggatatttcatttttttcatggtaaatacatcaactaaaattttcttctctaacagtgaagtgcgccacaagcaaaccagctttctttgcagagaagcttcatcaagccatgaaagtatgtaccattctacttatatgtcctgcttagaggaagaattatttgtagaaagaacagaaaacctcatgttgtttgaaaatctcacatttaatatcttcccattaatgagaatcattgttctatttgatgaaagaggtaatacactaccttctcagaataaacttctgttagattcggtgcttttttttacagatgagattgtaaagtgagcctgtaagtgatttacggctcacttgtgatttgcttaaaacatgtgtcaccacgggaagggtgatgtactttcttttttaacgtgtaattttagtggcctacttcctctaaggttgtgagttttataatctcccactttatgagtctgatttgttgtttttattattctgtcttttatgccacagattaatagttgaaacttttgaaatgtcattctatgattaaggatgtagaatgatgtatttgagatcaactatgtcactttaactttactgtctgacatgcatggtattatacaaggtacctcttctattctgacattttgagcccacaaatgaatagttatgaagttatcttccttttttctttgcagctccaaaataaggaggttttcagagagagagagaaagaaagatctaactatttgaataatatgaaggaatattttgaatatatatgaataatttgaataatatgaaatgatagacatgctaggtactgctctgtagtggttagcatagttgctgcc

SEQ ID NO: 42044 - DNA, 2300 bp, Homo sapien
ggagcttagattctgcttttctaacaagctccccattgatgccaatgctgttggtccatagatctcgacaagatgaagaacactatgaactggaatgtgctagtattatttgggttctgttttatatttaagcccatcctatcccagagttttttcttcatttattcatttatttttacttatttgtttgtgcaactcttactttagacacagaggtacatgtgcacgtttgttccatgggtgttctgcactcaggcagtgagcatagtacccaataagtagttttttgaccaatgccccttctctccctgccctctctagtagtctgcagtgtctgttgttcatagggtgttctttttaaatgttcttatagtaacataaataaagtatttacataggcttgaacacctagtggcttctccactcccaaggagaatatatgttggatagcgcaaactactgaagttgctcttgagatgtatttaaggtaataaaaaaattgatcgtcagggaaaagaatattcaaaaccaccatctagagagtcacaaataccttctcagaagttaactgccctatattgggagatgagaggtgaagaatgatgatgagggatagaacactgttggcaaaattctatatttcctgtttctttcatatggatatttcatttttttcatggtaaatacatcaactaaaattttcttctctaacagtgaagtgcgccacaagcaaaccagctttctttgcagagaagcttcatcaagccatgaaagtatgtaccattctacttatatgtcctgcttagaggaagaattatttgtagaaagaacagaaaacctcatgttgtttgaaaatctcacatttaatatcttcccattaatgagaatcattgttctatttgatgaaagaggtaatacactaccttctcagaataaacttctgttagattcggtgcttttttttacagatgagattgtaaagtgagcctgtaagtgatttacggctcacttgtgatttgcttaaaacatgtgtcaccacgggaagggtgatgtactttcttttttaacgtgtaattttagtggcctacttcctctaaggttgtgagttttataatctcccactttatgagtctgatttgttgtttttattattctgtcttttatgccacagattaatagttgaaacttttgaaatgtcattctatgattaaggatgtagaatgatgtatttgagatcaactatgtcactttaactttactgtctgacatgcatggtattatacaaggtacctcttctattctgacattttgagcccacaaatgaatagttatgaagttatcttccttttttctttgcagctccaaaataaggaggttttcagagagagagagaaagaaagatctaactatttgaataatatgaaggaatattttgaatatatatgaataatttgaataatatgaaatgatagacatgctaggtactgctctgtagtggttagcatagttgctgccccctttctgccatagtctagtgtgatatttcgttgggtaatgatgaatacctggtgccatggaagagaaaagtgggacatatactccagactttggaaatccaggtagcattgctgtcagctaaattaacacctgaagtttaaatagaaatgagccagatgagggcaagagtggaagagatggggataaagcaagggtggtccaagaggaagaagtaacccacacacaggcttgaaggcaaaaggtaacataaccttctcaagacagtaagtatagagtgatggtgcacactggaagagatggtagaattaggcaggatattgtaagccttgaaaaagaattaggcaggatatcggaagccctgattagattctatcctaagagcaacagaagatcactgacagtgttttaaatagatagactagtttattagatttgcagtttagaagttccctttttttgtaattattggacagtgtagagaccggatggtgagagatgagttaggaagttgtgacagctctctatacctaccgctaatgtagaggattatttattttcatttcattaccattcgtgtaaggtgtgtgtgtgtgtgtgtgtgtgtgtgtgtgtatagctagtttctctatagaaattatatggaagagtaagaaggcttcactttaaaattcatgtttttaatgagagtattttctgaatatgagacacttaccctcatttattttggccagggtgttggaactcgccataaggcattgatcaggattatggtttcccgttct

SEQ ID NO: 42045 - DNA, 2300 bp, Homo sapien
aattgtatggttttaagtgtatttcttggtcttgatttcttttttttttttttttttttttttttttgagacagagtcttcttgctctcttgcccaggctggagggcagtggcatgatctcggctcactgcaagctccgcctcccaggttcacgccattctcctgcctcagcttcccaagtagctgggactacaggcgcccgccaccacgcctggctaattttttgtatttttagtagagatagggtttcaccatgttaagcaggatggtctcaatctcctgacctcatgacccacccacctcagcctcccaaagtgcttggattacaggtgtgagccaccgcgcccatcatcttgatttctaatttggttgcactgtggtctaagagactgtttttttatgattgtagttctattttatttgctgaaaagtgtttacttttggttatgtgattgatttcagagtatataccatgtggcaatgagaatttatattctgttctctttgagtggagagttctctagatgtctgtcaagtccatttgaccctgtgttgagtttaggtcctgaatatctttgttaagtttctgacttgattatcagtctaatattgtcagtgaggtgataaagtctcccactattattgtgtaggagtctgaatctctttgaaggtctctaagaactttccttatgaaactgggtgctcctgtattgggtgcatgtatgtttaggatagttaggtattcttgtggaattaaacccttttcaattacgtaatgtccattctttgtctttttttatctttgtttatttaaagtgtgttttgtctgaaactaggattgcaatccctcttttttctgttttcaatttgcttggtagatttttccccattcctttattttaagccaatatgtgccattgcatttgagatgggtctctggaatacagcctttcaatagatcttggttctttatgcagcttgccactctctgcttttcaattgggacattgagcccatttacattcaaggttagtattgatatgtgtggatttgatcttatcagcatgatgttagctggctctttttcagacttatttatgtgtttgctttatagtgtcactggtctgtgtacttcagtgtgtttttgtactggttgttaatagtctttctgttccatatttagtgtttccttcaggagctcttgtaaggctagtcaggtagtcataaattcctttagcatttgcttctctgaaaaagatcttatttctcctttgcttatgaagcttagtttggccggatatgaaattattggttggaatttcttttctttaggaatgttgaatattggcctccaatttcttctggcttgtagggtttctgctaagaggtctgctattagtctgatgggcttccctttgtaggtgacctgacctttctctctagctgcatttaacattttttatttcatttcaacattggagaatctgataattatgtgtcttgaggatgatcttcttttgcaatattatactggggttttccgcctttcctgaatttgaatgttggcctgtcttgctaggttgtgaaagttctcatggacaatatcttgaagtacattttccaagttggttccattctccccatctctttcagggacaccagtgagtcatagatttggtctctttacataattccatatttcttgaagtttttgttcattcttttttcattctgtttttctgtattcttgtctgcctgtcttatttcagaaagccagtcttcaagctctgagagtctattcttcacttggtatatttttcttttaatacttgcaatttgcattgtaaaattcttatagtgtgtttttcagctctatcaggttggtttatggtattttttctatactgagtatttttttctgtcagctcctgcattgttttatcatgatttgtagcttccttgtatagggttttaatgttctcctatagctcaaggatctttgttactatccatattctgaattctatttctgtaatttcagccatctcaacccagtcagaacccttgctatagaggtgatgcagtcatttggaagaaagaaggcactctggctttttaagttctcagggttcttgcactgattctttctcatcgttttgggcttatcttccttcaattttttaggttgctggtgtttggatttttttttctcttatcctatttgataaccttgagtgtttgattctggtataaggtggattcagctgactggcttcatttctagaagattttagggagcc

SEQ ID NO: 42046 - DNA, 2300 bp, Homo sapien
atcagaaggctgcagctccaggaatacgaagcaccatgttttgtgccctctcatcctgctcagttgtgtgtgactactgcaacatattaaaaaaagaaagcaggtatatgtaaatgtgtgtgatggtgtggtatacacagtatatgagtgtgtgtgtatgtgtatgtgtgttctaggcttgtactatacatggaatgtgtatgggtaggggaggagcagggtactgaaagttataatgcataaaactagaatttcggccttaaaagatagaattaagaattgagaaatatgagaaaaagtaaataatcatataagtatacattttaaaaatccatgaaacaagactttccatttacaattgcctctaattagtaatacttgacatactctctatccaagttatcattggggcacagatgaaaacagagttgagggtgaaagccaacaataccaccagcagcccaatgctagaatatgagtgggattttcatttactgtgaagcaggtggagatagattatgaaaaaaaattgtgaagtcttcaccttatgacattgataggctttgtcccatgaaataaacacaacctgagaaaaaggtaaacagacactttgtacctccctcacatatgaccttgaactcagagatcctgagtccgtgctaagcagaaattctgggcagttctcttttttgtttcctaataattctaatccacttttagattcacaaaattcaggcctcctcattatcccagatctaccacttacaactgcataacttggacaaaccccttaacttttctgagtcacttaacattttgaagatagtgtctatgtcattggtgtcaagagatttaagtaagtacagggcttaataaatattagcttattttacttttaagaaaaaaaggcaaaactggcacaaaaaaggcaaatattttattatataaagacagcatagttttattatttcatactactgtggcctgaatcatcaattctgtttgctgattattgccaaaagggagtgcagagaaattattctaaaactaaagtagttatttttggaagccattctattacttttaattggtatataaataacaaccgcatacaatgaattaccttgtttagttattttggtgcatattcactcacagtttattctggagggtacaccagaaaatagcactactgaaagcttagcattttatggatagtttatggatattttacttttgtccaggcaagcgtgtgattttacttgccttaaattcttcaggtataattatttctgtgatataatatggagtatatcttgggggttttattgcccatttgtgcaggcactgaagccaatttgaaacaatcttctgaacagaatcctggccccctggcataattatatccaagcagagacagcatgcatgcattcatactagatttcttagttatccccccaatatcaggcaactttattcctaacttgattatctcctagtaatactgggtctatgtagaaatggcaaaatcaaagtcatactcaagcatcactatgaagtgtaatctggagctgtgtaacatgtacatttagtcttacaaatctcgattcagggacaggtttttagaacactcagaccaaactgtcccatgttctaaaatatgcaagctaggtcagttgcctacacatctaaactgcaaccatttctatcctacctgttcccactataaggaattatttctactgcatcatatggtggtataatgtcatcagcatgtatggaaaacacttatgtatagctataaggaatgtcacatatctactgtgatgtgttacctaggatattattcagtatatcacaggtaattctcattatgagaactataaagaaaaataaacactaccagttgtgtctccctctgccttttctcaaccctcttctccttatgagtttctcaggctcaaaaaggcaggtgctcacactcccagcctctcttgcaggtttgaatggccatgatgacccagttctggccagtgtgacataaacagaagttgatgtaggggaattccaggaaagaccttccgcaatcccatgaaagccattagagcagaaattctctcctgccctgtacttccttccccacttcctacctttgatagttggaatactggcaggcatctcaccaccaagagaagacaaactaaaggatcaaaagcaacgtactgaagataggagagcaaaagatgaaaataacttggatcgttagtgatcctgaagggccaccaaataaacctttggat

SEQ ID NO: 42047 - DNA, 2300 bp, Homo sapien
tcttctaattaataatttctccaaaaatactcagaaggaattaagaaatatgttctaagcaaaattatgccttgctgaaaccacaaaataaagagaatataaaaatgtatgggggggtaaatactttttatacacgtgttgactacctttttcaaggattacagatattgcagcattaaaaaaaaattcagaattcaataaatgtttagaaagttaaaattacataaatgtttaaatttttggattttgaaattcctgttcactctaaagagaaatagaaatctaaaatgataacaacaacaataataattagacaatgtttacaaagcctttggaattttcaatattcttgtgtctctgcttgaagcaacaaaattaaaatgatatagtcacaatttgtctcttgactattttatattcagtaatttttaatgaagcaactaaattaggcataactttgtacagctttaacatagttatgatgaatatattttacttgattaaaaatgataaaaccagggagccttaaatattatcttaaaagattaactactgtgtcaattacaaatctaggagaaagatatttataaaggaataactattctaaacagtaacttccttttgttcatttcatttaattaatgactcaatcaactttcactcttaatactaaaattttcctaaattacacattggtttgcaaatgggatggcatatagcagggctacgtcaatttaatactggtgaaaattcagcagataattcatttttcatttaatcaggaaggaaaaaactacttggcagtgtagagcgacctaattaactaaataactgccaattctacattgtactttgtgttacatgacatatcatgaataaataccagtcaaaaatcaaattatttggatacttaaatgatgatgaggcctgctgtgccaacaggtatgctaatgagtagacatctcccagcctcaagactgagtgaatgaggcaaatattttcacctcccaatcttttagggtgttcaattaactcaagtatttaagaagttccctactattgggaaggaagtagatgtaatcatctatatgcttattttgtcaactgagttggaaaaacttgcaaaggaacagtttggatatatgtattagatttttatcaaaatacaaataaatggtcatagatgacaattttcacctaaggaatacaagtaagtttatctatgttcagttaccaatcgcctctaactaaagttaacaatgtcttccttctaaaacctttctaaagagcaccctgcaatcacaccttctagcaacagccatttctcttgaattagtaaggtggctacaccgccaatttgagctgttctccttcagtcctgtagtccatcgccaggggagtctccaaatgctaataaaaatcaatttcccagacaaaagaacatatacacgtttttttctttctttctttcttttttttttttttttagaagagggtcagggagcatctgacggacgtttttaaaggaaggggacagctacttccatgggactgcattttagttgtgctaaaagtgatgaaagtgggtttgcattattctaccaccaacacccaaaccacctgcccacggaaacccccgccggagaccgaagtttacccaaatagcgctcggcaaagcgctgccataaattcaaaactaactctgccgggcccgcgggggttgcgagacagggaccgaacgtgaaacccggggagccccgcgtctcttgcctccgaaggttttccgtgatcagtgtccccttctctgctggagtcggaagtgcctgtcacctgcggatctgcccgactctcccggtcggcccttcttctctgcccagttcggacagtctcgaattccccgtcgcagccccggccacctcggactccctggtccccagcccccgccccaccccccgcctccaccacgtcccctccccgcggtcccagcctctccaggcgctgctgggctctgattggcggctgcgctgacagcaggcggggcctggaagtcgcggccaagcccgccctcgcgtataagcccctctcagcgctctctctccatctctcccctctctttctctctcgctgctcccttcctccctgtaactgaacagtgaaaattcacattgtggatccgctaacaggcacagatgtcatgtgaaaacgcacatgctctgccatccacaccgcctttctttcttttctttctgtttccttttttcccccttgttccttctccctcttctttgtaactaacaaaa

SEQ ID NO: 42048 - DNA, 2300 bp, Homo sapien
aatctaggagaaagatatttataaaggaataactattctaaacagtaacttccttttgttcatttcatttaattaatgactcaatcaactttcactcttaatactaaaattttcctaaattacacattggtttgcaaatgggatggcatatagcagggctacgtcaatttaatactggtgaaaattcagcagataattcatttttcatttaatcaggaaggaaaaaactacttggcagtgtagagcgacctaattaactaaataactgccaattctacattgtactttgtgttacatgacatatcatgaataaataccagtcaaaaatcaaattatttggatacttaaatgatgatgaggcctgctgtgccaacaggtatgctaatgagtagacatctcccagcctcaagactgagtgaatgaggcaaatattttcacctcccaatcttttagggtgttcaattaactcaagtatttaagaagttccctactattgggaaggaagtagatgtaatcatctatatgcttattttgtcaactgagttggaaaaacttgcaaaggaacagtttggatatatgtattagatttttatcaaaatacaaataaatggtcatagatgacaattttcacctaaggaatacaagtaagtttatctatgttcagttaccaatcgcctctaactaaagttaacaatgtcttccttctaaaacctttctaaagagcaccctgcaatcacaccttctagcaacagccatttctcttgaattagtaaggtggctacaccgccaatttgagctgttctccttcagtcctgtagtccatcgccaggggagtctccaaatgctaataaaaatcaatttcccagacaaaagaacatatacacgtttttttctttctttctttcttttttttttttttttagaagagggtcagggagcatctgacggacgtttttaaaggaaggggacagctacttccatgggactgcattttagttgtgctaaaagtgatgaaagtgggtttgcattattctaccaccaacacccaaaccacctgcccacggaaacccccgccggagaccgaagtttacccaaatagcgctcggcaaagcgctgccataaattcaaaactaactctgccgggcccgcgggggttgcgagacagggaccgaacgtgaaacccggggagccccgcgtctcttgcctccgaaggttttccgtgatcagtgtccccttctctgctggagtcggaagtgcctgtcacctgcggatctgcccgactctcccggtcggcccttcttctctgcccagttcggacagtctcgaattccccgtcgcagccccggccacctcggactccctggtccccagcccccgccccaccccccgcctccaccacgtcccctccccgcggtcccagcctctccaggcgctgctgggctctgattggcggctgcgctgacagcaggcggggcctggaagtcgcggccaagcccgccctcgcgtataagcccctctcagcgctctctctccatctctcccctctctttctctctcgctgctcccttcctccctgtaactgaacagtgaaaattcacattgtggatccgctaacaggcacagatgtcatgtgaaaacgcacatgctctgccatccacaccgcctttctttcttttctttctgtttccttttttcccccttgttccttctccctcttctttgtaactaacaaaaccaccaccaactcctcctcctgctgctgcccttcctcctcctcctcagtccaagtgatcacaaaagaaatcttctgagccggaggcggtggcattttttaaaaagcaagcacattggagagaaagaaaaagaaaaacaaaaccaaaacaaaacccaggcaccagacagccagaacatttttttttcacccttcctgaaaacaaacaaacaaacaaacaatcatcaaaacagtcaccaccaacatcaaaactgttaacatagcggcggcggcggcaaacgtcaccctgcagccacggcgtccgcctaaagggatggttttctcggcagagcagctcttcgccgaccaccttcttcactcgtgctgagcgggatttttgggctctccggggttcgggctgggagcagcttcatgactacgcggagcgggagagcggccacaccatgcgaggtaagcgagtctgcgggcaccgaggctccccgagtccggccaactccagccagacggggagatgggggaggggagggcacccagcagaaagggaaagaggttgcccaggcgcagttcc

SEQ ID NO: 42049 - DNA, 2300 bp, Homo sapien
aggaatctatgccatatgtctccggtgattctgaggaccattccaagggtcttcagtccctgctgcccgttagaattactttagaagtgtttaaaattccagatgccttggccccccaccaaacaaatcaatgaaagtaagaaggaaatccctggacatcaatatttttaagctctctgggttattccaatgggcatccacagctgagaaccactaagttcggctctaccatgccaaaaataatcttgaatggatttcccagcctcctctccaccccttgcctttctccccatcaaaaagcagttctactacaatgtaagccagggaaaagtggagatgtttaagagaagacaggaataaaaggaggattaacaaaccatttgctttctgttcctgtgttaattcacttcggataatggcatccagctgcatttacgttgctttaaaggtcatgattttattatttttatggctgtgtagtatttcatggtatatgtgtaccatattttatttattcaagccaccattggtgggcatctgggctgattgcatgtttttgctattgtgaataaagctgtgatgaacacatgggtgcatgtgtctttggtagaatgatttgttttcctttgggtatatacccaataatgggattgctgggttgaatgacagtactgtttgaagttgagaaatatccacctgctttccacagtggctgaactaatttacactccaccaacttatatggttgcgtgtgcatagacttgttctgaaaaagaagcaaggaaatatcagtgggtaactcagtggggtagtacggagggctgagggttgggctaacacaaagagattaaaatttcccctttatacctttgtgtatgttatgatttgtttaatattcaaatatcacttttttaaattaaaagacaacctcttttttttaaaaaaaagccatttgtcataatagtgtattgtattttctactaaatgagtagattatagttgctcttggcacaaggaggaatgggtaattatgtgagatgatggatatgttaatttattccactatagtaaccattttactatgtacaatacatgtgtcctagaacatcatgttgtatattttaaatatacataataaaatttatttttaaaaaaataagaaaaggtttgtgataagtgattagtggaaagaaatcaagagctttcaaaggtggtaggggatgagaagagcaaagagaaagatctgagattcatcatgcaagcaactgagcaactctaagtaaagttaaataaagctaatacatatgtaggcattttgctttcatataaagaacatattttgttcccatggaagttaacgcaatttttacctattcatatatttatccttcctagcaaggatcagaaatttctgtctttgtttcttcatcattcttacaagtgggagcaccagggcacactggggaaatgaagtcactttagacttcaggtgtggggcccggtgaggtcacctggtgttaagtctctacactggtgctcaggctctcttgctgctgctgctcctgttaggtgtgcatattttcttagactataaactgctcctctgctgtattaactacttcatagacaactgtaatccaatatttgacagaataggaacatggtaataccttgatgcgatctttcatccaaaataatttgagacaaactaattctgaagaaaatttatgttgtacttttatagtcacagggataacttttgttacatgccatatgcatatcgaatctgtttccaaaaggatgaaaacaaaggggaatttaagtgcagaaattatatgtatctatataatttgggggtgggaacatcttgaagttgctgattgctattaagcaaatgctgcattctttagcgaataagtagcatcaaaaagaaaaaccaatattctccctcccaccttctgcgcctgagccagcctttcacccttacttaatgaaatggagccgttgatgcctttaactcctctttcatttaatctcattaatgcagcctgttgggattgaagttgtgggttaacgcaggggcagtcttcagacctccccagtgaaaagtatcatatttttcagttagacttttaattgctacgtcaaaatgtgtgagaaccagctcaaaactaaagctgacgccactggtgagttttacattttcttctctcttctgacatttagctgtatggaccatcctccaggcaaggaagtaagcatttataagctctcagcaaaataaattgatagctaggtgt

SEQ ID NO: 42050 - DNA, 2300 bp, Homo sapien
gagtataggtggcagttgcagagagccatgggctggagagggtcagatggggcctcccacagggggatcctgtgggggctgcagctcagagtgactcccagctctgtcactagcagggcgaccccttccttctggagccttagctctgaaaagcccctggtgggggtgccctttcagatgccccctttccatttcaaaggctctgattctcgatcttgaagccaaatgcagcaccgacactcggcttcagtttccactgggacagctggaggtctcctttctagccccagcccaggcggccaagcccatcctggcatcagaacatgctgagcggcattttgtagggtggcacctttttatccaagttgctagctacacatcagtgtttaaagagaaaagagtgacctttcattttttttcttgaaacttgaggaaacaggatacataactactgatttgtttgttcttaaagaaaactaaatgcacgactgcagagtgctagaggtgtgtatttttcatactgtgggggaaagtatttgtgctgctttttggagatatactgggatgtctggtttctgtccccgggcctggcagctacgtctattttctgtagaaggtgccacagtgagacctggagccaccccttcctgccctggcacggtttagagctgggagcctatggactcttggcctgtttctaccttctattcaaccactctgatgtggggagacaaaaagaaatataactttttgatagtgtggtagaaacattgatttgaactattttagtagaaggagtagcaaacaagactgtggtagtgtatactttgagctagataaataaaggcctctttgtgagcctcctggccaacaacaacaacaaatgtccagtgtcaaaaaagaagttgagaaatcctcgcataggacaaatttctcacgttagagatgaacacactgaagaccatacaaagtgaccaaccccagatctgactacttgtccaggagctggttacagacaattctttataaaataattgaaaaaaacaaaaaccaaccaaccaacccccaaaatttaaatacactgttaagtcgccacctgctggtggaaggctgttgtcacgttggagtgaaactgctattaatagcatgtgcaaccctagagtttcccactcattgaccaggccccaaaaatgtgcatttctgacatgttctcaggtgatgctgctgctgctggttcagaaaacatgcttgagaactcctgatataacccagtcatctatgtttcaatcaccttctttatggattctgagaaacttctattcttacccaaagatggctttctccaggataatcctggttccttttctttatcactgttcaagttatgggttatctgtgtttttatttgctaaatttggctgccttcctccagttctactctgctatctttctctaaataaactaaaattttgacactgcaagaagaagaattgttttaaaaagaaactaaattttgttagtctatgcaaaatattaagatggacatcttattttgttcctcttatatcatattatatacttaaagttaagtagttaaggatggtatattgtttcagaataactgtacctccaatcattacccccatggcaagttctataatatcaacattcaccatcctatctccatgttacaactacaaagtgacctaccaataaggagttacttttattgtaaagttaatgtaaataatttgtctggattttaatagaagctctgttttttaagatgaattgattcttcttccgtttcttcactaacactgtactgtttgcatattttaactgggatttttctagcagttctcacatttgacattaggtagatgatacagaggaacattaaagctgtttcccataaacgatgaattatggactgaaaagagcttcttatgtgagaagagatggtgacttgagagtagtgttgagttccagaatggattttctgttcattacactgaaaatgttggcattttcttttctctgattgtaatgtctgccttctgcttgttattctgattagcatgtttcattgtagaaggtagctaatatattttgtttggtggaagaagaattgtaaacacgtggatagtatttgtattgggtaactgccggtaatgtcaggtgagccaatcataaatgttggaaaatatagactctgttacctttcaagacttcatattaaaacattgtccctctcttacttcatcttacagcaacgtttacttagatatggaatccat

SEQ ID NO: 42051 - DNA, 2300 bp, Homo sapien
tttttctttttaaaccaatttttattagtgtatcagtaagatttttttttttttttttttttttttttttttttttcagaaaaagccataaatatatttgattttgtgggcataagttattatttcaagagaagtgggccaggtgtggtggctcacccctgtagtcccagcactttgggaggctgaggtggatggatcccctgaggtcaggagttcaagtccagcctggccaacatggtgaaaccccgtctctactaaaaatacaaaaaagcagccgggcatgatggcgcgcacctgtaatcccagctattcagggggctgaggcaggagaatcacttgaacccaggaggcagaggttgcagtgagctaagatggtgccactgcactccagcctgggcaacaaagtgagactccataaaaaaaaaaaaagtgtacctaacagaaattgaattctcttcctcttccacaaaaatgcccatattaatttttttttctttttcggatggtaaaagtattatatacttccacattcaggtaatgcaaagaaagcatataacagaagaaagggacagttttctgtaatctcactatcaaaactaaccattcttaaccttttcatatgtatattttcacaaattttctacacacacatgcagacgcacacacacacacacaagcaacatcttttaagcaaaaactggggtgatttcataatgcttcttttgtagtttttcccctgccccactaaacacggtcctatttccatgtcaatgagtataatttagtacattttaatggctgaataacgttttattgcacaagatacaaaaaattcacttacaagtgtttttattccaaaatcaataaaatattaatcgaaattttcttctattacttttgtgccttatactatttttgccgcctcatttggcttttataagactatttagagaaaccctatgtctattagttggtacatcatagatatgctttttagtgatatggagaaaataatgaggtggaggtgtatggaaaaggagtagaatgtcaaagcaactaaatcgatggagtgaagtttttggatggttgctaactgacccatccctaacatttgagagcctgacacaggatacacatggaagaccacatactatacgtctagatatttaaatgccttaaatctagataactgtataaaatatgtcctagccttttatcttgacacatatagctggaaggccagacttgagtttggaaaccttggatttttggaagtacttagcaacgtggtgttctttgggcatcctagtaagctggggagggagcacaggcttcccttgacccttgaccctgtagatgtctcaccatgagggcaggggtgtggccagaggaaggccagtgtgcgcccctgaaaacatggggctcagagtaaagtcctcttttgctcaggggtgagtgtggcattgcttgccaaattttcttcttttggaaaataaaataaaatacagtgatttaaatgtagtatatcaatatatgtgtggtgtgaaaacataaagcaaataagaaatctacagaataaatagacaaggtcccttttcaacattttcctaaaccttcccttctcttttccactgttcatagtgtgatgtgtatccttccagaattttctggtcatttatataacatgctatacatacaggtatgtgcatatatacatataaaatatgtatgtaagtatatttttaaaaaatatacataggataatactgtgcatattattctgtaagcttttttgcttacatcttttttaaaagaatgactctgcagttattcctttctgttctttctcccttactttaagaaagtaatatatatataggcttgggtcacgtagtctgcaagaaaaaaaggtaatatatagtcatgataaaaaattcaaacaataaaaaatgaaataaatggcaatgcaaaagtctttgagtgttgtcatcctaccttgttcctagaaataaccaccattaaaagtttatagagtctaggtgtggtggctcacacctgtaattccaagactttgggaggctgaggcaggaagatcacttgagacaaggagcttgagatcaacctgagcaacatagggagaccccatctctacaaataactgaaaaaaaaaaaaagctaggtgtggtggtacatacctgtggtcccatctactcaggaggctgagacaggaggattgcgtgagcctggtaagtcgaggctgcagtgagctgtgatcacaccactgcattccagcctagctg

SEQ ID NO: 42052 - DNA, 2300 bp, Homo sapien
tgggttaaggagaggaaaggagattaaatgtgtttatagaagaacaacaaatgcctagcacttagggaggctgaagtgggtggattgcttgagttcagaagttcgagaccagcctgggcaacatggtgaaactccgtatctacaaaaattacaaaaattagccaggtgtagtggcttgcacatgtagtcctagctacttgcgggggctgaggctggaggattgcttgagcccaggaggtggaggttgcagtgagccgacatagtgccactgcactccagcccggtgacagagcgagaccctggctcaacaacaacagcaacaacaacaaaaagaaaaacaacaaaatgccaatacacatatgagagattacaattttccaataaacaaagaaatgcttattaaaaccacattgagaaatgaggggaaaaaacctgtaaactgtctgcaaatgtgaattcaccaggcaaaaattcataataaactaaatgagtaggtgtccctaattttaagtcggttgtcagggatgaatgactagcattgttaattacacttgtaataatgtgagcatcattttgcctgtgtgctttgtgccacctctgccaacaccctgggatccaccccaaatcactgaccacaaccttaatcaagactgcctaggccgggcatggtggctcacgcctgtaatcctagcactctggaaggctgaggcatgaagatcgcttgagtccagagtttgagaccagcctgggcaacatagtgagaccccatttctaaaataaataaataaataaataaataaataaataaataaataaataaaattagccaggcactgtggtgtgtgcctgtagtcccaactactctctggagcctgaagtggaaggatcacttgagcctgggaggtcaaggatgcagtgagccatgatcctgccactgcactccagcctgggcaacagagcaagactccatctctaaaaaaagaagaaagaaagaaagagagaaagaaagaaagaaagaaagaaagaaagaaagaaagaaagaaagaaagaaagagaagatgcctatccagaggaatccaccaaaacaaaacaaaacaaacaaaaaaaatgaaaaaaaaaccagaaataacaaaacatttgtattgtatgttacacatgaagcacattaagtgatttcctttgttcattgtaaccttgtgagggaactggatttttgtccctattattcccattgcatagataaataaactgaggcttgacatgcccaataagtcacaggtagtaaaagcagtgcgttagcttaaatctctgatctcctcacgccccacactgactcaacagtaacaatacattactacaaaggatgtctgtgatgacagtggccatcccatttgatcctcgttattcttcttttatcgaaggaaactgagagtcaccttcttttctaggcagttaggtaactgaagccgaaaggtattgtgacagatccactgggctgtaaaaggcagcgtgtggaggtggagcccagagtttctgcctccacagttaaaagctcagacagggctttgggagcagggcctgcaaatcaaagatgaaagaacaacctgtcttggagcgcttgcaggtaagctcaggctgctcgactggcggggaacaaggaccttaggcgattcgctagatctgcgcccccggccttagatagaagtgggtggggccagggacactacatctaacgaggatctagaatagctaggatttatgaaataccggctttcaagttctctggtctccacccaaagatgattatcctatctaaggtagtgtacgctactacagggcaggtcccgcagcccccgtttcaagagctgggatgcggccatagcggaggtggtgtcagagcggaaacctagcgggggtcgggggttcagctcggggcggtgggaaacaccccgggagaggaggcagctctgattccgctccgggccggagggagaggagttcggaggtggcttgagctgagaatccggaggagagaaggcgcgttttgagctgccacgggcacagatctcagacccggacgctgactagccgggggtcgcggctttccgaggcggctggagaagtgcccagacggccgtccctccgcgcccctgcgcgtccccgtgcgcccagtgttccccgtgcaggagtcccggagcgatgacagcgccggttacggtaaacacccgccccgccgcagtccgcttccttccccaacgcggcgccgcccggacttgcaacctcaggagtccccgctggct

SEQ ID NO: 42053 - DNA, 2300 bp, Homo sapien
gtttctgatacagcttgggaaccaaaggcagcttgtaaactagtacattcaatgctttaagcacttcacattgcccttgtatttcaggctctaaatgccttgaagcttgatctgaaaagaatatatgatcatcctaacatgtaggtttaccaaagatggtaaactagaagatggtagacttcttacaaatcttgagttccaaatggctactcttcttggtgggtctgaagatttctgagaactctctgacccagtcactgtaagagacctaacaaagaaattgtatggaagacagagatcgagaaggatttacttgccttagaagagctttcagaacctgttaactgtttacagattaacgctttaaagaagatgggttaaggagaggaaaggagattaaatgtgtttatagaagaacaacaaatgcctagcacttagggaggctgaagtgggtggattgcttgagttcagaagttcgagaccagcctgggcaacatggtgaaactccgtatctacaaaaattacaaaaattagccaggtgtagtggcttgcacatgtagtcctagctacttgcgggggctgaggctggaggattgcttgagcccaggaggtggaggttgcagtgagccgacatagtgccactgcactccagcccggtgacagagcgagaccctggctcaacaacaacagcaacaacaacaaaaagaaaaacaacaaaatgccaatacacatatgagagattacaattttccaataaacaaagaaatgcttattaaaaccacattgagaaatgaggggaaaaaacctgtaaactgtctgcaaatgtgaattcaccaggcaaaaattcataataaactaaatgagtaggtgtccctaattttaagtcggttgtcagggatgaatgactagcattgttaattacacttgtaataatgtgagcatcattttgcctgtgtgctttgtgccacctctgccaacaccctgggatccaccccaaatcactgaccacaaccttaatcaagactgcctaggccgggcatggtggctcacgcctgtaatcctagcactctggaaggctgaggcatgaagatcgcttgagtccagagtttgagaccagcctgggcaacatagtgagaccccatttctaaaataaataaataaataaataaataaataaataaataaataaataaaattagccaggcactgtggtgtgtgcctgtagtcccaactactctctggagcctgaagtggaaggatcacttgagcctgggaggtcaaggatgcagtgagccatgatcctgccactgcactccagcctgggcaacagagcaagactccatctctaaaaaaagaagaaagaaagaaagagagaaagaaagaaagaaagaaagaaagaaagaaagaaagaaagaaagaaagaaagagaagatgcctatccagaggaatccaccaaaacaaaacaaaacaaacaaaaaaaatgaaaaaaaaaccagaaataacaaaacatttgtattgtatgttacacatgaagcacattaagtgatttcctttgttcattgtaaccttgtgagggaactggatttttgtccctattattcccattgcatagataaataaactgaggcttgacatgcccaataagtcacaggtagtaaaagcagtgcgttagcttaaatctctgatctcctcacgccccacactgactcaacagtaacaatacattactacaaaggatgtctgtgatgacagtggccatcccatttgatcctcgttattcttcttttatcgaaggaaactgagagtcaccttcttttctaggcagttaggtaactgaagccgaaaggtattgtgacagatccactgggctgtaaaaggcagcgtgtggaggtggagcccagagtttctgcctccacagttaaaagctcagacagggctttgggagcagggcctgcaaatcaaagatgaaagaacaacctgtcttggagcgcttgcaggtaagctcaggctgctcgactggcggggaacaaggaccttaggcgattcgctagatctgcgcccccggccttagatagaagtgggtggggccagggacactacatctaacgaggatctagaatagctaggatttatgaaataccggctttcaagttctctggtctccacccaaagatgattatcctatctaaggtagtgtacgctactacagggcaggtcccgcagcccccgtttcaagagctgggatgcggccatagcggaggtggtgtcagagcggaaacctagcgggggtcgggggttca

SEQ ID NO: 42054 - DNA, 2300 bp, Homo sapien
cagccccgacctcctgggctcaagcaatcctctcacctcagccatccaagtagctggcaccacaagtgtaagccaccacgcgtggctaatttttgttttttttttttgtacagatggggttttgccatgttgaccaggctggtctcgaaatcatgagttcaagtgattctcctgcctcggcctccctaaatgctgggattacaggcatgagccaccatgcctggacaagaagttttatatacaagtttgacaactgattaaagtgcttgtgaaagatacagattcctgggccccaccctataaatcctgatacaagagatctgggtagggtggttggagcctgggaatctgcacttttgacaaatgcctcagatgtttctgatacagcttgggaaccaaaggcagcttgtaaactagtacattcaatgctttaagcacttcacattgcccttgtatttcaggctctaaatgccttgaagcttgatctgaaaagaatatatgatcatcctaacatgtaggtttaccaaagatggtaaactagaagatggtagacttcttacaaatcttgagttccaaatggctactcttcttggtgggtctgaagatttctgagaactctctgacccagtcactgtaagagacctaacaaagaaattgtatggaagacagagatcgagaaggatttacttgccttagaagagctttcagaacctgttaactgtttacagattaacgctttaaagaagatgggttaaggagaggaaaggagattaaatgtgtttatagaagaacaacaaatgcctagcacttagggaggctgaagtgggtggattgcttgagttcagaagttcgagaccagcctgggcaacatggtgaaactccgtatctacaaaaattacaaaaattagccaggtgtagtggcttgcacatgtagtcctagctacttgcgggggctgaggctggaggattgcttgagcccaggaggtggaggttgcagtgagccgacatagtgccactgcactccagcccggtgacagagcgagaccctggctcaacaacaacagcaacaacaacaaaaagaaaaacaacaaaatgccaatacacatatgagagattacaattttccaataaacaaagaaatgcttattaaaaccacattgagaaatgaggggaaaaaacctgtaaactgtctgcaaatgtgaattcaccaggcaaaaattcataataaactaaatgagtaggtgtccctaattttaagtcggttgtcagggatgaatgactagcattgttaattacacttgtaataatgtgagcatcattttgcctgtgtgctttgtgccacctctgccaacaccctgggatccaccccaaatcactgaccacaaccttaatcaagactgcctaggccgggcatggtggctcacgcctgtaatcctagcactctggaaggctgaggcatgaagatcgcttgagtccagagtttgagaccagcctgggcaacatagtgagaccccatttctaaaataaataaataaataaataaataaataaataaataaataaataaaattagccaggcactgtggtgtgtgcctgtagtcccaactactctctggagcctgaagtggaaggatcacttgagcctgggaggtcaaggatgcagtgagccatgatcctgccactgcactccagcctgggcaacagagcaagactccatctctaaaaaaagaagaaagaaagaaagagagaaagaaagaaagaaagaaagaaagaaagaaagaaagaaagaaagaaagaaagagaagatgcctatccagaggaatccaccaaaacaaaacaaaacaaacaaaaaaaatgaaaaaaaaaccagaaataacaaaacatttgtattgtatgttacacatgaagcacattaagtgatttcctttgttcattgtaaccttgtgagggaactggatttttgtccctattattcccattgcatagataaataaactgaggcttgacatgcccaataagtcacaggtagtaaaagcagtgcgttagcttaaatctctgatctcctcacgccccacactgactcaacagtaacaatacattactacaaaggatgtctgtgatgacagtggccatcccatttgatcctcgttattcttcttttatcgaaggaaactgagagtcaccttcttttctaggcagttaggtaactgaagccgaaaggtattgtgacagatccactgggctgtaaaaggcagcgtgtggaggtggagcccagagtttctgcctccacagttaaaagc

SEQ ID NO: 42055 - DNA, 2300 bp, Homo sapien
tctagaccaaagctgtccaataaatatataatgctccaaaaacataatttaaaattttctagtagctgtatttaaaaagtaaaagaaacttctggtattaattttaatatattttcttcaatatagccaagttatttcatgtgtaatcaatataaaattgagctattttatcttcatttattaaatccacgaaatttcgtgtatattttaaacttagagcacatttccatttggactagtcacgtttcaagtgttcttaccggctagcggccgggcagcagagatctaggcaaaccgaggcatacctagatcttctcaggattcttacatgcagagatgaggcaggctcatgtcttgaataaaaacccgccaatgattctcatatacgccttaaggcccaaattaattttcttttttctttcttttcttttctttttttttgagacagcgtctcactctgtggcccaggctggagtgcactggcccaatctcagctcactgcaaccgccatctcccaggttaaagtgattcttgtgcctcagcctcccgagtagctgtgattacgggcatacaccaccacacccagctagtttttgtgttttaatagagacagagtttcaccctattggccaggctggtctcgaactcccgacctcaggtgatccacccgccgtggcctcccaaagtcctgggattccaggcgtgagacaccacgccccgcccccaaattaattttcaatgatacttttgcctaggatcagatttaacactatgagttaaaacaaagctttgaccaaggtacggtggtccatccttttctccagaagctgtaccagccggtaggacgttcaattaatcaatggctaccacactggtctccctctagaaaaagaactctatcccgaattctagactaatcatcgttaaacccaggaaggccctctacacctttatctgtcgtttgtctttgggctgaacctatgccctgacggtctgcgttctcgccatgctcacagcccgccacgacccacggtcccgtttcccttttacggagcgcggcgctgacgccgcaaggccacttctatcgctcccgaccacggtctgtttccccctcgcccagcccagtgctttctgcccatcggactctcggggtgtgcttctggcggtcggcgtcctctcccggagcggtgaccccttctttcaaccccctcaggcgtcttaacctacacaagtcatgagtgggaaccggggcgttttgtgtgtgtggggaaaaggcaagccccttcgcccctcagcccacccgcccccagcccctacctggcgcgatgcgaccccccagtctccccgcgggggtcctgcgcgccccgccccgtcgtcgccaccgccccccgggagccgggcgcccgggagctcctcccccggccccggcagtacgggcggcggcggcagcggcggatcgcctgtctccagaccgtggtcctcacgctcctggccgctcggggcgctgttgtccccgctgtcacggcgcttgctgggcgaagccgagggctctgccatggtccctgcgtcgattttgcgctttcggtgctgctctgggacgccgaggagctgcccagcatgcgcgaccccgggcggccggatccagagaggcggtggcggcggctgctcagcgaagtcgcaaagcaggagccgcttccaaggcacgtggaacgtcaccggctcggccgcacgccgcttggccatgggcccagaggctcgggcggagcccgccaggcgcgggagaccgagtgccgatagctgcggggggcgaagagcgaggactgagcgcgtgagagagggacaggccgaagtcgggcgaggaggcgacaggacgctggagggggtagggcggggcagctcgcgcagggcctagggctggggctccggctcggaggcagctcccgcgctcagccctcgccgccgccgagatgcggcccggacgttgagaagcaaccgcgaagcggcggagattcgaacctgcgcacaacgtgcgcgcgcgcactctgtctggccaggcggagccgctggttggtggaggctcgcggggcgcgctcccgagcgccctcgcgaccggaagtgcgcgctcgggggtaggcgggaaggccgcggcgggattaattaaagacccgatcaagcggcccgcagaggggcgtgaccttgtttcctcaggagtgtggcggtggtcttactactatgttcgttatagcgcggtacgttctagacccttctataggaaatttaaaacctttaaaatgtgtatt

SEQ ID NO: 42056 - DNA, 2300 bp, Homo sapien
agcttgtcatgttctagtataggtagtattctatttctgaaacagaatgctgtatgtcttactatcattcttttaactacatgtgtattttatacaaccttttgcatatatgataagtttcacaattttgaaaaaatgagcgtttgtaaagaggaacacaaaagaaccaaccattagctaaacttattattttgggggtactcaaaacctttcaaacagcacttgatgactacgattaagatctttcctgctgatttaaaaatggcaaaactcttcctctgtttgagacagacgggttttcaatttatttttttttttttggagacagggtctcacactgtcacccaggctggaagtacagtggtgcaatcttggcctctgcctccagggttcaagcgatcctcccacctcagcctccctgggactacaggtgcaaggcaccacctctggctaatttttgtattttctgtagagatggggtttcaccatgttggccaggctggtatggaactcctgggctcaggtgatctgtgcacctcatcttcccaaaagtgctgggattaaagacgtgagccaccgcacccggccggttaccaatttcaaacaagaaaagtaaaaaccaaacagaaaagctattgcttactaccctaacttggtacatttctgtgcttgttaataactaataattaacttgtcctctcacaaccaccttgagatgcaggggtacagggtaaattagtactgagatagtacctagcactaaaatagaattatctttcttgcacactttttctacagaggatgatagtttttcccttcaaagcactggtaatagtcttattttcttccttccatttctgcttacttggttactgtctttatcaaactattaaaatagtaaatacgaccagatgcggtggctcacacctataaaccaagcactttgggaggcccagacaggagatcgcttgagctcagtggggcccggctgcagtgagccgtgatggcaccactgcactcccgcctaggtggccgagagagaccctgtctcaaacaaaataaaaaataaaaataataaaatagtaaatatactgcaattgtctccacctcacttcacctgacaacactattttgctgtaatggccatagaatcttgatctgaccaccgcccatagtaagcagggaactcagccttccaacattaattaagagcccaacaattttaggtttcagttagaaaggacagctgcgcttcaggcttggttcttgccaactactcagctattttggatgagctgcacattttgtctgtaacttcctccataagtttttaatcaagagatcttccaggaatgtagggcctgcttcaccttccacagcagctgcgcaaaacatgcaaaacatacacttcgatttgtgttttctgttagctttagctacttccctcagcccagactcccttcagtcttttgttttgaataacaacctactgtgaagcttcttaaacactagttttatttaaagcttgtattatccttttccttttttttttttttttttttgagacggcatctcgctctgttgcccaggctgcagtgtagtggtgcgatctctggctcactacagcctccacctcccaggctcaagtgaatcttcctcctcagcctcccgagtagctgggaccacaggggcaggccaacaagcctggcctatttttgattttttgtagagacgaggtcttgctatgttgcccaggatagtctggaactctattataatctttgtcttaatctcatggagacgcccccgtggtcactgactggaggaaggaaatacacattttaaaggttttaaatttcctatagaagggtctagaacgtaccgcgctataacgaacatagtagtaagaccaccgccacactcctgaggaaacaaggtcacgcccctctgcgggccgcttgatcgggtctttaattaatcccgccgcggccttcccgcctacccccgagcgcgcacttccggtcgcgagggcgctcgggagcgcgccccgcgagcctccaccaaccagcggctccgcctggccagacagagtgcgcgcgcgcacgttgtgcgcaggttcgaatctccgccgcttcgcggttgcttctcaacgtccgggccgcatctcggcggcggcgagggctgagcgcgggagctgcctccgagccggagccccagccctaggccctgcgcgagctgccccgccctaccccctccagcgtcctgtcgcctcctcgcccgacttcggcctgtccctctct

SEQ ID NO: 42057 - DNA, 2300 bp, Homo sapien
tggggccattgaaatccgttggccatgtggcagccatttcaaaatgtcaaatatattttggggtaaaatattctgatttccttctgagtctgctatttgtcataagatgccataccagagtcaggttggaaagtaagtcgtattatatagggttaataaaaacctgtccagtgagatttcgtaattagtaaggcatgactccccaggcctcttagtgaagaacttggagaagagagaaaatataaaaaagatcagcgtttagtcttcacatattattgtatgagctgtaatttactcatttcgctgcattccactgtataactatactgtaatttcttcattctatagtaactatatgataatttctgatagtagacctttgggttgtttccagatattttattccttttttttttttttttttttatgagatggagtctcactctgtcgcccaggctggaacgcagtggtgcaatctcggctcactgcagcctctgcctcccgcgttcaagcgattctcctgcctcagccttccaagtagctgggattactggtgggcgccaccatgcccagccaatttttatattttagtagagatggggtttcaccgtgttggccaggctggtcttgaacttctgacctcaagtgatccgcccacattggcctcccaaagtgccaagggattacagggatgagccactgcgcccacctgtttcttatctctaacagtgctatgacaaagattgttcatgtttcatggggcccatttgcaagagtttctaggatataattgctaggtcataaggcaagtaccatgctaagttgtactaggtaatgctctaaatttaattttccaaagtggttgcgctgatgtatgcacttaccattagtgtgtaaatgtcctaattacaccatattttcaccaatcaccaaaatttgatatagtcaggattttaaattttggccatcttgtcaatataaaaatgatatactgtgagtatatatttaactttaaaaaatgatgttcttatggccaggcatggtggctcatgtctgtaatcccagtactttgggcgaccagggcaggcagattgcttgagccccggagtttgagaccagcctgggcaacatgatgaaacccatctctacaaaaaaatacaaaaatattagccaagtgtggtggcacatgactgtagtcccagttacttgggaggctgaggtgggaggatggcttgaacctgggagacagaggttgcagtgagccgagactgtgccactgcattccagcctgggcgacaagagcgaaaatccctctcaaaaataataataataagtaaatataagtaaaaattatgttctattttctggttttatgaataagtagtccccaaagtgacctttgggttcgtttttggaatgcaaattgtgggtattgttaagtaaaacactatagaattttaattttttatttgcttagtaatttgtagtatataagatcttctatgatatttaaaaaaaatcaacctggttagcttttagttaatttcaggacatattttgtgtgtattataatttcatagcagtatttattttgctacttaaagatggaaaaatctaaagctggttttgctgaaaattttaagtttaaaacacaaaaataaattaattgtacattaatcttctttttcctcttctaattggtgcatatgtttacttttactagtgataaaccatttgtattttggttgcttagagaaggacttgtaataaagtaaaaacatttacaactttataagttaatgcctttttaaagccaagagattgtaaatgataggacagtatccagcataataaggaaataattgtacagaaagacaaccttaaagtaagattggcctctggtgagaattcttttgtgaatttaaaaaacaccttttatgttttagcaccagtatgcatgagcgggtgaaccgaacagaaagacagtttcgatcacttccagctaaccaacagaaactacttcctcagtttcttcttcacttggacaagatccggaaatgcattgatcataatcaagaaatactactgaccattgtgaatgattgcatacatatgtttgaaaataaagaatatggagaagatgtatgtgaaagtttgttctatttctgtttattttagggtcaacctctgtattttgaggtcttttattttctggatttcatttttataatctggcacaggctatttgctctactcagaaagttttaacttaaatgttcagtcatttgattaggcttaat

SEQ ID NO: 42058 - DNA, 2300 bp, Homo sapien
gcctttatcaattaggtcattcagacctatatcaatacatttaatgaattacaacatgtaaaacttctgtgcatgtgtacatgagaacagtattagaaacagctactactatgagtgtttatacataacttccgaacaattagtgtttggaaaaatagacattagatagaaaatctggaagaatgggcaaggaattggtatattgtgtctggagaggaacatagctggctagggacaggtaaaacaattattcacacttggccgagcgtggcggctcacgcctgtaatcccagcactttgggaggcccaggcaggtggattgcctgagttcagggagactaacctgcgcaacatggtgaaatcccgtctctactttagtattttcaaatacaaaaaattagccaggtgtggtggcgcatgcctgtaatcccagctactcgggatgctgaggcaggagaatcgcttgagcctggaaggccgggaggttgcagtgagctgagatcgtgccactgcactccagcctgggcagcagagcgagactgtctccaattcatatttgtaatcctttgcactttctttttgaattttgaaacatgtattactgcattactattaatagactcacgttttagaaaacttttatataaaaatgttgtcattttaagcattacctttatttcaactattaatttaaattatgaaaatatgaagccacttcactttcaatatggttgtaactttttaacagactttgtggtcactgggcatatttaacccctcgaataaagcaatctttcccttttatcattactttgtaagactcatttgctgggtggtggattaaattgaacagaataagttatttctttttcttttcttttttttttttttttgagacgctgtctcgctctgtcgcccaggctggatggcacgatctcggctcactgcaagctccgcctcccgggttcacgccattctcctgcctcagtctccagagcagctgcgactacaggcgccagccaccaagcccggctaattttttgtgtttttagtagagacggggtttcaccatgtaagccaggatggtcttgatctcctgacctcgtcatccgcccacctaggccttccaaagtgctgggattacaagcgtgattcaccgcgcccggccccagaataagttatttcccaagagccacccttagatgctggtaggtgtaatggtcttcccaagaccaggtgctggatagaaggtccttgcattttcctcatctgttgccatcctcagtaaaggaggaattaggactgccgcaagcccctaaagactggaaagatgggacgggcgcgatggctcacgcctgtaatcccagcaatttgggaggccgaggagggtggatcgcctgaggccaggaattccagaccagcctggccaacatggtgaaaccccatctctactaaaaatactaaaattagccgggcgtggtggcgcgcgcctgtaatcccagccactcgggaggcagaagcaggagaatcgcttgaacccaggaagcagaggttgcaatgagccgagatcgcaccactgcactccagcctgggcgacagagtggggaaaaaaaaaaaagtgaaaagatgatggcgcccacttccgacccccttaagtaattaaaaataggaattcatttaggaagtgaattaaaacttaaattagggtggatacaagacgttccttctagactttctgaaataaaaattccgaataaaatcatcaaagccgaacttttcctttttgcctttcccttctttgctagtgcctgggaccgcgttcagcctccagctcaacaatccggcactcgccggcttttaagtcccacccacgcggccgcgcacaggtaacggcagtgccagtcccaccccacctacgagctcctcctccgcctcccaccaaggggccttggccccgcccttggaagcgtggttgtgacgtcagcgcgctgtctccgaagcccggcagcaaatgagcgcagaccgcacgggccctccgcgtaccaaggcacacgcatgcgcattggttctgggagccctgaagacctggcggagcccagcgcggatggaggcctgagggtggcgggggcggagcgcgccgcgagctgggggcatgtccgcggcgggcgccgtctagaggaaggccaagcagccgccaccacgctgtcggtcgcggagagacgcaagcgagccaggccgagggccgcggcggcgatgcagcgacggcgtcgccctccgccgcccacctcccggctgcccga

SEQ ID NO: 42059 - DNA, 2300 bp, Homo sapien
atctcatggaatatctgtgtagtttattttcccagtgcgtgcaaggctttcctcaacagcggagagcttttgcatagcaggagaacaaactaggatagccaagagcaaacctgaaatgactaattttattttttacacttttttttaaccctaagtaaaatgttgggttttttaaaataattcaggtgtgtttattatgcttaattcatttcactactaaacacttgccttttggattctaaactgcagaatggtcagaagtggcatgtgcagaatcagcagattgtacgaactctctaacgcagctctctaacgcaaatgatctgaaagacagctgacaaagctaaatgtgctcttcaaatgtatctacaggacagtctgatattttaaaaagagaaaaatgtttccaggacttcttactctgtattctatccaacagctattttgattctcttcttccaggagatagggcagtcttttcctactattgtttaaactttgctcccttttggtaaacaaatccctcaaggctgggttttttttttttttttaagacagagtctcgctctgttgccaggctggagtgcagtggcgcaatctcggcttactgcaacctccgccttctgggttcaagtgattctcctgccccagcctcccgagtagctgggactacaggcgtctgccaccacgcccggctaattttttgcagttttagtagagatcgggtttcaccaggttggccaagatggtcttgatctcttgacctcgtgatccacccgccttgccctcccaaagtgctgggattacagacgtgaagggctggggtttttgaaaacgcaattcatgcccctcccccattggtttcatttatgtaggttcttaggtaaacagttttttctttccccaaatatacaattaatttacaatattgactgttattttgaacttatgccattggcttccttgtgtgctccagttctttcctcccaccgaagattcaatccgatagatcaggggtaggaaaactttttctgtaaagtgccagacaggaaatgctttgggctttgccagctgctactcaaccctgctgggtaatgcgaaagcggccacagaaaacacagatgcaaatgagcgtgaccgtgttccagtaaaattttacggacactgaaatcgtaatttcatgtaattttcacgtgtcacaaagtattatatttctttttatttcttttcagtcattaaaaaaagtaaaaaaaaaaaaaattcttagcaggccttacagtaacaggcagcaggcgggcagtaggtcatcaccccaacgctagaggaatgagaccatatcgatccgcgaggatcaagtcctgatcctgtccctggcgacttctccaggctgcgcggtctcttggaggcagcgttcccattttcaggattattccggggcgctagagcaccacgccaccatgagtacacgtcctcctcggcaggccacctatcagctctgtgagggtggcaagagtccaggcaaggctttcagggcgcaaccaagtcccgggctccagcacagaaaccctctggaaacacctccaggccccagcaaggcggcgcggcgcggcaggggcgagcaggtacgcactcacctggcgccagttcgagtcctcccaaacacagcggcagaggcgacagccaagcgcgcgcctgtacccagtgcgccgctacccgcagctcgctccccgagaggcccacagcccctttccccacgctcctcctgggttagagggatgccaggtaggggcggtcaccagaggccccttttctctactctcggcgccgggttccagcccccgttggggcggggcggggcggggcggggctccggctagcttggcctcttccgcgcgcccctgcgcagctccggcccttccctatcgggagcgcgcgcggcccgcggcactgcactggcgcacgcccgcttcgccctcgctcggctccggctggttccgccgccgtgcgcgccgcccgcgctcctgctgcggcgaagctgccagcccgggagccaattagcgctcggctaggcggggtccacttcctcgtcggcccggcgcgcgctctggactgctccggcggccgcggggcggggcggagcactcggcggagccgctctgcctgcgtccgctcttcccgcagccaagggtgggcgccggtcctaggaggcgcacggttgtaagccagacaaaaagaactggggtgcccggagtgccaggtggcgggcaagcggtgggcttttcggcggggtctttaggatt

SEQ ID NO: 42060 - DNA, 2300 bp, Homo sapien
cacacacacacacacacacacacacacctgtcaatgtccctccatttgcaatatagacagcatttaatacgcatgaagagatttttaaaaagggcattctttaacgtatttcaactggcagcaggtgatcagaaaaaaataagataaataaaatattgtttagctatcaaagaacaactctgcactgttagatacttaaggtcctgatttgcacctgagtttagaaagctacctcatacatatgcacttaaaatggaaatttctcatcagattccacatctaatgcaatgcagaacccaactctagctgtgccccatctttgcccagggcagagccagtctcagcaacttccttcacactcagcccaccaagatgtcagtcctcagtgaagcactattccacatacgtacgtacatgattatcaaataaagggacttcatactccaactgcaggaacgcaaagaaacaaaactagataagtatgaaagctatagagtttaggaaaatcaaggaaaaaagtaatcactgaaactcatctcttgcaaagaaagttacttcaaaatttgacgtaaatggattaaatttcagcatttcgctataccgaaattacactatgggaagaaaaaacccaagaatacatcggagccatttatcttccatttcctgtatttcccttaattacctacccaaatgaatgcacgtaagagttgttaaagtattgaaatacgtcagtcctttctaattacctacccaaatgaatgagcggaacagtatgttacaacttttaattaaaatacgtcagtttcttttacaattatcttatttctgcatatcacagaaaatattctaagaacagagcaaaaatgaacaaggacaatccgcccagaaaactgctttgaggaatttagtaatctcagccctctcaggtttagcacgccaacgtctttgggagagcaaaggcaaaggagatgataaaatgacacttccaaatagcaacagctgagatcactgccgcatcctagattctttccaccaggagcgcgagtatagggtttttttctaaacgctcttcccaagatcccgaggtcaatttcaaacgctgctccacgcttaagtcccgagggaggctcgctcgcccaccccaccctgcagggattgcacttcccgttcgctctggccggtcaggaaccctaacttgacagtgacaaacactgagaaaagaggaagtggctaaagatcatttcatgacattttttaaagggagatcaatggccctgtctttccggaaaacttccatgggacgttgccatcacaccctctgaaagtttcagcgaatgacaacgtagcaaaagtgagggctactcccctttaaatatatatatatatattaatcctcgaaatcctcttgctatcaaaatcgatccctcctccgtaacagcgaacgcaaaactaagagcgcccatcccggtggggccgatctcggaagccaggctcggggccgggtgcgcgccgggtcctccctgccaagctgcagaggaggcgccggcaccgcggcggtcgcaggacctggcaagcgcctaccttacctccctcacctggtttgactggtttgggtggcggcttcgacatctcgcttcctggagctgcaaatcctaaagaccccgccgaaaagcccaccgcttgcccgccacctggcactccgggcaccccagttctttttgtctggcttacaaccgtgcgcctcctaggaccggcgcccacccttggctgcgggaagagcggacgcaggcagagcggctccgccgagtgctccgccccgccccgcggccgccggagcagtccagagcgcgcgccgggccgacgaggaagtggaccccgcctagccgagcgctaattggctcccgggctggcagcttcgccgcagcaggagcgcgggcggcgcgcacggcggcggaaccagccggagccgagcgagggcgaagcgggcgtgcgccagtgcagtgccgcgggccgcgcgcgctcccgatagggaagggccggagctgcgcaggggcgcgcggaagaggccaagctagccggagccccgccccgccccgccccgccccaacgggggctggaacccggcgccgagagtagagaaaaggggcctctggtgaccgcccctacctggcatccctctaacccaggaggagcgtggggaaaggggctgtgggcctctcggggagcgagctgcgggtagcggcgcactgggtacaggcgcgcgcttggctgtcgcctctgccgctgtgtttgggaggact

SEQ ID NO: 42061 - DNA, 2300 bp, Homo sapien
gaggccgaggcgggcggatcacaaggtcaggagatcgagaccatcctggctaacacagtgaaaccccgtctctactgaaaatacaaaaaaattagccaggcctggtggcgggcgcctgtagtcccagctgctcgggaggctgaggcaggagaatggcgtgaacccgggaggcggagcttgcggtgagccgagatcgcgccactgcactccagcctgggcaacagagcgacactccgtctcaaaaaaataaataaataaataataataataataataataataataggacgggcatggtggatcatgcctgtaatcccagcactttgcgaggccaaggcaggcagagcatttgagatcaggagttcgagaccagccaaccctgtctctactaaaaatacaaaaattagccagcctgtaatcccagctactcggggaggctgaggcaggagaatcgcttgaatccgggaggcgaaggctgcagtgagccaagatcacaccactgcactccagcctgggcgacagagcgagactctgtctcaaaaatacatacatacatacatacatacatacatacatacatacatacatacataccttcaataataaaccacatttactctacagtattcagagattctgaattccactaattttttgtgcctcccccttcccctttctccagtgtacagcacaattcattgcacatgctaggtgctcaaaacagatgtgttgaatcagtcaaataaataaacgaataaaatacatacacttctgcacatgttttagttcttctgatcttctatttcttcagctataatgtggggatgatgttattttgtgggtttgttttcaagattaaataatatagcataccttatacaatatgtaaaatgtcaaatgctatgctcaaaggtactagtggaattttaagtctgcaggtatctttcagattttaaaaaatcagtaccaaaagctataggtgggatgagttaattaatctcaaacacatttaaattaacaggaagaaagaaatagggcatggtaggaggagagaaaggaggacagttagggatatagtgaatacttttaaagtcagttgaattatttcatacgggataatttttcttgtcacagtaaatcaccctgtgccccacccccgctccaggaaggcagggaggttgtaaaggagaagcgagaagagggttaatttgagctccctcctgcctgctgcagtcacagtgcatgatagagtaatgaaggtgacgccgccacatatctcatctgaacttcctctgtggtctttttcatattaaagtctttcactgttacaggactgtgcttggaaaagttgggaaacttttcccttggtggagaaaaagaagccctcgtcagacgcaatccaacaaatgaatggagttatttccttggcccaacatgtccatccactagcacaccaaatattcatagaaacatctttcctcacttccaaggccggaattgtactctcccgtggcgttgcctagtatcgcagatttcgaaagtgagcaggcaacagacttggctttcgagccaattctaggagtcgatgcgacttactgtcctgtgtggtagcttctcccgggagcagaaagtgtaaaataaacagctgctgaaaagcatgaagaattaacgaagtgaaaatctcgagttatttgttcggcaattgacacgtaagtgacctccttaaatgcctagttatttaaggacgtttagaacgaggatgaatgaatcttcagggcggttaattcgcaccggcgtgtaaatttctttagtctttcgggaagtggcggtaaattcatacaaatccagcagggagggaagagaagggagtaaaaccacgatctcggagcgctcttctcagtcctttggaaagacttgcctttactgcccggaaccctggaggttacagctgggcgaacccggaggcgctaggacctcgtcagcgcctggctgcggccgctttcaagagggcggaggagggagaggaggagggcgatgtgggaaaggaggggtgttaaggggggcgggggaagtcatttatgcagagcaggagctgctgccattgccactcagaatcctcgcgcgctgctcggagccggagggagcgctgggagcgagcaagcgagcgtttggagcccgggccagcagagggggcgcccggtcgctgcctgtaccgctcccgctggtcatctccgccgcgctcgggggccccgggaggagcgagaccgagtcggagagtccgggagccaagccgggcgaaa

SEQ ID NO: 42062 - DNA, 2300 bp, Homo sapien
tttggttagaactcctgaggggcattcattttagtatagtagaacatttttatagcacttctggttatttgagtacttaatgaatgcttacttcaaacatgggcataatttctgccctatgtctttttcagttaaatttcctaagaaagatacaagagtataaggagggaaaagaagtctcagagggaatacaagagattaagaccacaaagatatggggtcactacaacaatttggcagaagtttctttctctttatgttaggtggctataagaaacatatgtagataaatagtataggaatacagatgcggggtaaaatggtgactcaacatcttactatcaaatgaaaaatgggctgcttcctccttctagcctggaataatgtggtgttattgagaacccttctctggagtataatttggcttattttcagttctggtggtctgttgagtggcttggtctctctctctctctctctctcctcattttttttacttttattagagatgaggtcttgctgttttccaggctggtctcaaactactgagctcaagcaatcctcctgcctcaacctcccaaaacactagaattacaggtgtgagccactgcacctagcctgaatgttcttatactttattattattcctaatttcaatgttcgtgaaagtaaacactatcttgattttctgtctttatcaaaggctcctctttctgaaaataacttttagtacatagagcctgaaatgtttcgggaaatcaagtaaaatatacattgtatatacaggtggtttaagttcctgcttcttgtgcaaaagaggctctgcagacctgctaagtgtcctttggagcacgaaggcttcagagtgtatctaatgtaccttactaattttactgataaggaaaaagaggcccgaaacagaggaccaaccaaaatgataaagttttcctatgccaagatttcaatatgaagaaacagtatctccaaaaccaaagttggatttgcttgtttgcctttaaaagtgattaaacaaatccagactggagggaacccaagtctttgacatgttaccgaacgtgctttctctcttacccaccaggtccaacataaagaagaaccgagagggcaccaatcatgctaattgcacagataattctggagaatttttttctcaagaggagaaaatgacaaacataaaagacggcactcacaattacatgaatgctatttgtatttagtcaaatacatttgtatgcagtggggaacagcagcatgctgtaaaaccctcttcgcgtgtgacaagaaagacatctctgctggggcacaggcagccatagtttctattcttctatctgaccatggataactcacttcagtcttcaggctacagtttattctcctatcaaaggaggagactaacctgaagttcctttttagcttgaaaattctattctgtaaagagacagtttatctgagtgcacttagatgcagcaactcaactgttttgttcaaatgagaactaaatgaatttgtggtttcttcttaagaaaggaattgattcctacagactactgggaggctgatcattactgtcctttaaaaaaaagaagaggcagagagagaaaaagaccagcagataactggagaaaagttcgaagtacatttttctccataaaagaaacaaagagtactgcctggctggttggataaattgttgagaacagcgaatgttgctggtagcagatggtgtggtggcggagtttctgctaccttattgctttctttttgtaagtcagaacatcaaaggcactggaaagttgaaagggttatctcatgcttcctgtattcaaagaattctcatcttttaccagagagaagcaaaacacaataccctattgtacgttgctacatttttcagtagctatccacctttttgataatcctaacatgagtttctctgtttcccagaaggaaagaccttctaaccacagcatacactcacgtagttttgcatcagatctggatgggttctctcaattccgtcatccaggatagtgaccacaatgttctttcccgtgtagcctctcttccaggctccttcgatattcatgtcagactggcagggatgtgtattgtcactgcagtgctgaaagaagaagagcatgctgcaagattactaaatagtgaggaaatggaagaattacctatttctttctttcttttgtttttttttttctctgctgcccaggctggagtgtagtagtgtgatgagcttactgtaacctcaaactcctgggctt

SEQ ID NO: 42063 - DNA, 2300 bp, Homo sapien
ctgtacctgttggccaaaagctgagacctagttccagagggcgaggtcaggtagatggccaggtctcctctcctggggtgggtgatggtgatgcgcacaacgacgtgctccaggtagttgacatggcggttggggttatccgagcagcctgaagctttgtagatggagcgcactgcactgttagggcggattgtcctgtaacagagagagatggagagtttgagcaaatgacatcacagagctcaggtgagtgaacctggaggcatggaataaatacacaatgtaagataagcagctgatagctggatactaaacaacagtgctatcaccaaaataactgggtcactgaaaggattaccagttagtgggaaagatgcaagggagaggtgaaaaaggaacaaggttctttcatcttcatgaaggtaatagatctcaaactgagtatgcattgatgtcagcttgttaaaacacagattgctggccccagagtgtatgattgagtaggtctgggatggatctcaagaatttgcatttctaacaagttcccaggtgatagtgacgtagctgatctatggaatacactgtgagaaccacttactgtggtacagtggaggcttggggattagcataaagggggttcacatcccttgctctgtaacccaccagcacattcttccctcttgtctataggttctcatcttcctctctagcttcctcctgtgccacagttccccttgaacactaggctgcagccacaatggcatcaggttcaacctctgggataattcaagtttcccaccttggggactttgcacacactactctgcctgaagtacttttgttgttgttgctgatgtccctacggctaacgcttcttccttcaaggtcaaagcttaaatttcccctccctgagaccttcatcgagccacaggtgaaaatatgtcccctatctcttatttttcacattttttaaatttccaacatttgtttattagaatttgtaattatatacttattattttttttggtgtgatacctccattagactgtaacctccacaagggtaggaagtattacttattctcctttttattcctaatgttttgctcagtgcttgatattcagtaagtgcgagaaaaatagttacttagtgaatgagtttgtgaatgaataaatagataattcctttgattccatttccacatttttcaaatgagaataatacccaagttgttacacagcttcaagaggaaaacatacatgaagtgtctagcccttggcatggcccatagtaagtgctcaataaacactggttaactttccacccttttgttttttctctctcattctttgccacaagagtagaatgaaaataaactcaaacaactttagttgatttacttctgcttccaaacaaattttctcaagaatgacaatgtctctagtttcatcatcaaccaaagttcaaaaatatttttcagagagaaaagtctctgaacagaaagccaagagcaaaacactaataagcctactaagatagaatcctgttggcaaaccctgtcagcacagcttccaagtttgtgccactaaaactggggaataggccctgaaagctgtgagtaaactgcaatctcttttaccgtacattttgtaccactctttggataactacgcagtatagagttgttacagtttttaaaagtacactgacttctggagaatacttgcaccatcaaatagaaatatcgacagtagaaaactttcaagagcccaggggtaagcatatcccccaatcccttttttaaagatgcttttctttgaaggattcttgggctatactagtacgaatttaaccgctcagaatcctagccgttctattaccatttcatagtcacattagagagaaactacagaagcttttagcttctgtgtgcaacaagaggctgtcttgagcaattgactggcttgctctattttggggcattgtcatgctgtttgccggcagcaagcattacttgatttgtcggtctgtgctctccacacacacgtgctgccggggaacggtggtccacttctctgcctccatcaccatggcttctgcgtccatcagtccaaatccataaagatggctcactgtggaaagcgagagactggtcagcttcactaagctacataggtcaaattataacgtcactcagtagagaccccagacaccaccctatgggatcctagctatctttccagcaatgatttgagaaataaatccagcaaaacaaatacatagtcatgtcaagaaaata

SEQ ID NO: 42064 - DNA, 2300 bp, Homo sapien
gaggcagtaacacactagtagttaaaccagtatttccgcgacgtgcacctgcatggtcagtgggaaatggaatgcacgctggtagaccccaatgaattttgttgtcatgttgatggttattcgtctacaaaaacagacatcatttttatctttcctatcaatcacagtaacctcgtgcctcaaatattatgggctgattcagttaaatagatttctttgcaggcaaattcggttttgccatctgcttgaccttgctttaggcttgtgcttgcatttgtccacgtaagactgtgcgtttaaatgtaaaactgtatgctgtacccaggattaactttcatttttttgtgtgtcagaagggcctgtggtgttataaggggaagactgcttagcaaaatcagttggttccctagttacttatgaatcattatgtgattcaatacaattgcaatgctattaagagggtcatcagactatttacttattattcactttgggttgtaagttatctttgatgtctagaaatattttcaaggcaggctttttcctagcttgctgtttggatggggacctcagcatctacttcctagctctttcccaggatagtccatgttgatagtattcctctcctcagctgtgactccagcagcatcttctaagtaaggctctcagaagcatgaagcctgcaagatggctggtcacttgtaaagcaaatgaggtcaccaatgaagctttgatatgaagaaacttgatatcagtctaggctcccctaaacagagaaactgtcaaaagatctataagatttcatcgtttctggccactaatccaaatagtttcctcataattcagtcttctagtttcgatgaagtgtttagagagtcacagaaaaccagtgaaaatatttcttaaaaaaaaaaaaccccaaaaaacagatcatctcagcattcagtggaccagcatataatagtatggcatagttatagagggacagaggagtagaaaaataagagaactaaaagggtacaatcatgccacccatattcaatttccagttttattttcttaaaatgacaagatgaaaaaacttcttctaataagcaccattgaaaaaagttgcccggccaacatgggcacaagcttaaatattatttaaataaattccatttcttaaaaatacaggacctcttgggaacttttgactccaggaagagatttcctgcatcatatccaaaatgcttcccaccatgacaaatggaatttcagatggcctttaaaaaaaaaatgggggtaatggctagatagcaccaagagattgtgcagggtctacaaagttaacactctgaatttcaggggagctggatcagcctcagctcatctatgtacctctgcattctgtccatctgtccatcaccaatttgactatacagagcaatcccatttggcgaactgcgtgtaaaataacccaatctacaatggaaaagccagtagcagcaagtctatctgatgaaaccagtggagcagacttatcaagtgagtaaaatgcaaaaaccagtacataagtacacagcatgaagtaaatgatgtgtggagagtatccatgtttcactgtgaaataccatggcaaacgacactaaacacaactctgtaggatgttcctaatgccctcaggtccagttttctgtcatttcccccaatggtggactcaagcatgcaagagctttctatttcatttttgtctatgtatgctctcgcgatgttttggaaaggtatttttaggtgtttcaaaggggaaacaagcaagtcaatgcaaaagggaaaaaaatggaccttcaaaaccagggcaggaaatcaaatcattactttaacgtcaaattttggcatcaaatgctttggtcatacaatactgtctctgtggttctggctgtttagcactaaacacccagttataaaaggtaggcttgttgtagttttatttttttttccatttaagttctgacaaaacagttcaccatctccctgcacaaacttgagagagagagaaagaaaaagagagcaagaaaagaaagagagaggtggcttgctttttttttttttctttttggcttttttctttttaataatatggaataatctataagtctacaggaacaaagaaatctaagatggctgctcagccttgaaatgtacatgttttgcagcaaagttgttgaagaaccttccgttggcacagattgttctttttcacaagcatacagaagcctccttccgcccaggactcttccgttgcttttccagaagtcagc

SEQ ID NO: 42065 - DNA, 2300 bp, Homo sapien
acacgtattatctcatttagtcttcacaacaatcctataagggcagaattattttctctcattttagagacaaggaaagtaggattctgagagtttaattactgtatccatgtgcccctatgttaagcacttgacacgtattatctcatttagtcttcacaacaatcctataagggcagaattattttctctaattttagagacaaggaaagtaggattctgagagtttaattactgtatccatgtgcccctatgttaagcacttgacacgtattatctcatttagtcttcacaacaatcctataagggcagaattattttctctcattttagagacaaggaaagtaggattctgagagtttaattactgtatccatgtgcccctatgttaagcacttgacacgtattatctcatttagtcttcacaacaatcctataagggcagaattattttctctcattttagagacaaggaaagtaggattctgagagtttaattactgtatccatgtgcccctatgttaagcacttgacacgtattatctcatttagtcttcacaacaatcctataagggcagaattattttctctcattttagagacaaggaaagtaggattctgagagtttaattaccgtatccatggttaccctacccttcggcggcatagctgggatctgaaggcaggtgtgactagagcgccatctatacccggctgactcttaggatgagaagaaagaagatgaaaggcaggagaggaaggaagggagaaagggagggaggaggtaataaggaaaatggtaagatgtcaacattgattgagggtcagggtcattgaaatcccacattctgagctagaacttcgttttctaattttttcctgtgtgagccatgctgatttctgagcaatccctgagctctagtcaaggtctccatatgtattgactgagtgatgtcttgaagctgttctgtccttgaaattgtcccatggagttgctgaggtgacttcctgggaaagcctgcccatcaaatgctgttggagggaaagggagaagggaacacttccaatgtttccttggttaatggtatattaacctgggacaacctacttatagcccgaccaacaagaaagcctgtgagtaggggataattttgatgtttaacaatgatttgggacaaacttaagatgagataaatttaggttgcatagcacagtagctactctaaagaacacagtgacccaaacattgaccaataataaaatctgattttcaaagaacaaaaacagaaaaaaaaaagaaaagaagttcctccacgagaggtacaatgaattgtcaattatcatcttggagtgaagagaaatggtcatccggccgggcgcggtggctcacacctgtaatcccagcagtttgggaggctgaggcgggtggatcacctgaggtcaagagttcaagaccagctggtcaacatggcaaaaccccgtctctactaaaaatacaaaaattagctgggcatggtagtgcgcacctgtaatcccagctacttgggagattgaggcaggagaatcacttgagcccaggaggcagaggcggcagtgagccaagatcacaccaccacactccagcctgggctacagagtgagactctgtctcaaaaaagaaaagaaaagaaaagaaaaggtcatccaacaatcttggcaatagaagtgattacctttgactcataaactcattcacaagtgcatacacacaaatacaaactcactcccatttttaacacacaaaagaagtaattatgtgttcaaatatccccacagtatttgaggctatcttgtagaataccacattccttgtggtaccacacattcgtgtggtatctttcttgataatcaattgcaaatgaaggagtaagagaaaaaaaaataaatgaagtctacacaatggcaatgagccagtgccaacaatcagctcatgtacaatcaaaaggattccatctggggcaggaaaagagactaggtaacccatgagatctttttcagtactggaatcctatgtgcctattccaaggagaagcctgaactgttgtttctttctcatacagatattttgagaaaactccagccttgtcattcttcttgtaaaacctgcaatggatctgcaactctgtgcacttcatgtcccaaaggttagtgtgttgcgtgacagaagatggcagcagtcaagccaagtcattgaaactcatgtgtagtggcatcttggtgtaaggaggtctgtaaggccttgatctattcccatcacatgt

SEQ ID NO: 42066 - DNA, 2300 bp, Homo sapien
caccggcctcagcctcccaaagtgctgggattacaggcatgagccactgtgccaggccctggctgatttttaaaattttctttcttattttctcctcttcttttctttcccctttcttcttttttttcttgtttcttttcttttctttcttttttctctctttcttacttatttttattttaaaatttttggatagacggaagtctccctattttgcccaggctggtcttgaactcctcagctcaagagatccgctcacctcggtctcccagagtgctgggattacaggcgtaagccaccatgccccgcccatttttatacgtttaggttaatgctttccaacaaagctgatgagaggattacatgagacagtgtgaaaaatacttagcattttctctattcttaaaaccacccctcctcatttacctcctatgattcatttaattattttatctcatttaattctcataccttcttgcaacctagggcttagtggcgtaagacccagggatgatttatcaagttctcacctccaggcttttcttattaggtgtatcactgctgatgaagttaaaaatataccattcttgcatattgactattttgaattaaaagcacttgaaaaacaatagatacaaaaaaatcattctgacctcttttctgtttcttagaagcagatgaaattaccatatgagagacatcctccctatattagaaggaatgcagcactcttattaaggacgggagtcaagagtgagagaatcctgtacacaccttgctaaaataactcttaagcctctccagataacttaattgcttttcacaacttgctattactactcttactaccggtattactattatcgttattctcattattctttgtttaattccgtatagataagtaactgaccataattgcttctttgggtccttctctcccttcccttcccttttcttccctttcactttcccttcccctttcctttcccttccctcccttccttcttcttctctagttcttttaaggggtgagggtgtctcactgtgtcgcccagtctggagtgcagtggcgttatcatagctcagtgcagcctcgacctcctgggctcaatcaatcctcccgcgtcggcctctcaaactactgggaatacaggcgtgagccaccaagcctggcctagaacataaatttaatatcaggtaaatcttatcagagatgcatacatgtaaggtagaaagagactacacggtctgcacagaattttatacaaatgtatagagcaaaaaagaaaaaaattaaacttctctggattccattgattaaaaatttaaaaaaataaataaaaaacttctttgtcttcgagacgttaagaggatgcaccttcttataaccttgcaccctgcatatcctgtgagtgagcccagagctacttccctaggagcgtgcgtatttacagttccgagggtacgaaggcctctatctgcattgcagtagagggacggcctgttatcgggcttgtgaaattgtcaagaagacagcctggaggggacagtcaccgcccatgtcggtaaccttccactagtctctggggttaacagcgtcacagacagggacttctcccttggagcttacattcgaatatattaataactccagaacgtggtcagtggtcctggaggacgaccgcttctggtagggcggccaggaaaagcctctgtgaagaggcgatctttgagctgaattttggagctttaataaatacttaaagagcgaacggaacgagcgatgcctgacgttcaacccagcggttgccaaggagctaaagagcgtctcactttggcttccggattgttatgaacaggaggaaggagaaaaaaaaaccagaattgttcgagaattgtgctttcgcggctctcaggctgaaaacggggtttccacattagttcccatcgccaggggctgaaacgaagcccgggatccagacattaggcgcctggggcgggagcctgcagcgggagcttgcggcgggagccgggcgaggcagcggcggggcggggccatgatggggcggggctacggaagccgagcgggctcgaggcgttcggctgaggaagggagcgcacgccggcggcgcggaggccggctctgcgcttcgggccgccccctccccccaccccgctcacacccggcacttacttcggctgtctccgctgccctccagcggagacgcagctcctcaggcgcccggcggtatttgttgggtcggcggcgtcagggattcgcagtggcctgtggtcgg

SEQ ID NO: 42067 - DNA, 2300 bp, Homo sapien
aattttgtctgcatttccttagtagagatggaggtaaatcagttgttggtaaaagctgtgtgcgtctttcttcagattgtgactcatattcttatggctctctcctctttgaattctttgaaaacagtgctctccttgcactaatatgaatgcaatagtgaggaatataaaatttattcaatattttagaaggaagctagaagagagaagttgtaccacatgatatcaagattgcacttaaaaataaaccaaggctgggcgcattggctcatgcctgtaatcctagcactttgggaggctgaggtgggcagatcacctgaggtcaggagatcgagaccatcctggccaacacggtgaaaccctgtctctactaaaaatacaaaaaattagccgggcttggtggtgggcacctgtaatcccagttacttgggaggctgaggcaggagaatcgcttgaacccaggaggcggaggttgcagtgagccgaaatcccaccattgcactccagcctgggcaagagcgaaattccgtcgcaaaaataaaaaaaaaaaaaaagaaaaaatgaataaactaacaaaccttttgaggtatctcatgtcccaaatctctcttcttggctcagcatctcttcctgctcctgacccacatcaccttctctctgaattttcttctaagagcagttcagttcaatacccacatgactttcaaaagtcttaacctcacctactagttaatataatcttcaaggaatttaaaggaattaaattgaagactttgtttgccttgtgaacaaaaaattccccagttgccaggtttcactaaagctgtgatgaatgaaggtgacatcaatctacatttccctgatttatatttgctccacaggtgaggaggaaacctgggttacagtggtaccatgtttccagtgtgtcctcatcagattccggtccttttcactatgatgttgcaacctgtgtgtccccctgccctgtgtggggctgaggtcctgcacccacctgtcctgtctccttcctgatggttgctaggaccaaaacccagaggggagaatgagctgcactcacaggggatgacttggggactgggtccagaaagtggctcatccacaagagcttgtttagagctacctaagaggagtcttccctggtcccagacttggttgcacgttagaatcagctggggagcttttaaaaatgcctatgcctgccgggtgcagtgactcatgcctgtaatcccagcactttgggaggttgaggcgggtggatcacaaggtcaggagatcaagaccagcctgaccaacatggtgaaaccccatctctactaaaaatacaaaaattagctgggcatggtggtgcatgcctgtaatcccagctactgaggaggctgaggtaggaaaaattgcttgaacccgggaggcggaggttgcagtgagccaagatcacaccactgcactccagcctgggcaacaaagagagactccatctcaaaaaaaaacaaaaaaacctatgcctaggccacattccatagcaatcacatcagaatccttggtgcaggacctaggcatcaggatttttgttgttgtttgagacgaagtcttgctctgtcacccaggctggagtgcagtggcgcgatctcagctcactgcaacatccgcctcccggcctcaagcaattctcctgcctcagcctccagagtagctgagactacaggtgcccaccaccatgcctggctaatttttttatttttagtagagacggggttttaccatgttggccaggctggtctcaaactcctgacttcaggtgatctgcctgcctcggcctctcaaagtgctgggattacaggcatgagccatcaccactctcagccagcatcaggatttgttaaggttccataagtaattccagtgggtagcaatggtgagaaccatcagactagatgatgtacaaaaagtccacattatgctaagacattataacaattttgttcaaaacacttcacataattaaatgggctatattttcatcatagtatctgtttcgtatgtgggaaatttgagacacgaagaaagtgtgagtcataccagacagaccataggtgaactgttaaggagggagaagccgcagtgtcaccttccacagtcctgctcccattaagacctatgaagtggaaaatgcagattattctttgaggtttcctgggaccagaaaaggtcagagactcttaatgggtaatgcagacaactggaatgcaatcatcaggtattcatttctgttttaaggtttt

SEQ ID NO: 42068 - DNA, 2300 bp, Homo sapien
aggtctggctatgctgcccaggctgatctcaaactcccaggctcaagtgatacttgtacctcggcttcctaaagtgttggaattacaagcgtgagccattgcaaacagccagctatattttatttttaattaattaatttatttatttttgagatggagccttgctttgtcacgcaggccagagtgcagtggcacgatctcagctcactgcaacctccacctcccgggttcaagcgattctcatgcctcagcctcctgagtagctgggactgcaggcacacgccaccgcagctggctaatttttgtatttttagtagagacggggttttggtatgttggccaggctggactcaaactcctgacttcaggtgatccacccacctcggcctcccaaagtgctggaattacaggcatgagccactgtgcccagccccggctatactttaaacttatgtttagcaattaacatgtcagtattttaacttacaaatgactcagacatttaatgaatatctattacttaatttaatatgttcgaaatttcaagtcaccaaaaaagatttttaaaactatttttaagtagacaaattttataaaacaaattatttttaaaagtttataaacttttattccatttacatttacctaatctacttgctcttaacaattatgcttgaattgctcatgaaaaatttcatgagatattaaacaaagctagccattgaaggagttcaggagtttttcccaaaatcatttcctctcccctaaattgtccctccccaatgaagaggatacacaagctcctaaaatctcagtttttgttgggggaggcagagggaatattagtttttcttttctgtgataccccctacacgaaatctgtgtactttttctcttgttaatctacctgcagtcaatttatttcatagacttagttatccaagcctcagagagtagaggggaagtctttcttcctctataccatcatcttatgttaatttttgttgacaaatcaggcaagtgtcaaacatatcacagtctaatggcctctgagttggatttttttttttttttttttttttttgagatggagtctcgctctgttgcccaggctggagtgcagtgacacgatctcggctcactgcaagctccgcctcccgggttcacgccattctcctgactcagcctcccgagtagctgggactacaggcgcccgccaccacgcctggctaattttttgtatatttagtagagacgcggtttcaccatgttagccaggatggtctcgatctcctgacctggtgatccgcccgcctcggcctcccaaagtgctgggattacaggcgtgagccaccgcgcccggccagaattttttttaaacaacatggaaacaaataagacctcgttctgttttctaggagctaaaaatccaacgaaagaagacacagacacaatattccccttgttacaaagagaactgtgtcaacttttataactgacacaaagatctgtgctataagggcggggaaggttttttcctactttccacagcactgtggattgttccacagtttaatttgatcttaatttttatgtggaaatacacatgaatgtaatgagttcttaaatgctaaatttaggaagcaaggttcgttaggggagagaaaaaaacacctacatggttatctctaaactttacatatcgagaaccttggaatttaattttattgttgttctgtaacatattttcatgtttaaaatcagaaaaggcagcatttctcgagtttcctgctttcgaggaagggaggcataaaatgtttaaaaagacgccgctcacacacctcttaagaatcagagcacagtgaggaagaggagcgaggaagcactaggatcgcagcgctactcccagaccacgtcagtgcccagagggcgccctcgcctgtaggcgggaaccgcgagtccgcagcaagtccccagccccgagctcgcgcaggtgggcgaggcggggacgtggtgggcggggcctagaaaggcggggcctctgggggcggccccggggcgggccacgctggtgtgagggctgcaggcgcagctccggagcgcctagagcgcggcgcggggcgggagcttggtggagcaggagcggctgggcatcctcctgagactccggggtcagacgcccactccaggtaaccggctctccctcgtgttcccctgctcggccgcccggcggtgggggaaggctgagaaggatgggtgggagggagccggctctcagccagtgccccgtggccccgggc

SEQ ID NO: 42069 - DNA, 2300 bp, Homo sapien
ccgttcagaaaacccaagacgtgtggcccatgtgacacacaggatgggtgacctcagggccaaaaacccagggccacctaatctttaagaggggacaaaatgaactttaattttccaatccaaaattttgtttccataaaaccgtggtgttctatttggtattataaactgcctacttttagatttgaaaaaaaaaaagagaaaaagaaaaaagtccattactcttcagtgtggaatttcaaagtagacaatgagatcttttattctcatttttggcctgcaatgataatgaggttgaagattgctatttaaaaaaaaaaacactgtttgttttctgtatgtatatataaacagatatttctgctcaagcccatcaaagtcagcctctgcaaatgaagtctcctgcctgagaggacaggttttttccatgtaaaactgtgtttcgctgttacttatactttaagcaaattggggtaacagtaaatgtgcacaggcagtcggaaacacactggccttttggagaaacttggacaacctttgttcttttatctctaaactttcatgacactaaactcaaaaaggttatttttcagacaacctgcggtcatacctacttatatttcccttattctaatatattgttcttcactgtcttctcttaaattaattttatttatttatttatttgtttagacagagtcttactctgtcaccaggctggagtgtagtggtgcaatcttggctcacgtttgaaacctctgcctcccaggctcaagcgagtctcgtgcctcagcgtcccgagtagctgagattgcaggtgtgcaccaccacgcctggctaatttttgtatttttagtacagacggggtttcaccatgttggccgggctggtctcgaaatccttgcctcatgtgatctgcctgccttggccttccaaagtgctgggattacaggcacgagccactgcgcccagcctcttaaattaatttttaaaagcctcttctggggcctggagtggtggctcacgcctgtaatcccagcactttgggaggccgaggcgggtggatcacgaggtcaggagtttgagaccagccttgccaacatggtgaaaccccgtctctattaaaaatacaaaaattagctaggcatggtggtgcgtgcctgtagtcccagctactcaggaggctgaggcaggagaattgcttgaacctgggaggcagaggttgcagtgagcctagatcatgccactgcactctagcctgggcgacagagtgagactctgtctccaaaaaaaaaaagcctcttccatgtaacattcttcatctcattcacttacctgctctgaaggtgcatctagtcacgtcgtagtaagacagctgcatcttttaaaatcataacaaagagactgaaaactcccaaggttaaatctgaggaaattcagtgcattaagcatatttgcactgttgtgcagccatctcaccctagccattcctagaacttttcattatcccaaacagaaactgtactcatgaaaacagtagctccccattcttccctcccccagctctggaaacaaccatgctactttctgcctctgcgcatttgactactctaggtacctctgtaagtggaatcctagtgagaggtgaagccagctgggcttctgggttgagtggggacttggagaacttttgtgtctagttaaaggattgtaaatgcaccgatcagcgctctgtgtctagctcaaagattgtaaacgcaccaatcagcactctgtaaaaatgcaccaatcagcgctttgtaaaatggaccaatcagcactctgtaaaatggaccaatcagtgctctgtaaaatggaccaatcagcaggatgtgggtggggacaaataaaggaataaaagctggccatcccagcgagtagcggcaacctgctcaggtatccttccatgtagtggaaacttggttcttttgctcttcacaataaatcttgctgttggtcactctttgcgtccgcactacctttatgagctgagagggtctgtggcttcatttgtgaagtcagagagactatgaacccactgagaggaacaaagaactccgggcatgccatctttaagagctgtaacgctcactgcgaaggtctgcggcttcattcctgaggtcagggagaccacgaacccacgggaaggaagaaactcaggacacatctgaacatctgaaggaacaaactccagatgcatcatctttaagagctgtaatactcaccgggagggtccgcagcttcattcttggtgagtaaga

SEQ ID NO: 42070 - DNA, 2300 bp, Homo sapien
tgaggctggagaatcatttgaacttgggaggcagaggttgcagtgaaccgagatctcaccactgcactccagcctgggcgaacctgggcaacagagctaggctccgtctcaaaaaaaaaacgaaacaaaacaaataaaacagaattagttacagtgtctgttctgtagccttcagttgctgcctttcccaaatggggaaggaagccccttctaatgagccagcacttcttaaagacaagatccccattttcagcctttgccctgggcagacattcccaagatacaaccagctccgaagttattttttctcccctaatgatttgggaaaattcacccatgcttttgctgaacctctgacagccagtgaccctgcaaagtgacaccttcctgtgggccccacccccgtctccttcatagctgaaagatacatggcacgtgagaaattatttcatgactattcataattatgaagaattttgtaggcttttagtttaaataaagatagaaaatttgcaccttcttcatctactccctttcttaccataagaataggagctaaggccgggcgcagtggctcacgcctgtaatcccagcactttgagaggccaaggcgggtggatcacgaggtcaggagttcaagaccagtctcaccaatatgatgaaaccccgtctccactaaaaatacaaaaattagctgggcgtggtggtgcacgcctgtggtcccagctactcaggaggctgaggcaggagaatcgattgaacctgggaggcagaggttgcagtgagctgacatcacaccacggcactccagcctgggcaatggtgcaagactccgtctccaaaaaaaaaaaaaaaaaaaaagagtaggtgctaacatctcttaagcacctaccctggtggtcatctgctgagtaattcactttcccattccattagagttaggtcaattggagattacctaaaattgcccatccccctattctgccatggtcccctcctcacctgccccccccatcaaaaaaagaaaaagattatgtaacattggatatttagttatttcccaaattgacattttgctagaagtctttggtttatctgataatatatattttttgaagatcatacaaataaacacatgcctttctattttgtaaacatttcattaatactttgtttgccttaattgtgtcaatatatctgctggcatttttagaattaataatagtagtagtagctaacatgtactgtgagtttattttaacccagagtctctacataggttatcttaccttttttttttttggagggggggagggggtggagggagtctcactctgttgccagcgctggagtgtggaatgcagcgatgcaatctcggctcactgcaacctccatctcctgggttcaagattctcctgccttagcctcctgagtagctgggactccaggcacgtgccaccacacccggctatcttaccatttttaaagaacatcatgattactgtccattctgtaaatgagcagtcttaaggtgccatgaggtttagtaacgtccacacttgctaataagtggtagaaatcagctttgaacttggccttgtgactgcagggtccacaggttaacttccacacccctttttctcccagtcgctgaagtcgtactgatcttagacaagcatcctaactttctctaggaccgaagctggacttccttatgaatcctgctatgcttccacagtccattttattatgatcttaaccattgttcattcaatgaaaataattacattgctgtcatataggtatgtgctgtgaaactacaggatttttttttaaaaagaggtttcaagagaactaaattccttacaacttgtgctttgagcccattcacatccagtctcactcgggagcaggagtagcagcagttttcctcaactgacataaaaattaaagagcatttttgactccacaacgtgggtgaaagggtatcgtatattcccaaatgaaactcagcacagccccagctgtgccccctagccacagcggctgcatggggagatctgggaggcaggtgatcatccttatttagatgtgccagagatcatgtgaccagaaaatggaggcgaatctgtatttccagttaactgctcagaagagagatgctgaagagctgtagtcgtgcatccttctcaccctccgttagaaagcctcctctcatcctcagaaggtaggtgggtcctggtgtagcttttaggagatcggtacgggaaggacagaatgagatggagagtgttgttctc

SEQ ID NO: 42071 - DNA, 2300 bp, Homo sapien
accctcaatgatggtttgaaataattttatctgttgaacacacattgtatatgagttttgattatttaaaaaatctccttttaaatatttaatgtctttctattgtggatgaattaattttttaaacatctacttaaagattgttattaggccatttggaaaataaataaaaagcatgaaagctgacagtacacactttggaacacacacttccaaaagcatatgttccaaacgcatatgacttatatgatcataaatgtcattacaatagatccttgatgttcatcagcatgagaatagatcctgagacctttgtggattcgtatgtgcaattccttgcaaccaaaaaagggaaagtggcccagtaagatgccagatgagagtggctgccttggagtagacagcaaagcctcctcgaaacatggaagcccgtgatgggcggggcctgcctgcctacctacccagggtcttgtgtgccctcttcagagcctcacagaccttgagattcaactcagcagaattacagagtacgggtatgatggctttttgaagtggctggtaaatagtctaagccacaaatacccaatccacgagtttcaaagaatgaccacatagacattaatgtgggtatggggaaatctgcaactctctgcacggcatcgttcacatcttcacagtggctgtcctaggagatgtgtgtggcacttccactttctgtggtacacatttctgtgttgttttagtatcttacccatgacaggcataattctgattgctattataatcagaaaaaatgaacagaatcttttaaatcccttgagtgcacatcatggtgttttttgttgagtgacacaatagactgtcagttgatgaattatgtggtatgatcatatatgtgctaggatagatatatatgtggactatgatagaagattatggatgatggagcacaggttgattttgtgtacctgtctctccagtcatccgacaaacatttcttgaacaactagtatatgccaggcattatgttaggggctagcatatgttcttcactgtacttctttaaggaagagagacacccacacagagaaagtggctctcattgtagttaataaaactcaaagaccggaccgggtgcggtcttacgcctgtaagcccagcactttgcaaggatgaagtgggtggatcagttgagcccaggagttcgagaccagcctgggcaaaatggcagaacctgacgcctacaaaaaaatacaataaattagctgggcatggtgatacacacctgtagccccagctacttgggaggctgaactgggaggattgcttgagcccaggaggcataggttgcagtgagccgagataacgccacagcactccagcctgggtgacagtgtgagaccctgtctcaaaaataaataaataagtacatacatacagtaaataaaacttgaagcagccagaacatttttgcaaatgatatgagccacatctgggtaatctgaggtattgggatccctttctgcaattattcattcctccacagctgccacatagaacaagcaaatctgacatcacagctcttttaaaaatctcccagaattctacactggaataaagatcacccagtaaactcagctatgttgattcgtaggaatttctccttggagttaataataatcattagaaaaaaaatacaggaagaaataacttcctcctattcttattgtgataaattgtaacaatagcagacattcgtatatagatcctataagcgacaagagggaaaataggatttgcaaattaagcatctgaataaatattttagaaaaaaatgtttaggatatctgttctttgtctaaactattattaataatggcaaaaactcctttcttacatggtttgggaaaacaaacaagcaaagtgtattttaagccatagcatgaaagtttccactccttctcaaagcaaactgtatttcacttgccttaaataataaatatctctcctaaatacatcataagactggacaaatttgtggaacaactccccgcagctgggcagtttgacattaatatcaaatttcctgttgtcgtttcagaattgtctatttcacagcaatattaccagtgacttgaaagcatttacagacaagtttggttttgatgtcctcatcctgttctccagctatctgtcagaggagcagcagccgagacgacagattgctgtgtactcagaaaacatggagctgtgcagtcaggtgagcccctcctctgaccccgtcatgttccctctgtcct

SEQ ID NO: 42072 - DNA, 2300 bp, Homo sapien
aaagtcatttccggataacctattaataagggaggcaggaatggcggttgcagaaatgtgcgcagagagagcaactaccatgggaataatccagatggcggtctgcttggctcgaactttctggaagaggcccatctttaaaatgcttaataccactttttactatagattccacacatgttcatttcttaacaaactctgagagaggtggtgagatactcttgcagtaattttacccccagccccctggaccatccttttcaaactctccaaactctccacgtttctttttacatgttcaaaatgcaggcagtgtagaatgactgtctgtggctcctccagtcctagctcttgtatggaggcggaggtccctacatacacgaccacatgagattgagctccagagtcaggcccttcgccatgagcatggctgtggacacgtaaggagcctcagtggctccacaacttggcaatcttaatccaaacaaaccaggtaaaacgtttttagttggactcaagataaatcccaggcagagcaatcctcaaaagaaaccagcaaactggatatttggtttctgatttacaatttttttaaaacagacaaaatagcttccttcactccccactgtgtctttggctccaacctcattgaatggttgccatttctgagacacatcctctaccgcaaacctgcactcctcccacctcgtgcaccatctccccttctagctccatctggcaatgtgtacttttcctcaagtcctgtgtcaaacgatgtgaagactgaggtcttcttctggtcggggcagcattatagcatcatgacaaaaagcccaggtgctgcctgcactggaagtcaagtcaattactggtcatgagatcttgagcaagttacttaatttcagttgccacatccataaaatgggatcatagcaggactactggtgtcacagagttacgtgaggtttaaataagttaccttaaaggacttagtacagtacctggtatactatgtggcttaagtattaataggctttgcagtaagtgtagtcatctaagtgagccataacaagcataggcgtgcttctgggagtgctcaccccaagtctgaattagacgcaactactctctactctcctggagaaaacatactcgtaataccacttcaaacacaagctggtggtgtacttgcccagttctaccaatgaactgggatgacacaaaagtaatgaacagatgaagtttcatatcccccgtccccaagagaggatctggtgtcgtctatttagcttccttgcctctcctgtgctctctgaggactgagagattaaaagccacgttggtggatactgcagaagagcaggtggggaggagaatggtatggcagtgacaggaagtgctgggaggcccaatatggagaaggagaggggtagtggggaagagggagtgggataaagggcatggggaagcatggggaagagggagctttcttctgtgtttagacagtgagaggtgcccatgagtcaataaataaaagaggaaaggaaatttaatgagttgccatggactaagcacttcgattgagttacactgtttgaaagatattagtaaagatgggaactcacatttggacaagacttcactagaggagcaccttaggaattgacctgtggatctcaacttcgttagggttaaaagattatttgttgggcaagggtaggaccaataacctcattcacaatgcattcattgattcgttgattcacagagcaaatacttctgaacaactcctgtgtttctggcactgttctaggcaccagtgatataggagccaacaagacagacatgtcactgctctcatggagctgcatttcagtgcatggaggcagaaaacaaacaaacaaataaataaataaataaataaataagataatttttaatagcaacgtgtcaacatagtgtgacgggaaggagcatgatgagacagaaggaaggtttaaactgggaaatctgagaaatggtatggttgtatgtgggttggcattcttgcatgatgggagtggccacctgctttcatattctgaagtcagagtgttccagacagaagaaatagcaagtgccgagaagctggcatcagaaaaacagaggggagatttgtgtggctgcagccgagggagaccaggaagatctgcatggtgggaaggacctgatgatacagaggtctgtaggccatgggaatgggtttggaattttattcaaagagctatgggaagtgactagaaggtttaaagttggggaag

SEQ ID NO: 42073 - DNA, 2300 bp, Homo sapien
ttcacagatttaaaggctgacaaaatacttgctttacctggttggttttaaattacttaagtcagtacagaaagcagacagaatctccagcttccacaaagcccacccctgaatgtcacctggagcttaatattcttatcactctcctttaatcagatctgtggaccctgctgatttgttttcattggatccttctgaataaaaaataattggatcatgagacacacatatacacacagagacagacaagaaaacagacacacattgagacaggagaaatagagcaaaaaaaaaaaaaacccttccatatgtaccttttttcattaaaacatatttattgaggacctgtatatgacatgaacatacatcatgttagggttccatcagtgaatgagacaggcaaggtccctgtctttacagagctcacagcctggtggaggacatagacaaataattatgcaatttatagcagagtggaaaatgtaagttgctatgagggaatacagaaggggcaaccaactcagtctggggatgggaagggaaaagtgtgttggggaggctttctggagaaagagaacttctacgccactcactgtcaaagtgtggtttttggatcagcagcatcggcaaaccctgggagattgtatacatggacattctcaggcccattaagccacacctattagggctaaaattctaaggatggggcacggaaatctgtgtttcatcaagccctctaagtgatttagatacatgtaaagttcatcgagaatcagagcatcacacctgaactgcacattagaatcacttgggtcactttccacagaaatgctgtggccccatgcccagagatattaatttaattggactgggataaagccctggtatcagtactttctcaagtctcaggtgattacgatgtgattttactgtgcagtcagggttgaggctacttctgtagaacagctgaggctgggggctaggacaagggctggaaggatcttacaggtggtgtgcaaaagcccagaggtcagagaaagcctgatgtagtgtgtttggggaccggacaaggctacatacaacaaaaccccatgatttaaaataaggtttgtagatataagttcatttgttcattgtagtacttcttaaactttaacaagcatagaaatcatctgagggtctcatagaaacacacagattctgatttggtaagtaggagcaggggactgaggttctgcatttctataagatcagcgatgctgatgttgccggtctgcagactgcacctcaccttagcaaggttctattgccccagctttccctgagggtacatgtcagtggatgggaactgcagaaggatgtatctatgcattagtcccagggctgacataagggcacctagttggggtgaactgtggatgcccattgttgtgtggacatgttttcatggtagggaggaaagacgcagcctcgcccaacctcctagcctgctcttctgattattatccatcaaggtcgtactgcttttagctcagcagtaactcccctctttctctcctcgtccctcccacgccaatctagctgagtgcctcccccggccaggccagccgaccagatcattaagtgaccgccggagtgctccgtaacgcgccagccagccagtgaggcgctgggcgaggcgggggctctcctgggacccgtctccctcttcccaccttcccccgctgaccgcggcggtgcctgcggcagagcctccctctgcagcagccccttgcacttggctcgcacttctgggcgctgtccatggttgcagcagctttcggcgcgccacgtcaggaggccgcagcacggccctgcgattggcggaggagcccctcgccatacccctgcacctccgcccacgcgccacggcgcccgaggcgcgtgccagagagcgtgcccggcgcgccccggggctcctgggcggcacacccactttccttattagggcagagtcgggtgcccagagccggcggccgggcgaggggtggggcggggagccctgggcgagacggtcgagggcgcaagcacagcctccgccgcagccgcctcagagcggcaggagggagcagtcggtcgctgcgccccggcgggccactttcccgggaccccgctcgtcttccttgggccgagattttccactgcgcccctccgagtacccgggttccaaacccctagccacgacatggaagaatttttgcaacgcgccaaatctaaactggtaagttgagtgagcaaagctgtgtgtgtgcgcgcgcgcg

SEQ ID NO: 42074 - DNA, 2300 bp, Homo sapien
ccatctagcctgctaccacaatgcccatggggaatgataaggacaagcagcccaccaatgacatttacttgtggacaaaagaattaagattaggagaaaaaaaaattccaagattactaccagtacaccaaaactttaaagacgaagagctgtggcatggaaggtatacataaaactgcaagtcctacttgcaaagttagagatttattgtaaagttagatgatattgcagtttggggtcattcagatgctctccccctcttttgtttttccatttgatcaaacaatgaagtatagcattttaattgtgatctagagaaagaataacatacactgacatacttcctaatttgaaactcgagtttttatggtagtcattgggcttatttttcaaggtacaacagaaatttggtttaatggtttaatgagcataccttttacatgatgatgttaatatatttttgcttacaaacttccttagatggattaagcaatgcaaagactgaatgcaaaatgttgtcttttagtatttacaaagcatgttcatatacatctaacactagataagaattcggttacaatatgcatccacttatttctaactcttcctcagcagaattttttttcattgctttatgcttatacctctaacttttcagcaacatcccttccccttcctcacttccacaaaattttcctagatcgtagaaaactaatatgaaaacgtttgcaagatacttaagatggatttttggagttctggaaattcttgtaactttgaatttgcagcgctagatataacagcggaattttgcagctactgtgtatctggcttcttattaatagtgcaatggcaaaatgcctcattatgtagagctcttccccttcctaggcattttagcctctattcgtttctccgtgcaggtattctgaagcagactgttagctgaatgagagagaagcaggtggggtggtagccaatcagaagggccaagttccagttcttccacagaacattggttgtatgaccttgcacacatccctaacacttcagcttcattatatttaagactaggaggttggagacctcataaaggtccttcaaatataaaattatatgaaaaacattcataaactcaggtaaaaacttacagtttttgtcaggcattctacttgcaaaggcacaccctaaacatttaattttgaaaagtcggtgactatgcacaaaaagtagtaaaatgacacaggaattaatagaaatccatcattattcatttaacgtgtaaagagaaaacgctcaatgtacactttttcggtcctgcagatgattaattacagttctctaaacctcacatttagcatctctgtgacctcaggcctttgggattacttctaagtaagaccaaacaggtcgaaagatctgtaattgtaatttattttaggtcagtggttcggtggaggcataggggtcaagggtccagcactcccagtatttcttggagggtgttcagcagtttccagaccggctgactccaactcttatctgcagggaagcgtgttactctttggaatgaaagacagctccgtataaatgacttgaccaaaaatgggtgctcatctcagatgcagggcagggactatgtaactccatcctcgactcgcagcaggaagttaactcctcctgagagccaggcggtcggaggaccaggcggggaggttacaggcaccaagacacccaggctggctggaccctcccaccctgtaatgatgaggggagatgctccctgggacagcccccttgaagcttctggcgacggggctgggatccgcccacccttactcaggggcgagccctgtcatacgcgtggaagcggccaccaccttctagggggaggggcgttcccgtcgggcgtaaccgccccgccctggggggccgctggggacgctgatctgcaggagggggcggggtcggaaaaaatccggtagctccagaccggtgtcccgttgccaggcgatggggaggaggcggggccgacaggaaagaggagccgggctcggcgcgaaaagggcaccctccagagccgcggccgcgcagccgcctttcctccctctcagggctgcgcgcccaggtctgcgccgcgctccgcctccagccgcgcgcagacttgcgcacgcgtcgtgagagcgaccgcctccgtctctcgctgggctcgctagggctgcgcgttgggccagcgggggcgccgcagctgaagccgccccggagccggtgaaccgaattacctcgagggaggggcgtgg

SEQ ID NO: 42075 - DNA, 2300 bp, Homo sapien
tgagagatcttcttggtattgttacctatttttattgcactgtcatcttgagaacatggttggtatgattgtgggatttttaatttgttgagaattgctttatggttgagcatgtggttggttttagatacgtgccatgtgcatatgagaataacgtatattctgtttttgttgggtgaggtgttctgtagaactctgttaggtccatttggtgaagtgttgactttaggtctgtctaatactgtcagtgggtttttgaagtctcccactattattgtgtggttgtgcaagtctctgtaggtctctgagagcttcttttttgaatctaggtgctccagtgttgggtatatacgtatttaggatagttaagtcttcttgttgaattcaaccttttattgttttgtaatgcccttctttgtcctttttgattgttgttggtttcaagtctgttttgtctgaaataagttacccatgcctgcccttttttgttttacttgcttgatagatctttctccattcctttactttgagcctatgggtggcattgcatatgaaatgggtctcataaagacaacatacaattggttcttggttcttcatatgaattgccattctgtgcctttgaagtgggatgtttagcctgtttacattcaagatgaatattgttatgtgctgatttcatcctgttatcgtgttgttagctggttggtatgcagacttgattgtatagttgctttatagagttagtggtctctgtacttaagtgtgtttctgtggtagccggtaatggtctttcatttccatggttagtactcccttaaggacctcttaaaaggcaagtctggtggtaatgagttcccttagcatttacttgtctgaaaatattttatttctgattcacttatgaagtttagtttggttagatatgaaattcttggttggaatttcttttctttaaggatgctgaattaggcccccaatttcttctggcttgtaggatttctgctgaaaggtctggtgctagcctgatgggattccctttgtagtagacctaccccttctctctagctccctttattatttttttctttcacattgaccttggagaatctgatgattatgtgtcttggggatggtcatcttgtatagtatcttgcaggggttctatgaatttcctgaatttgcatgtcaacctctctagctaggatggggaaatttttgtggacagtatcctcaaatatgtttccaagttgcttgttttctctccctctctttcagggacaacagtgagttgtagatttgatctcttcacataatctcatgtttttgggagatttttttccattgaaaagttatttttcctttatttttgtctgagttgatactgaagaaccagtcttcaagttcttgagattccctcctcagcttaatctgttctgctgttaatacttccagtgatattgtgaagttcttgtagtgagttttttagctctgtcagatcagtttggttgtttcttaaaatgactatttcatttttcagctcttgactcattttactggagtccttaaattccgtggattgggtttcaactttctcccgaatttcggtatcttctgagttttatgcccatcatttcagtgtgattaagaaccatcactaggctgggtacagtggctcacacctgtaatcccagcactttgggaggctgaggcgggcggatcacttgaggtcaggtgttcaagaccagcctggccaacatggtgaaaccctgtctctaattaaaatatagaaattagctgggtgtggtggtgggcacctgtaatcctagttacccaggaagctgaggcaggagaatcacttgaacccggaaggtggaggttgcagtgagccgagatcatgccactgcactccagcctgggcgacagggcaaaactctctcttcaaaaaaataaatatataaaataagaaccattgctggggagctactgcagtcattttaaggtaagaagacactcaggcttatagagttgctagaattcttgccctgattctttctcatctttgtgggctgatgttcctttaatctctccagttgctatcctttgaatgaggctttttgcttttatattcttggatgccccaagggtttgaccttgatataagttgagtttagtcgactggcatagtttcttgatgatttctgggtaccaaggctcagctcagcactcctggcatgcatgctataaccctggggtgttaggactaggcacatgactttgttctctgtctcctcgaggtt

SEQ ID NO: 42076 - DNA, 2300 bp, Homo sapien
gcccatttcttttttagcaatgaatgatattctcttgtctggatgcaccacagtttatttatccattcatgtactgaaggatatcttggttgcttccacggtttggcaattgttaataaagctgctgtgaacatttgaatgcaagtttttgtgtagacataaattttcagtttcactgggtaaataccaaggaacatgattgctaaatcatcaagaaacagtttgctctagtaattggaaagaaaagtaaaccaacgtgacagtgttccctagtaacccaggaactttatagcagttactaagttttttttattattattagttttatttatttttattttttgagatggagtctcgctctgttgcccaggctggagtgcagtggcatgatctcggctcactgcaagctccacctcctgggttcatgccattctcctgcctcagcctcctgagtagctgggactacaggcgcccgccaccacgcccagctaatttttttttttttttttttttgtatttttagtagagacggggtttcaccatagtctcaatctcctgacctcgtgatccgcccgccttggcctcccaaagtgctgggattacaggcgtgagccaccgcgcctggccacacttattaagttttatgtttattcttatgtttgctttgccaagaacaaaggattaaaaaacccttgcaaacagaaaaaagagtatacaattattattgcgcttatttctgtaatatttttgtttctgttttctcagagggagtgaatagcagtttcttgcacaaagtaaatgatcagtaaatggttcaatgaatgaataaatgtgtaaacaaagtgggaacttttttaaggcttcaagtgtggctagcacttggagtagaaaacaggtttatgtgctaagcattaggtttggagaactctgtgcaatttgtggcatttttttctcaggaattgtaggattagtttgtagtcctttcttccagtctttagatactaattttctagcaaccgtaagtcatttggtgatgagagttttaaaagctttctataaattctcttctacactggttttcttagtatagcacattttgagcagaagcagtaatattaaaatgggagagttcctttattcccctcgcaggacatgccacaggggtgtgtatttccctagagggagcatgcagatgggcaggtgcagaggctgtggggagtgcttttgggctccggccccaggacagcatctaggggtaggtgtctacaacccctgaagcccaaggggcatgtgttacagtatgctctttcaactttgccatctgcagacagcttttgttaatcacctcgatagaccgtcttccttatcgcaagggcagggggccattgtgactgcctgagttcttgcccagtgtaccagaagaattggatgacatgtgggctggaaggatgagtgcaaggttttattgagtggtggaggtggctctcagcaagacggatggagagccggaagtgggggatggagtgggaaggtggtcttcccctgaggttgggccacccagcagatggactcttcactgacagcccctagttgaactaccccagcgtccggacgtccacgtccttcctcttctctctttttctgccatgctgccctgccactctctgccactctccaccactcttttcctctgctcttctcaatgctcagctgcttgtatctgtgcccactaaggccttgggcttatatgggcacaggatggtgggtatggtgggccaaaaggcaacttttcaggtgcaaaaacagaaatgcttgttctcgtttagggcctccagtttttaggcttgagggtggggcctttgctggggaactgccctcttctacccagtatttccctgtctgctgtccatatcagtataactaataaagactgattacatggtaatagggtttattttaatctaaactaatatacagaaaacttaatgtttcatctcattcccggtctgtcttctgaacagctgggttttcaaggactctgatgatttcctttttagttatttcagtgatccagggccagaattctcttcctgccctttcattgttcctaaaaaccattctagtttctctttagttgattcctgttttttcttaccttacctcctatctaggtttagaagggtatgagacttcagtgttgtggcacatgaggaggtaagggaattgtgaggagaaattaaatttttagagtttaaagaacaaagaagtaacttgacttgggtgaggtagaatccaaggtc

SEQ ID NO: 42077 - DNA, 2300 bp, Homo sapien
aatagagactgaggtaaatatcatagtatttatgtctggaaacggggatgcctcttttctgctaagctattagcttggggtggggggttgagcttaggttggtttgaattccagattaatacgatttccttcactacattactgcttcagtttcctttagttgtaccttgtgcttagggtggctggaggctgtgttgctcagattttgctccgtgctgagcctttgacctttcttctactcttgtacctcagaaaattctctttccacattcttagctctttcctagatgttagaggctcctgctgcttgtttcttagtgcttgtgagcttgatgtatttggggagaaggcaaggtggtttggataggcttgttagtgttcttgtccattttcactcctagccagggctgtttctgtgagtctcagaaatggagtattcttggccatcctgcccctcctcctcatggcatctgattgatatctctcgtatttcctatgtgggattgactatccttcccttccccagcagagggagacctctaatcatctggccccaggagagttcttgttcttcccctagagttttattttattcttgtccctaggatactgtatcttcacctgtgccctgagggaaacaaggtttactgcccttcccctagtttcttatggctattgttttgagtagttgataatcttggtggtgctttgggccttttctgcagtggaggctcctcaccttttccagggtcataccaaggaaagccttctcttgtttcccacttgcacccatctcccgtctttctcaagagctcctcacgtgtgtggctctcagggattctgcatctcacattagtccacacttatcctttatcattttagctgaattattcttacctatattgtatagtatctgacatctctttctcctctctaccacaagtgagctggtgcttattttctctctctccctgaaggtacctgtttgtccttagatttttagggatctttgttgtcctgtgacctcagattgctaatggttttaagaaagttatgatatcatagtttatcgggttttttttccttttcttaaggtttggaggggccctcactccagctttgtgcaccctaggcagaagcaggactgtagacttcttttcagccctgtcttgtacctcagccttcggaggtcacttatacctctggttctggaggattctttgttctgtagttgtaactgatttgcttgttgatggctcttcagctccctgttcttgcttgcttctagcatttaggagaattgagaaagttatgagcttagtgctctgtccctcttccaaaattttttttaacattttacatctcctgttgtcgccaccatttttaactgttattgcagagcttgagatttttaaccactgtaggtaatttctggttggcaattaagatggccctttacaatctgataaggaacagaagtatagcaataggaggagactcctttgaagaatccagaaaaatctattcacatacctcaaatcaggaatagatttcagtaaggtgtagatatacagtgtttttcaaatttttgtcagtcaatcaagaaatacatggttactctcattacgaaagtatacttgcaaaatgaaaatgcatattcagatatttcctcttctccattaaaaaaaaaagaaaaaaagctggagccacacctactaccttgattttatgacccacaaaggaaattgccaccaccaatttgtaaaagtttgtagtgtaggttccaataaaccagttacagtagaattgttgcctcatttgtacttggcttgtgaatacttgggagattttctaactatgttttgttattttttactgttttatttttgtactgaaaatacatcatttcaaaaatggattgtgataattaaattttctcttattaaggctgtttatatcactggaaaagaagttttcagcttcaaaatggtttcttacatggatgcaactgctggttctgcatacacagatatgaatgtggttgacattcaggttaatttaatagttggttgcattgaagtagtttttgtcacgaaatttctatattctatattggtaagtattttattaaattattatttattttatactaattggaaattgctatatgtcaaatatggatgaagactagtaagaattccttgcttgagattttttctgattttttaaatcttctgggtaccatttattatacataataaatgtgtagttccttatttatataacatcgttttgacata

SEQ ID NO: 42078 - DNA, 2300 bp, Homo sapien
tgatcatctgcttaattgtaactattttggatgtagtgtataccattttaggaaacaaaaactacctacatgctttccaaccttgctctgtaaaatgtctttctctctgcttagagagcttaatttagaatattatttaccagctttgaaactctttcattcttccagatgctgctcattattgttagtatttgtgggaatattgtcactaagaagttgggttcatcttgacagttttcagttaagatctactttgactttctaaccatgtcaattccaaattgctctttggacttttaagactttctgccagttgtttgctgtgttgtttcaattttattgtttcaacttttttctcccgtttggatgtttttgctcaaataatgagtttttccttgtctccatgtaacttcatttgaaccttcagccatttgctttgacatacttcacattgatattttactctctagtaacctcttggccttcctcctcttcataactctacttaaaattcattcctttacagacatcttttcaagttaactggctgacttccagcgaatacttacaaaaatatttgagcttctgaaggagtaatagaagcataagtttttgtttgtttctttgtatttttttcctgatgcttggtatgcatctatagaagcataaatgttctaaacattgtcaccatagaaatataagatgtaattttgatacaatgaatacatatatattaggatataagataaactgttgcccaaatttgcaagacagttggccctccactaagcaaagagagagaatagaaaatggagggtataccaattctctcttagtttttgacttagaagttttaaatatatatttcttctattcacatcttttttggcttgaatatagctgtatgaccacactttacttcagtaaaggttggagactgtggtatttttttctgagctaccttgtgctcagataaaacttctattactgtggaagaatagaacagatattaggttctagatgtcctttatatgggataattaaggagtgtattattaagtcactttttaaatagttgtttttattaacttgtttatttgacatacctattactaggaaagtctttaaatagaaatatttttatatttaaacattaatttagtggtattgatttttctctcataggttttgcagccctgtgacttgttttatcaaactactcagaaaggtacagatccacaagtgatcgatatgtcagtaaaatccctgacactaaaggtaaattaaaatataatcatttgaatatttagtgcacttaaaaaaagtagtaaagcctagaaagttattatagcaagtcttttaattgttatgcaaacaaaataggtgtgtttttgaaaatacgtttttatgagatatttacaaagtaatattatttaatacacattttatgaatgttattctatattttattatttacatttgtgtggttaacatctaatatccctaataaatattattgaaattactttatacttcatcagtttaataatatctgcaattcatgtatattaataatatcatgtaattcatggaataatatctgcaagattcatgtaaatatctgcaagattcatgtaaacacataacaagaattatggtaatttaaaaaattttataaacaataaattgtatcttctattttgtggtagtaatgttaattcagtatttaatttctcataatatatatttaatatttcttgacgtagtatgtttgaaagtgttttgtatagacttattaatttttttccatttaggtttcaccagttattataaatactatgattaccataacttcagcactgtatacaactaaggaaaccatcccagaagaaacggcttcttctactgcacatttatgggaaaagaaggatacaaagactttaaaaatgtggtttcttgaagaatcaaatgaaactgaaaaaatagctcccacaactgaattggtacccaaaggcgagatgataaaaatgaacattgattctatttttatagttcttgaggctggaattggtcatagaacagtacctatgcttctggcaaagtcacgtttttcaggggaaggcaaaaactggagttccctaataaatctgcactgtcagcttgagctagaagtaagcatatttttccagttttataacagataatgatacgtatggaatattatgacagataatgatacatatggaatattatggaatcttgtgtagctatttaagcttattgtaaatatgatattgggt

SEQ ID NO: 42079 - DNA, 2300 bp, Homo sapien
aaaaaaaaaaagaaaagaaaagagttaaagttgaatacccttttttttttaaggatatagacagaatttctgaatatgtggataataatctcttctaatagaaatatgaagaattagaaatatatgccttatacttttatgtaatgtagaatcaaggaaagatgcttaaaaaggggttttatctggactaaattgtgaagagcgaatatgtactatgaagttagccaggtgaggaaaatgctgagggagtgcttataggaagctactgaatggcatgtagactggtttttatatagaagaaataacagggctaaaaaacatggtgggaaacaggatggaagatcatttttaatttaaaaaattctctctgtaggtgcattattataatgaaatgtttggtgtatgggagcctttgcttgaacccttagaaattgatcagactgaggattttagaccatggaatcttggtatcaaggtatatctatatatgtctatgtgtgtatatatatatatatgtattttaaaagactttatttttttaagaacagatttaggttcacagcaaaattgagaagaaggaacagagatttcccgtataccacctacttctgcacatgtatagcctccccctttattaacattccctcatcaacgtatatttgaagactgaaaaaattttccaaaattgagaatgtttataccacactcgacactttattttaatcacaacaaggttcaggttgtctcatcatgagccttgcccacatgcttccttgtttgccctctgaatataattttcaaatctaaggccaatgttgcctatgcttctaatacaattatgtaacaagtattatgttacttgttacataatttagaacaatttagaacataatttagaacacagtttagacattgttctaaatattttaatccttacaacaactcttggaggtagatacagtttttatttaacatgtgaagggactgagaccagggaggttaagagacttcttgaagtaataatagctacaaagtggaaaagatgggatgcaaatccagctgcagaggcgttaaatccactctaaaccactatgctataatgcctgtgtcatcatcttgtaggttgttgtctatcctgagtttccttcatcctttggatgtttgcatgtgtgcaggaatgtatattatttgtttgaaatatattgtggatttatataatcatgagaatcggggcctttaggtggatgaaattttgcttctgaagcaagagactgcagaattactcacgtgtttcctacctaataatgacttggtcaacctgcagacagattttcagtggcttaaagccagttaaagtaacaacagaggtgactagcttagcatgttgagctcttttcatattagatcacttaattttattttccagatattttagatgaaggatatgaaaaggaattccttggtggtttttaggttagaatacacatggtcagcagatctgtgactcctaaaaaatggtaaagggtattgattcttatgagctctaggtttataacactgttctgctactattgtctgcctttgtaagtctctaggtttctgttctttattattagcatgaccaatacattaagttacttttttctgtctgagtttttatgttgctttgaagtatgtgcttttatattcagatcccgggtacacatagtaattttaggtttttatttttccttctaaattgtgtctgccattttactatcactgatgatgacatgatttattttctctaatacttctgtcctttatgaccttagttggctgatgtccaagtaatttcaataaggcaatagaacttactgaaattagaaaagataaaatgtactgacctttctaatgttggtattgggatttgtctagttatgttgtgttcttagaatttttccttatatttctatgatttatcattttagatgaaaaagaaagcaaaaatggccattgttgagtcagatcctgaagaagaaaactacaaagtgccagaatataaaactgtcatcagtttccattcaaaagaccaattaaacattacattatccaaatgtggtcttgtaatgttaaacaatttagtcaaggtaagaaaagaaatttgaaactttaaatattgagatacttgtctgattgatctgtctgttgaataagaagtttaataacttagttgtcatttgtcctttactgttctccttgtcatttaattttacacatttcattttatttagcataactctttcttattaggcatttac

SEQ ID NO: 42080 - DNA, 2300 bp, Homo sapien
ttaaagatctaataaaaattagaatactagtaaagaataggtaatgcagatattcttttgcaacaagtatgagaattattattgaaataacatttaagaactagacttcagtgacaaaaaagcatgctacattatgttgtattcttttagtgctgattttcttaaaagattgtatactttgtgaagttgctttttttctttcatactctgtgtggtttcttcctgttgttataggaatccatacatcttaagattttatgtaaatatttcatttgcagtgcttatcaaatggaagaaagtagttcttcattgtcatctattataggtttattttacttttagaattaccatttgctttttaaaaaaatttttttgagactaggtttctctctgttgctcagactggagtgcaatgatgcgatcatagctcactgtagtctcaaacttctaggctcaagtgatccttccacctcagccccccgagtagctgggactacaggtgcatgccatgcctggataatattttttaatttttaattttgtagggacagggactcactatggcttgtcttgaactcttgggctcaagtgatcctcccgcttcggcctcccaaagtgctggaattacaggcatgagccagtacacccagccgtttacacttttctgatacatgtctcttttggaggaaaaagttaacatatttatggttttaaatgtgtatttccatattgaataacaaattatcatagtggttaagaatttgtactttgctgtcaggtagatttgaaattgcatcctagctctgtcatttgctagctgtatgttcttaagcaggctttattgcttttctaaatcttttgctgtggtctgtaaaatgagaataataataaaatttgcttggttaagacatgggggaaatcaaattagattgtgtatgtaaaggatttggtacagtgcctcccagacacagggttgccatttatttatcactctagcactaccaccaccattgttattttgtggaatattatttaacttgtaaagaatcaagaactccttacttttgctttaattaatttaaaatcatgagatgaagagattcctatattataataataggaaaagaataggatagagatgctggaaaaactggtgagatattcagatgtactgtcaatttatatttctgttctcatagaacttttaattggatgctgttagtgatcacattctgtctgccagtttccaaagggtgtgatcagtttttagaaagacaattgagccatggtgtggggaagggactagaggggacaagagcggttaggggactcttaaactgagacgtcatatagtgacatgaactaagataatagaagggagggtcgagggaaatgagcagtttggagagatacatatgacgtaataatataaacagtgattggaaatgggtgatgagggattgtggaggtagtagggattacttattttggattaccatcagtttttgcccacattttacgttgttttgtagttttcaaaataaaaatcacgagtggttaagattgtctttttgtcgttgttttaccaattatagtgttttatgtttataatttccaggggagtttcccattatgttatttaatcttcacagtttgtcctttgaagtaagtcatttagaccattttacaaatacagtagctcaaatctcagattaaataccgtgtagaggtttacacagttgacaaagttagaacttgaatgtaagtcttctgacttgttctgataggtatttcaaaagcattttttgcagcatttggaatacataaatagaattttgaggcatattattctgcaacattttaaattttgttttgttttttttttttttattacagggaattgaaaattcggtttttactctaagtgaaggacattcagcccagatttgtactgcacagttgggtaaagccaggctacatttaaaattacttgactatctcaatcacgattggaaaagtgaatatcacataaagcctaatcagcaagacattagttttgtcagttttacttgtgttacagaaatggaaaagactgatttagatattgctgtccatatgacttacaatactggtcagacagttgtggcatttcatagtccttattggatggtcaataaaactggccgcatgttacagtacaaagcagacggaattcatcgaaagcatccacctaattataaaaagccagttctcttttcttttcagccaaatcacttttttaataacaataaggtatgcga

SEQ ID NO: 42081 - DNA, 2300 bp, Homo sapien
aatagaagattccctccctcctggtaaagccgtgttttatacatgggctgatccggtgggctctagaaggctgaagtggagatgtagaaaaagccatggtgaagtaacacagaaggatgtaagtattgggttattatggtgttcccagcagccttttttaaaaaaggtatttgggccgggtgcggtggctcacgcctgtaatcccagcacttttgggaggctgaggtgggccatgagttggagatcagcctggccaataaggtgaaaccctgtctctcctaaaaatacaaaattcactttgggaggccaaggcaggcggatcaccaggtcaggagtttgtgaccagcctggccaatatggtgaaactccgtctctactaaaaatacaaaaattagcctcgcatggtggcgggtgcctgtagtcctagctactaaggaggctgaggcagaagaatcgcttgaacccgggaggcagcgattgcagtgagccaagatcacgccactgcactccagcctggcgacagagcaagactccgtctcaaaaaaaacaaacaaaaaacaacagtatttgattttcagccttcctagttttaaggactttttgtggccacacttctgaaaaactgccaaacgtcttcaaaatagtattcaagtatttacttaaccaaaaatgtttaaaaccaaaagtagtcttattttgtttacatcatttgcttctactgtgttataaagaataaagttgtgtttagagaagtgctttcagcattcacctgaaaaacaaatatgttctctgcattgacaatcatactaggtagatttagcttctgtaaggaacatttaaggatccactgagtgaactaaaacaaacttatttctgagtggcaagctatgatgataaagttatgcacatatattttctggtaacattttaaatactttcagaaaatttttaaaagtttttaatccttcaagattcatcttaatttgactcctgatgtttttttttcttaccactggtgattttttcttcctgcttatcagtaggtggtattttctcattgtctttcagtgctgctgttgaggagtctgctgtgggtattgtttacattgtatttaagaggattgcctataagtggcctttcagttttaaaaattcattactattagatttattcaggaaaaaaaattgtactttgatataaaaagtcttattcatttgatctgttgattagtactttgcatatttatatcatagtgatagtttgaagcttataaagataaatcagacattcactgtaaaatattagaaagacttcagtgaaataagttagtcttcttgattctcaatgtggttttagtgatatacatatatatacttagaaagtattacaagtaaggtaagtatccccagataattattttatggtaacaactcacagtttttaatttctgtatattgcaacgtgaaggtatactatatagtaaaattttctgaaaatcagaatattaactagaaattaatggctgaatattaattatgagaatttgctatgtttatcttgtcattgaccctcaaaaccctgatatcagcacatttatgtgagattcctgcagaaatagcctcatgatgaatatacatgctttgtagaacatacaattgagatacaagatattttttatcctgtttgattcagctatgaaaggaaatgtgaatttcaaactgaaacaacttttaatacatatcacattgctgtagtcttagaataaagcagaaaaaaatactttgtgttacagattagcctacgtgggaaggttcaattttattaaaatgtttaaattaaaaaagtaaacaattggcctgtctttatgagtaataattttataacagataacatcaaatgatttcaataatgtaaatttgcaagtattctacaaatattaattcatttagttgccactaaccccatgaagtaggtgccattaatagtctcattttataaatgtgaaatctaaatttcatgttctttgggaccaaattctaattttttggtttttttttttttttggtggttttattctaggatatgatgatgcctatagatttgggggaaaagacaatatatttagtttcattctttgaaggtttacaacgcattattttattcactgaagatccaagggtatttaaagtaacatatgaaagtgagaaagcagagttagcagagcaagaaattgcagtggcattacaagatgttggaatttctcttgtcaacaattacacgaagcaagaagtagcctata

SEQ ID NO: 42082 - DNA, 2300 bp, Homo sapien
ctccacggagctaagcagccacctcatctccactcagcatggctgcagtgggtgtcttggctgtgagcggcccctgggagggtgcccaccacgccccatgcctagtgagagctctccaaatccacagaccagggcaagacttgtaccgacattgccaatgggttggcttcctttcctttgcctgatgcaaggttctctttcctttgagtaggaaaatgcccagataatcagagaagtggaagtggacaaggtctccatgctctccagggagcaggtggaggccatcaagcagctctggcaagatccaggcatccaggagtgttacgacaggaggagggagtaccagctgtcggactctgccaaatagtgagtacagagcccaccctggccgcccgcggtgctttcaggcaagctcggccacacttcaaagaagtttctcgctgaacgctgctgaaatgcggtgcacagtggcagcgctacttgcctttgctttcccatatccctcctgacctcttagtgccatctctcaccacctcctaaagccctcggtcactctgtggatcgcagacctctcttcctgccgacacccgcctgctcttgctgtgttctaagcctgtcgttttcaatgagagactcaaatcaaatctgaggtcccttaagtgggactgatctccttaggagtgctgaaattatctgatttaaacaagaaatacccttgcttttggcttctactttcctcctctctatatccctctgcctttctggtttccccatcagaagacagcaggtccaattgcgctaaaatctaaagtcaagtttagagcagcggggccgtggacccatcagctgctgatctggtgctgtcctctagtggcacagataggaggctgcgctcgcagcacacacaggaagctcaatcctttgtttattggctgcctgcgaaggcctacacactgtattttggatccatacagctcaatttttaattcattaatccttgaaggtaaaaagatttctatttagatgtcccagcatgcaaactgtcccatagagatgacagattttcactttcttgggcatttcctgttcacatctgtaatcccagggacttgggaggcagaggtgggaggatcgcttgaaaccaggaattcgagactagcctgggcagcagagcaagacctcgtctctgcaaaaattacaaaaattagctgggcagctgctcgggaggctgaggcgggaggatgtcttgagcctaggaggttgaggttgcaatgagccatgattacactcctgcagtacagcctgagtgacagagtgagactctgtctcaaaaaaaaagaaaatgtaaataaataaataaataataatatcccggggcaatgcctcctcagtctggtcaccgggtaaatagtttgatatgggtccttcttaaagtggcaataactcctgcttctgcagctcagctctttcacacctgtcccgtatcatcttccatcctctgagggctcagaaatcccttccccagacgtacctccttccctttgggtgccactgtcaccctctgagcaggcattgagctggacaaggcattgggcaggaaagaaagccagaagtgtcacctcctgtggtttcaatgggcttcctttggtgtttatcccgggctgagaattgaatgtcattaatccaggttggcacaaccaatctaagtacaggaatgtttagatgcaaaaaagcatcaaggcaggaaaatacagaaaccccactgaggtgttagatcagcatagagaggtggaagaaagaaagagtgccatggaggagggcttgcctttgacagctcgaggagccaggaacaggtacgacgttcctgagccatacctgaggtggcctgagttacctgcctctgtgaaggcctggggattggctagggctcttgatgtagatccatttggaaaagatccaccagacctgctacagaattcagtgtaaccctgaaaaccatgggggcaaggccactgacatggacgaggggcgtggctagggtggtgagagctgtcacagagaaaacagcctctcctaaacccagtcgcccaaccttccaaaccggcaggactcaaggcacttgcacgttttctccatctgggccagcggttttcaacccctcagctagagatgtctgctgattggacaatgtgatgagtgcttgtgatgcgccaggcactgtggtaagggctgcaggtattatacaaccagtgctctctgctctcagggaatatacagtctggtggagcaactcaggtgta

SEQ ID NO: 42083 - DNA, 2300 bp, Homo sapien
gtggttccaaagtcttcaccgtttcttacaaaagtgacttcccctttcctctaacactaagacataaaggaggaagtctcagattctacccctaaacttgtcagtctgatctacttctgtgaaccccctttgtttttgggtggcccattatccattctctctccttcgggttacaactgagcttgggaggataacctttcgctcgctgtgtgcatcttggcacacctgttaattcaggtctcctgctctcctgtggctaagtgccaggccactcagactttgctgagctgttgaaccttgaggggagttatctgataatagtggggacggggaaaaggaacagatgaaattcttttattttggtggcaactggccatcaggattttttttttttttttttttggaagtgagacccctggagttttcaggttcctgtccattctgagactgtttctttagcctgctccttgattccatgacctcactatagcctttccataaactctcttctgcaaatgtgagtcagtttatttctgttgcttacaacccagaaacctgactctctgccccaccagtagagcaaaggcctttctaatgcgaacagtcagggtcaacgaaaaaagttgttttgcttttaatgtgacacatatattagcatctcccatgaatgtttagtttgggaaatgccctagatgttctggattttatttctgaatctattcaaaggctgtggattccagccatatggtttgcattagttttctattgctgtgtaacaaattgccacaaactcagcagcttgaaacaataccttttgatgatctcaaagtttctgtaggtcggaagtccaggcaatggtataactgggttctctgtgcaaggtctcacaaggctgaaatcaagatgtttgctggctgtgctctcatccaagctcattcaggctgatggcaggatccaggtcctcaggactgtaggactgaggtccctgttgtctcatcagctgtcacctgaaggtctctctcagctcctagaggctgccctcagttcctggccatgtggctctctcacagcatggcagtatccttcttcaaggctagcagagactctccttgaactctagatcttctttaatgggctgattaggtcagaacacccaggattatctccttttgattacttaaagccactgattagggacttcattacatcgggacttcactttgtatatcccataatctaatcgtgggagtgacagccaacactgtcctgcccacacccaaaggggaagagattatgcaggacgtgtacaccagggggcgtgaatctcagaattctgcccagcacatggtcttgttcccagttctctggggagcaaaactacctcttacttttccctcggcttatatttttaaagtgtctacgatacctcatatagggttattgttagggttactgtctctgttcacatgatgccccacataaggaatatatattcttggagttaagaaccaagaccccttatgcttcgctgagagactggtaggttttgccttgtggtccataggaatcgcatgagtgaacctgattctcttttcactttagctagtgggaagctcagaaacaaatatgtggctaagtctaagtaactgagtagaagtttatgagtacttgtatcttacaatacctgtgtttcattcccccacaggcccctgcccagcctcactctttcattttaattcaaaaacttttctggcactgattactattttaaggtagacagtcttataagtagcctctaatgtgttgtataaggaaatagggtatacataaaaatgaaataaaataataataatagctaatctaaactgagccattattgtgaccacctagtataagcatgatcatatatgatctttacaaccactccaggaaataagatactttaatacccttatttaatagataaggaaacagatgaggcctagagaagataagaagtagtaccagaacaaccattcaattccaagcgtgcctgaccaacagagcctaggctgttaaccatcacaccctattgatttaaatacatttacattttaaaggaaggaaagagtggggacagttggctgcctgtgcaactctccagactagaaagagaccattacacatgttgtaaagcccagaggaatagttttctgcacatcttgcctggcaagtgctcttctacaatgtaaaacaaacttctctgaagtacagaacttggtaatagctaaaccccgcttgaaagtagaaaacgaagttcc

SEQ ID NO: 42084 - DNA, 2300 bp, Homo sapien
gattacagacgtgagccactgcacccagcccaaattttctaatgaacaatgaaaatcaaccaaacagccatgactcacagcaagctacctttttgatgtgtgtcccttcagtctcttaaaaatgtgtatgcgtattcttatactaaaatcttatcatactctttatatttttggatcttgcctttttcattcaatatattttgaggattttctccaaatttattcacatgtttactactcgcatatccacatatttaatggctccaaaacatctcattgtatggataaaccatgatttaagtgatctcttccctgttgttaggtatttaggttgtgagtttttgttgttgtattggcaataaaacctttgcatcagtcatgaggcttctttctagttatttcttaagggagaaattactggtttggccgaaggggacggacatgtttaaggcttcagatatatactgccaagctgactagcccaggaaagttgtacagatttgccctaatcaatatgtttcataactgtttttgaaatcttgccaactttaaacctaataggtcagtatcagtaattcccgttaacgtaagagttcaaatttgccctagttttaatcatttaaaaattttttataatttttaaatgataacaattatgatgcaaccatgactttgagaagccaagagatcttattctcaaattgtaaatgaatccgtaagagctaagagagaagaaacaggctattaaatggccaaagatcaaatctgaaatgtccaggagttttcctgtaggggtcactgttactgtcaatttatgcctgcaagaaaactaaaatagtcacacattaaagcatgtatgcacatttttaatgtctgattcctctacatttcttaaactgtaaaataataagaacatgcagccagatagcatcgcgataccaacttctttatataatgacacgtaccattccactcaatgtgctcctcagtttgaatttataaaatatatgctactcaaatgaaaggcacttatgcctgctcttagtagaggaagcgctagctaattgcctaacgccccattagcatatggcctatactgacttgagaaggaaagaacgttcattgctgtggccaataggatcccctctccccaccttcccttttctgcatcaaaatctacacagacaaaagtcagatgttgtaatatgcattttatcgtgtcacttaagtactaagaggtgcttttaaagtttttattaatgctgctcaaacttgaccccgacggtccaggatacaggccaaggtgtcagtgcggacacaatcgcaaggcggctgttaggcttcagggctgggcaggaaacttgccaggtgctactaggaacgtatcagccctttctacaaagcaggtgtctttcccatcataaaatgcaaagcaatcagccgttccctttctccccagccccctcgtccggagaccgagaggatatttaccctgggctcttgcagttctcttataactgaacccagcggcggctccttctccgagctcagagccagcaggctcaggcccagccacactttacaggcaaattgccgagctgaccaagggctttggccaagcccgagctgggccggggcgtccgggaagcggaaggagccagtctaggaaatccgggtgtgcgtggtggtgaagctggtgggcaagcttccacttcaggtccggggctttgtgtcccgcaacagacgcttggcgccgctcctcttccagcctgctgccgccttctccgagcgagtgagttggcgaaactcactcacctgtcggaacccggtgcctggcggccagacgcgcagattacagcaaaccttggccgggacgccccagccagggaggcaagtgtgggagctgctcctagaggtgccagctcccacccccagctccgcgccccctgctcgtcccctttcacttccaggcgccttcggcttggggtgcccagaagggcaagtccagcagacgccagggctgcaggttcaagatgctccgcctcctcctgccacttagagccacaaacgctagcgggaacctttccactcagtcttagtctgcggtcactgctgaggttttcagaactttccaggcaaaggccagccaggtcctttgcctccaacccactccgcgcctacctcccgcctggggacacccctaggcccaggagatcctactctcccccgagcaccgacgttccaactcgtctgcgcccccgactgctgtccggctcctgtgccaaggggcgcgcgcatct

SEQ ID NO: 42085 - DNA, 2300 bp, Homo sapien
ataaaagggttgaggtttgccctctctgctctccagggcaaggtgaaatttaattattttctaggttttaaacagagaacctaaaatatatattttatatcttgacttgcttgatttaaatcgtggtttagagtgtgtgtatgtgtgtgaaacggtggagtaatggcaaatgaaagaaagaaggaagttacacacctgttgtctaagaaccctatatgagttcttgatctgtagcaaaagcagagtcatgaccgtaccttacactctggatcagcaggttgcaccagggacacttcagagaacacatgaaacgtgaaaaagcggttctcttcataaaagacaattttctttgaagacctcaggttcctttaaggcaggaagcaatatgagtttcatctcctgggcctgattaaacaagattattttcgtgtgctatttatcagtagacgatcacaatgaaatgtgcatacgacagtttactgcctcaatcacatattgcaaatcaaaaaaactagaatgccgttttgctggggcctccttagtttctcttctatttcattctttcctttccttttattccacattattttacattttcccataagtcatccataattcaatctcagtctagaagagtaaattcgattactcggcggctaaacatcgtgtgccttctcagaaacaagagaacttgtaaaacaaaaacaaaaacaacttaaaaaaacaaaaacaaccaacaaccaccaaaaaaacaaaggcatgaaaagttggaacctatcgggaggctcttggaaacttgggcagcttcctttctctgttcaggatttagatttctatctcacgttactttgcgaacagcttcgcctgtgaatctccccctacacctctgggcaccggtgccaattccttcccttcccttccccagtagccccacacagtatagaggagcttattttctaagactgcaccggtgtcagaggtgacgtgagagtttctaaccgaatggcgttttagaaataggaacgggaaacacagaaacggctgaggagcgaccccgtggagcagacaggcacagcccgggagcggcggacgccagcgccggcgccgcagggagcgcgtgcggggctccgcggggccgcctcccgcgacttcagcaggggccgcggccgcgctcccgggccggtgggctgaggcaggcagaggccgccatattcctgtctcaccacgcccggccggacggcagccgcaggtcggctgcggccctggcacgcaacggcggccgccggctcgggctgcgcgtcggcggccgggtctggccccgacttcggccgggggcggccgtgactgctgcgcccgcggactctgccgagggtgcgggagcagtaggcgtccgcagagcccgcgggggccggcccagcccgggagccgcgcgggcgaggcgagagccgcactgggaggcgcgccgcggcggccgcgagcccaggaaagccttccaggaggggccgggcggcaccgcctcccggctccctcctcccgcgcccatcccctccgcctcttcctcctcctcctttcgccgccgcctcctccctcccggatctgtgctccagttcagagaaagaagaaaatgtgtgtgtgtggcgagggggagggctcgcactgagcagccgctccgcgcctggcaatcggggcagggggtgggcgtctggcgggggcgggggcggaggcggaggcggaggagcgcgcggttgccgggcgggacgggaaccgggtctgcgcgcgagccgggcggtgggcgcggacagggccgagggcgcccgggagccgtgtcaggcggcggcgaggagcgggcgcgccgggcgcggggagccgtcggcggccgctcgctgcggggacaccccggtgaatgagctctcgccgccaggcgcacggcgtaggggagcctcgcaggcggcggcggcggcggcggctcggggggcgaggcgggccgcctgttcccggggaaggaggcgcgggcgtctgagcgaggccgggcgcggcggccttctctcacgcgccccccgagccagcgcccgcctcccgcgcccgcctctcttctcccgtcggcccagactatccgctcccaccgcgcccccggcccacctggtggccccggccctggccgccgcccccgcggcggttcccggagctcgtcccggacgcgcgcccgggcggcgggggctcggcggccaccgctgcctcgggggagcgagggcgggagggtgtgtgtgcgcgctgtgagcagggggtgccggcggggctgc

SEQ ID NO: 42086 - DNA, 2300 bp, Homo sapien
aaagacccagacagcaacaataggacatcagaaagttcaagcagttctgtgtatctagagaagacatgccaggaagaatgtagcaaggagagagacaacagagatagtcaaattatgaaggagcttgtatgtcaagctacgtgacatagatctgacactgagggcagtgagaaatcttggctttctagggggcaatttaatggatgaagagatctatctgtgttagaagtaatctgcctagagtggggaagttaaggctgagcagaagacaagaacacccagagaaactgtaaaatgtcagaaggggtgaaagctgagggtagaaacctgacgaacagcaatatttagagtggatatgcaagagaagccaaagaatgagactgagaagaagaaattcgagaggtaaagaaaaagaaatcaggtggcttcatgggaaacagggaggagggagctttaaaaaggtaatggacactacattaattgatgctggagactagaaagaaaatggatagagcaacaaagaaatcgtaaagttggaaacaatttaaattaccatcaacagaaaaacagacacattactgtatgtttctacatggaactcccatataacaacagggaaaataaatgaatatctctatatgtcaacacggatggacctagtaaaggtaacgataagtaaagtaggaaaagaaaatatagaatgttatatactgcttacttacatatgtagcagaaatataaagacatacattgcaacgatgaataccaagttcagaagagcagttatctcagagtcagagagtagtcgtgattgggaaggtggttacacaaagctcttcaacaggaatggtaatgtttcatttattaagctggtttatgaatatacaagcgtttactatattaagatttgagcatgtcgcacataaaaataattggtgaccatatctccggaattttagagacgcctgcatatgtgtgttggaagtaagttggagtatccggaatgcagtgggtggaacaggaatgcaataaacacaatgtctaaggctctaccggaggactatcattgctctagcaattgcataccaatagaaggagaggtcaattatctggattcttccacttagcttccacttaacttccccgttcctcagtttccccttttgtaaagtagaatataatagtatattccttgagatgttaggagaatgaaatgatttcatacttaaacattgcttaaaataatcccgaggacattatttcaaataagtactagttacaagggagttagccaacatcatcgtcagtacaaaacaaactgattcacagcaaacacaataaagtcctgaattcatgaaacactcttcaatttgccaggaaccgtgtgagatatgcagaaactacagaaattaaggcttatttgtagatattaacacagacataaaagatttaatgaccgcagttcacgttcaatcagccgttcccacatcccttgagtgcagtctctgtgctggctggacactgcaagcacagacacattcctcagatgtttagactttttttaaaagtgcgttgttacatccacatttcactttttattttctttctttttttgagacggagtttcgctcttgtcgcccaggctggagtgcaatggcaagatctcggctcactgcagcctccgcctcccgggttctagcgattttccttcctcagctgggattacaggcgagtagctgggattacaggcgcccgccaccatgcccggctaatgtttgtatttttaattgagacggggtttcgccatgttggccaggctggtctcgaactcctgaccccaggtgatccgctcgcccccgcctcacacagtgctgggattacaggcgtgggccaccgcgcccgaccacacatttcacttttattcggatcgatcagtaaactctttcgcaaaccctcaaactctcccgaccactatctcaggtagcagcgaactcacccgtcctcaggaggcgggacctgcgtgccgacgcacagcgagcacgttgacgtcttggcgcaccgttccacggcaccgcccaccggcttgaatcccggcgcctcagaggactatgaggcgggcgccaactgcttgggccgcagggcgggaggcagcgcgggagtggggcgttgaggggccggcctagcttggggctctggccttgcgtcttccgaccgaatcaccgctcctgagcccggtgcggggctgccgctatcgcctggccgtgggtgccggagcggccgggttgcgactcagcgttctt

SEQ ID NO: 42087 - DNA, 2300 bp, Homo sapien
tcgtgaaaaacattgagggaaataaaaaccacctctgcatggtacacacacctggatattttgtaatttgcccttttatcttaaaaagatatcaaaatattttgtcacatcattgaatgctcttccacatcagagaatcttacttagcttatggaccatctcccaagaaaaacgaccattcattaactctggttaagacccatatcattgtttttagtggctccatagagcatttcatcatagggatgtgctatttttttttttttttttaccaatcacaatttggaggcttttagttgtaaacagtcctgtgacattatgttggtagataaatctttgtccacatgtttggtgatttccttaaggtaaattcccagacattgaattggtagtatttactaaagattactccagaaagtggcaccaatttccttttctaatgtaagtgtatggtagagttccttccctcaacactctggaggaattggagaatctccatcatgtctaattccttttgtatttcaatctttaccagaaagagccctgtcccttttaattggttacttgacttttaatttgctgttacataattcaggtgtgttaagtgtgttaatagggcttcctattataagggatccacaaataagaatagaatttctttttcatagccttaatttttatttgactcaataaatatatgtgtatgccttctatggtgagctgtcataaatttattttggaaagagtggaaataaatctgtaatgtgcgaatctgatgtttttggtaattaatttccctagcatggtatgatattatacaagcagtaggctataatcctgatatctgagttcacttctggctctgtccctaaacacttggtgagctcaacagctggaagagttttggggatcatattgggaattaattataatatttactttattacttaatactaggaaaaactggaggagtgcctaaagcagttaaaggaagaaagagtgataaggcttaaggttgataaacgagtcagtgaggtaaataaaagttttcttaccttttgagagttttttgttttggttttggtttaactttaagtcatacatacacacactttataaactttaaaatgagaaaatatagtgtattgcaaatggtcacagtatgttaatgtttgtatttacttatatttggtgaccgtgtgatctgtattccaaaaagcatgttttttaaaaatgtaaaaattgtagtttgttttcttttcctctgtttttatatgactggagcttattttctgttcatgatgcatcaattcaagaatgcatttattaggcttatactgtatatacaattgcgtaaaagatggggatgagactatctactgaaggggaattaggaaaatgaataaataaggtaaaagataatggaaaaccggtaagaatgcaatgaaagataaaaatctataccatgaggactaaattaggtgaatgtgcataagagcagggcataaactagaaagttctacataactataatttattattacaaagcaagtttaaggaggaatttttgaaagtatatgcattggtttgaaagacagttaatcattcaataaaggttgagcacctgattgtataaggcaaaaggtgctttgtgaacacagtggcctttctgagaaatactagagttagacttatgtgtagtattagataaatagatttggtgtacaggagagtacatattttcaagaagcaaaggggcaatattggtaattgtacagttagtaaattgggtatgatttaggacttttaaatttatatattaagtattttactggcaaaaattagtccttaacagccaaattgtaaaatgcttactctttatttcattgtctaatttaagggaaaccttaaacagctaatttttaaatatagaatgatccaggtatgtatttaagctgttagaaatgtgatctttttgaaagataattaatgaaatactatttatattatttatgtaggaggttttgtcagttatctccaggttttgattgttatttaatatggtctgtctttactggtagagagttagattaactgcaaattaattacatttttaaaatgttttattttagtttcataaaaactattttggtgataatgagagaaaatcatgtcacacattttcaatcttcttttatagctggaacatgaaaatgcccagttaagaaatataaatttctctttgtctgaagcccttcatgcacagtcattgacaaatatgatcctggatgatgaaggtg

SEQ ID NO: 42088 - DNA, 2300 bp, Homo sapien
tcaaccctatcccatggatgggggaatcataaatgtgcagtggccgcgtgcacctgtgccacaaatggacaggtgaactcaatttgccacagttcccactacttgtttcatatccctgagtggcccctggaggcatttgagtttgtggctctggtttaaggtgtttgtgggcacagtgtgaggaagaaacatggaaaagacagattttctctagactgaaaaggagattgcccaggggcgggaggaagacaaacagaggtcagtgggtcctgaggctgactgtatgtgtgacttgtgtccctgaaataccatcttggaaactgcaggacccccgggaggaatggctgcaggggatgtcttagcagatgagacaatagccaccgccaccccaccccaaattcctgtgcccctagtgggatacagaagtagtaggttgctcatcaacccaagcagccacatcagcttgggcagtggaaacaactcagccatatcttttgggaacagaggaccaaatggatgtgctgtcccttctcccaacccactacatgggactgtgtatagccctggtgttaggaactaactccaggaaggatgaaggctgactcccttagtctccagtagataagctgctaggggcagctactaatatataataactgagttatttacgtaaaataatggatatgtgatgcttcttgcatgcctgagtttctgggctgagatttattctgtcttgaatgtcgcggttttcttaatgaagttgctgaggaacgcaggggccttgttcattttgcctttttctggaaactttgtcctccaattcccagatccagagcagtgcctctgctctcagccccataccgcccacattctcattaggaaaagcaaacaaaagccaaagtcctgtccagttacaagccttctctaaacggggcagttggactgtatatattcctggcgcatcaattttactcagacagggaaaatatttttacattaaaagaaactaggttaaattatggtagagaatgcaaaattcacagtttaaaaatgatgaaattccagacttcaaaggaacttctttcttgcagggtagggggagggtattctgtttcagaaccccatgcgggtctccactggagttcttttgagaaggacacttctgtggaaaagtttgagcagctctggccctgcgcctggcctggctaggggccaccttcttctggtttgggctgcagcgccctatgggtatcgcgttcttgttaatatctcctcacgtttctaaactcacagcttgtcagcgcgggcgcaacctgagagctgtcgcaggtttccagctcactcgtttcccaaaggaggaaatggagaatcagcgactttaaaggacttgcctggcgggcatccacgcttcccaggctatcgctcctccctgcgtccttggccacctccgttctttaatcctgcaggaactcaggacccacgtgcaaatacaaagaaccgtatccacccacccccggcccttcttcatcctgcgcttccaaccttgggggggtcctctctctccactggggtatctgacgcccgtggggggtgcttagaaaagtttggtagattagtgactggtggttctggaacaaatacatcacagcccaaactgggggctggtggtggagaggtgggtggatgggggctacaaatctgctcggcaactgccctttcagccaagagagaggagctgaggtcctctggggttggaggactggaaccggccagattgcgggctcaaggggcgaaggcaggttggcaggggcagcctcttcccgccgcccacaatcctcgggcgggcgcgcagccgagccggctcggctggctggcgcaatctcgcgcgctccttgcattgatcaaaaatgggggttgaaacagtaaacgcgaggaggagcaactgcttcgactcggctcagaagcgcgaccaatggggatgtgagctccttcgcgcgaaccaattagcgcagggcctgcgacagcacgggccaatggggcgccgactcggcgcaggaacaaggcgggggttcggggccggctgcagactctcaccgcagcggccaggaacgccagccgttcacgcgttcggtcctccttggctgactcaccgccctggccgccgcaccatggacgcccccaggcaggtggtcaactttgggcctggtcccgccaagctgccgcactcagtaagtccccgcgagcgggcgccgggagtgaggttcaggcgggagcacgcacgcgggtgggtttgcatccct

SEQ ID NO: 42089 - DNA, 2300 bp, Homo sapien
agcatgaaaaactagttggaaggcgatgagaggagatgaaggaagatgatgagaaaactactgcatggccacgcgacactgatgctagcttaggctaagtggaaactgagaaatacacatattcaagagatgtttaggaggcaagatcaacagagctcagtgacagatgggatattgagagtgaagagaatgtcccaaggatgacttttacgtttgtggcctgtgtgcttgggtggatgagatgtctctcattgagtacagtaatcaggctatgaagtactagttgctggaaagaaaatctcagggacttaaccaagtaaatatttatttctcattcacaatacattagggcattcattaggtggccattcatgaatgccagatctttctatcttctggggtcttgagagactcctacactgatcttttgcttttagcgagccaacaagtgaagatctcacgggaagttttaaggccaagactggagttggcgtacttctgttcacactcaattcaccattaatatgtctcaagagagctgggaaataaagtcttcctctatgtcctggcattggtgagcttctagccaatctgctccactgagattgaaaacagtggaggtggatccgatttgggaaggatggtagacattaagcctgttaccaatattctggtttttctccctgtgagtacatggtagaattgtatttttctgaacatttgaatttagcatggcacagtttggccaatggcatgtgcatagcagtaacatgtgttattcatgggatggaagttctgaagaacctaggtgtggccttctcctgccacagcaaccagtgatgttcctgatgatggaggctctgtccattggggtcctcaagtgaggatgccctggagcagagccctctgcctacctaagatgggcaggtagtacaagagagaaataagctttcatggttttaagcattgagagtttatggttgtctgtagctgcaacattacctaatgtatccttactgagaaggggtaagattatgagggttttttttatatgaaaattgtgaggtatcttttaaaaatcaaagaaaggattttgagatcattaggtatatgggtctaaaactcatatgtctgggttaaaggtatagatttttatgtcatcaacatatcacttaatactcattacgattttatgagtattattattattattataataatacatttaatacataaaataataatacattattattttatgtattaaagaaccaaggcttggattaatgcctaaattcattctagccataccactaaggggctgagccaggactggcgttcatattatactgatagataaacgttgtcatttgatttcctttctctgcagcttgcaatcttaatgtactctcatgaaatagttttttatacagacctgcctggctgccttcattcctagagtaccctttctggacataatccagagggtggttgagaagctggggaagcagatgggaagctgactgttcagcatgtaatccatatagtatttgcgttatggcatacatattaacaggataggtgaggagaaggtgggtagagggtcagtgagtagcaggcacccagtaggaactctacgtgagagtttacaaatgggctagatcataacttgaagagtataaaagtgaatggccattccataaagaaccacaaactctactctaggggttttatttttaactactattgtaaatgttttttgtttttgtttttgtttttccttttcttttctctgtgcagtgtattaggtcaggtccatgaatggctgggactttttctaggttgaggtgctgattaaattgtctgtgaaaggttcatagtcaatagtcatactgaggtaggaataaccttgtctttgtctgtcagagcaaagtaattccagtcattgtacagggatgagacacatatcctgggtaataagtcagccctctttttctgtgcaaacttcctacagctaccccttgctacactgattacatttaaacggtaacatcctcttaactgattactgaagcaacggatggatcacgtgacctagacagatctcaaaaatgggagaccacatgcaaaggaaactacgttttcacaacacatggttggagaggtcaaagaaaatgtgatgtattactttcagttttatcatcagcgggaccatctggggctagtggtggggctcgaagaaggaagaagaaaataaagaagagaatcaggcaagtggacatctgtaggaagagtgatat

SEQ ID NO: 42090 - DNA, 2300 bp, Homo sapien
tttgaggccagcctaggcaacacaggaagacccccatcaatacaataaataaatagaaacagacaaaattaattttactaatatttttaattgagttattcaaaatatcacaattttgacataattataaattattgagctgcagttttttcacattaattttttcaaaatgccacatatatgtgtacttacagcacatctcattttgaattggacacatttcaagtgcttaacagtcacatgtggctaggtatggaacagcagaggttcagaaaactgtcaaaaggacttctctgtcctcttattttggggatggaggcgaaaatatttgccgaattgaaacattctgtgaactttggctctgggtttttagtatgaaattagaggcaggtgaagaccaccatagccttcctttgcaccagctcactacagtggccagaacggaaggaggttcacagaacgtgctaggttggacattaagtcaccgagtcatccactgaggaaagggatatcattaagaagaatagttttccactaacgccgaaccggcggcaccatctcaaccaacaggtcaagttacagtaggcaagcacgcatagaaataaacgtctaaaacccagcctgttacattagccaacactcttcttgactttttccgaattttttccctgtccccaagattagccgctcgctagaaaagactgcgagcctcagcagcctccccttgaactggggcgctgcctccagctggacacggactaaggatggaaaggcgcactgacggaggccgcccccatttcccaggcccctccctaggggtgcccctcctcagccatggctgcccctttctctcctcctccagcatctgcccctggggccacccccacctttccgccatctctcgggcccgcgtggcaccctgctctgtttttaacggggataaacttgacttgcttctccaaagagcgggaaaaagaggcgcagtcttggtactgatctgggggagggaacgtcccagggcgcgcaggggcgttttctacccgtgccccgtcggcctgctctgttcagtaccgaccgtgttcggggttcacgtggcccagtcggcaaagtttctttggaggtccagcgtctctgattcccggatcttcagccccacccggagcccccacggttactgccccccgcgacccccgatggagcgtcgggatgcgctttctctccgagtgcctccgggggtggagggagggaggcctgtttcggaactaaatggcaatcacagcccccgcggggcttggagggacgagctccccgcccaccccgcggccccggccccagccagcatctcgcgactccatttctggctctaaacaagaacggggaccgagtcgcgttcacacggaaaattatgccggctccagcggcgcgtaaaattgatgtgaaccgaacgaagtaagatcagcgtgatcctccccctcttgtctcaacaggggtttcggcgcgttacacaaggccgagcttgtctctttaaggagacattggaccctaattagtccgcattcctggcgcggctgcggagcgaggggccgaaggtgtctgggttgggagacgggtgggcgggaggacgagactcggaagaagatcttttgaccagcccccaggctcaccgctccctccaccctctttattttgccgccaccaccaccaccaccaccaacacctaattctgaagatgcagccagggcagcagcaacagcagcagccgccgattctcccagccccacgttactttgattgacagctgaacaaatgttttcccggttcgaacgctcgcgctaaggaacgtcagccaaggcgaagctccgccttgggcgggccatctccgccccgcctccgccaacctcattcctcttcgttaattggtcggagctacaggcgacgcccggcccccacgtgggtttcagctgggttggctcctccccgctggcttgccatttgtcagcagtgaaatgatgggcactaacacagaacggcgattaatgttcagccacctctgattggttggtggagacgcctaccgcaacgggggtgggcggggcgcttggagagctcgccagagcgctcgcatggcgggccggtgattgtagtcaatctggccgtattctcaggcagggtcgcccggggcggactacatctcccgggatgctgcgcggccgccccgcggaagattgtgaatatgtatcagaatgttaatgattagctgctgctaaatttggtcaaagaagtcacctacacagagcgtg

SEQ ID NO: 42091 - DNA, 2300 bp, Homo sapien
cccctccctaggggtgcccctcctcagccatggctgcccctttctctcctcctccagcatctgcccctggggccacccccacctttccgccatctctcgggcccgcgtggcaccctgctctgtttttaacggggataaacttgacttgcttctccaaagagcgggaaaaagaggcgcagtcttggtactgatctgggggagggaacgtcccagggcgcgcaggggcgttttctacccgtgccccgtcggcctgctctgttcagtaccgaccgtgttcggggttcacgtggcccagtcggcaaagtttctttggaggtccagcgtctctgattcccggatcttcagccccacccggagcccccacggttactgccccccgcgacccccgatggagcgtcgggatgcgctttctctccgagtgcctccgggggtggagggagggaggcctgtttcggaactaaatggcaatcacagcccccgcggggcttggagggacgagctccccgcccaccccgcggccccggccccagccagcatctcgcgactccatttctggctctaaacaagaacggggaccgagtcgcgttcacacggaaaattatgccggctccagcggcgcgtaaaattgatgtgaaccgaacgaagtaagatcagcgtgatcctccccctcttgtctcaacaggggtttcggcgcgttacacaaggccgagcttgtctctttaaggagacattggaccctaattagtccgcattcctggcgcggctgcggagcgaggggccgaaggtgtctgggttgggagacgggtgggcgggaggacgagactcggaagaagatcttttgaccagcccccaggctcaccgctccctccaccctctttattttgccgccaccaccaccaccaccaccaacacctaattctgaagatgcagccagggcagcagcaacagcagcagccgccgattctcccagccccacgttactttgattgacagctgaacaaatgttttcccggttcgaacgctcgcgctaaggaacgtcagccaaggcgaagctccgccttgggcgggccatctccgccccgcctccgccaacctcattcctcttcgttaattggtcggagctacaggcgacgcccggcccccacgtgggtttcagctgggttggctcctccccgctggcttgccatttgtcagcagtgaaatgatgggcactaacacagaacggcgattaatgttcagccacctctgattggttggtggagacgcctaccgcaacgggggtgggcggggcgcttggagagctcgccagagcgctcgcatggcgggccggtgattgtagtcaatctggccgtattctcaggcagggtcgcccggggcggactacatctcccgggatgctgcgcggccgccccgcggaagattgtgaatatgtatcagaatgttaatgattagctgctgctaaatttggtcaaagaagtcacctacacagagcgtgttgttagagctgtgctgagcgggtgtttgggttgttggctgctttcttccccctttctcacacacttgtatattattttgaggtggtgttcgcagagtttgaaaggagagagaattaaaaaaaaaagccgcaagcgtttcactcttttatttttataatccccttcaatttggggttaaaaaaaagacaagaaaacaggaaggaagagaaataaggaaatgagatgtggtaaaagaagctaaaaggtgccttttaaaagatcgttgctgtgaagtgaaaaaaatctccagagaaaccaaaaagcaccgccgagacctcttccgaaccaaaggagtttgtgtttgcttttagggaagaagaaagatcattcattcggaggaataacaaccaattaaaagacaaataaaaaaagtttggagtgggacgcagagcgagcgagaggagctgccggcgggcggtggggcgcggagcccgcactttcccggccgggtgagcggcggccgcggcgccgggctcggcgggtgcgcctcggcggagcgaacgtcggagcgttgccttgggagacgcgcgccggacaatgcccgcggcgggccagtgacgcccgcggggaatgcggagcggcccggcagccggcacccagccgccgccgcgcgttcctgccgcccgtgtcacgcgagacccggcgggggccgggaccgcccgagccgcccctcagaccgagccggccgcctccgctgccgcggccgcctcctcttcggggtcattaaagccaatgagccgcgcgcctctgccgagcgcagccaac

SEQ ID NO: 42092 - DNA, 2300 bp, Homo sapien
gggtgccgtggctcatgctgttaatcccagcactttgggaggccgaggcagatggatcacctgaggtcaggagttcgagaccagcctgaccaacatggcaaaaccccatctctactaaaaatccaaaattagctaggcatggtggtgagcacctgtaatcccagctacttgggaggctgagacaggagaatagcttgaacctgggaggcaatgactgcggtgaactgagatcacgccactgcactgcagcctgggcaacagagtgagactctgtctcaaaacaaaaaagaaacaaggatgaatacagatttaacaaccagttcaaaactaatgtattcttaggctgggtatggtagcaaatgcctgtaatcccagcactttggaaggctgaagcgggcggattgcttgagccctggagttcaagaccagcctgggcaacatggcgaaaccctgtctctatttaagaaaaatgaaggccgggcatggtggctcatacctgtaatcctagcactttgggaggccaaggtgggcggatcacaaggtcaggagttcaagaccagcctgaccaacatggtgaaaccccacctctactaaaaatacaaaaattagcagggcgtggtggcatgtgcctgtaatcccagctactcgagaggccaaggcaggagaatcgcttgaacccgggaggcgaagcttgcagtgagccaagattgcgccactacactccaacctgggcgacagagtgagactccgtctcaaaaaaaaaaaagaaaaaaaatctatatactcagaaaaatccagtcagtatttgaaacctccttatacttcctccttatacttccatttaattcataaatatcatagcatctagggtagtcgattataaaatacagatttcttataagattcaaatgtcagcagttcccctcctaagttagtggtatgattttggcctttggtcagctaaaaagtacagaagttggatacatttcaatggtccaattccaatctcctcagtagctgtgcagagacattggctctgagggagctcatggcccaagcactgtaaatgagccagcccacttacaaatggaaaaagttctgggacccaggccaactggcaggctagggggttgtcaagaacctagtgcttcccctacagatcctcagggtgtcagggccacttctcaagctaagcagaaagagccatgaacgcggagcttctcagcacacccagatcagaaggcggccaactttggagcttgtttgagagcaggtactggcacaacttgtctgaactgtgccctgctttatctcaaatacttacaaagacacacaagaagtttctactgcattgtgcttgggattaagagtaaacagcctaaacttccagtttgaccaatcccaatggctctgcctttctcccctgcaataaattattattattattattattattatttgagatggagtttcactctttttgcccaggctggagtgtgatggtgcgatcttggctcactgcaacctccgcctcccaggttcaagtgattgtcccgcctcagcctcccaacaattttttttttttttgcttccccaaatattagtacatcagcagcagctgtgaaccttgactgtcaacaaaaatctcaagcccatggagtagacgaagaaagacagcaccacaactactctactcacaacttttgcacagtactttacagagcaaaaagaaaactacatgcacacactccccacaggtgtacatatccctcatcaaaatgaaattttttctttctgtaaccaagcaacaacttgaccctctaattccataccctgcttgttttcaaaatgacaaattttccatgttacattcgaaagaaaaactctgaaatatacctcctagtccttattctgccaaaacttactttgatagaatgaaccaaatcctttgttgttcttccatccctttaaatgaaaaaactcaacacaactttattcttactgatagttacattacttaaagctattgccttccaaggacacattctgctgtttggccaaagtaagacattttacttagacaataaagactgccaacaaggccggacgcggtggctcacgcctgtaatcccagcactttgggaggctgagggaggcagattacttgaggtcaggagtttgtgaccagcctggccaacatggtgaaatcccgactctactaaaaatacaaaaatcagctgggcatggtggtgcacgcctgtaatcccagctactcgggaggctgaggcaacagaatcgct

SEQ ID NO: 42093 - DNA, 2300 bp, Homo sapien
ggccccggcttctaaagaggctcggaagctcttcccagtctccagggcggattgcgctaagtgcgcccgggtcaccaggccaaagggaagggggctccccggcggccagggaagaccaggccagattgtcggtgtcgccgccccttcccccacggcggcgataatgaccccggggaccagaggagaaaaacaactcctttacgctccccattcccagagtcgccggggccacctccagacgcaccggaaccggggccgcattgacatgtaaataggcgagaggagaaacaaaggggggggcgccctgcccccactcggggaaggtagaggggatatggctgcaggagagaaaccccagccttccccagcgcccctgtccgctcggtatagacgtcaagtaggaaggagcccaaagggagggagaaaattaagagtttcggcccactccccaccccaggaagagagggccccagacctccccagccttacaccgctgagggcgagaaggtccgccgggcctcagaagccaccagtctccctaccgcccgggagaagcgcctccccaacgatcctggccccccaccaccacccagccgcgcctcaccgggtgccggctctgcgggaacatcgctctggcggcggccggggctctgttccccggcaactcaattctccggtcaatttccaactttaatcccgccgaggaaaattaagccggaaagccaagcagaagcggggagcgcgctggccacgcacgcgcgctccgccgggcgcaccggccactcggcgcccgcagctgctccggctcccgctcccgtcggtgcgggctccggccctcagggccacattagtgggcgccccaggcccagctgcttcaagaacctgcgcggagacgtcgggcgctcggggactgtgcgcgggggcagcgctccaacccccggcctcagctgcccgggcggggaggcgggggcgcggtgactccgaccgcactcccctcggcgatccgcgtgcgcggcgccagtcctgggcaaacaaatccagacggactgcttttctttgctcttctcctggtccgcctcctcttcgggctttccccgaggcggcggcgggcgaggtgcaggtggcgcggcggcccccgctaaccccacacaaacccgacgctttcggggcgactcccgcaagattcggctgcgccttcggccgggtgctcgcaggctcccgggacgcaaaggggagcgaggttgaagacgcagcggaggctcctggccggggagcgacggatgacgaggcggggaaagtgcggagggcgcgccgggaggcggctcggcacgccccgtgcgaccagcactcggtgttctccgcggttgcacaaaccctccgggcccgacggggctactccaccgagagcagtcccgcaagtgcccaatgctcctcgagcccggggagcatcagggcgccgcgcctcgggcgcactcgccctgcacggccggaccggccgctccggacccttcttccgagctccttcttcctcggtcttctttctttccttccttcaccttcgtgtgcttctccgcaaagggcgctccagcccactgcaaagttctctcaccacccgagggacgacatccacgagatggtggggaaaacagcaggagtgcgctccgccaatcggccaccctccccggcgggcaaactctgcgggcgagtccagagtagtcacagcggtggggccagcgggggttttggtcgccgcgggacgacggaggtccgggctggtggcgcgggtcccgcccggccgtgcgagggtggggtggcgcagtcggctgcctccgggacgcggggcacagagtacccgccgctgtttctgctgctgctgcttctgcagccgccgctcccaccgccgccgccgcccgcgcctctcgcgccgcttacattaacacgcggtttcacactccggagctaaccagcgccggccccgcccagccccgttcgggcggggggcgcgagcgcggagccggcgggggacgtgagcccgggaggttggggggtggggggggggcagaaggcccgcatcagccaatcgcgtgcgctgcaaccaacgtggggcgctgacgcgctcctccccggagcgtatggcagcgcagcgccggacggggcgttctccctccccccctcctctcgcttccatctccgccgtctcctcggtctcccttcccatcccggcccctcctccgccagccgcgtcctcccgggcttggtgaggaactgttcctggaggagccgcgggacgccaaaaccag

SEQ ID NO: 42094 - DNA, 2300 bp, Homo sapien
gggtggggtgtgcgggacaggtttttcaggtctcagtgctggtttattacattgtctctctttgttcccaggaattggaaacagactcgtagtcttgtagctgagaagttcctaaaaacctcagccgctccccacctctcccaacacagcgaagtcaggacttttaagacgaagacctgggatttcgcgccccgggcaaaacgtctcatctgcggacacgcgtgccttgttctggcagcaccctgggaatccttcccgccaaacgggacaggacgatctttttgaaaagtggcttgaaatcctgcaataaaaatcaaatcctaccactttgggtgcaaagggggtgggtggggtgggaggacatcacagtcgtctttgctggtgtacctacgccaaccgtggcgttgctcatttacgcatttccaactaagtgcacagtccactccctctcgtacatccgtaaaaaggcagctcaaggaaaaacaaacctcagataaatttttgaatgtggcctcacttttagagtagcatcaaacaaggggtccagcactgaaaaacacatttgctcgaattaccaaaagcccccctccgcctccaataagaaactccgcagctagtctttgagttactttcacttagatctgaggattttcattaaagggaaaagtgagcaagtggcaggatttttgctaactcgagccctcagcttccccggctgcacgctcgccagtccctcccgctagcgcgcgcccgcgcgctctctagccagccccacgttactttgattgacagcccagccccgccgctctccttcccaccgaccttcccatcatcagtgccaatctccgcgaatcgccgcttcccattggctggttttggcgtcccgcggctcctccaggaacagttcctcaccaagcccgggaggacgcggctggcggaggaggggccgggatgggaagggagaccgaggagacggcggagatggaagcgagaggagggggggagggagaacgccccgtccggcgctgcgctgccatacgctccggggaggagcgcgtcagcgccccacgttggttgcagcgcacgcgattggctgatgcgggccttctgccccccccccaccccccaacctcccgggctcacgtcccccgccggctccgcgctcgcgccccccgcccgaacggggctgggcggggccggcgctggttagctccggagtgtgaaaccgcgtgttaatgtaagcggcgcgagaggcgcgggcggcggcggcggtgggagcggcggctgcagaagcagcagcagcagaaacagcggcgggtactctgtgccccgcgtcccggaggcagccgactgcgccaccccaccctcgcacggccgggcgggacccgcgccaccagcccggacctccgtcgtcccgcggcgaccaaaacccccgctggccccaccgctgtgactactctggactcgcccgcagagtttgcccgccggggagggtggccgattggcggagcgcactcctgctgttttccccaccatctcgtggatgtcgtccctcgggtggtgagagaactttgcagtgggctggagcgccctttgcggagaagcacacgaaggtgaaggaaggaaagaaagaagaccgaggaagaaggagctcggaagaagggtccggagcggccggtccggccgtgcagggcgagtgcgcccgaggcgcggcgccctgatgctccccgggctcgaggagcattgggcacttgcgggactgctctcggtggagtagccccgtcgggcccggagggtttgtgcaaccgcggagaacaccgagtgctggtcgcacggggcgtgccgagccgcctcccggcgcgccctccgcactttccccgcctcgtcatccgtcgctccccggccaggagcctccgctgcgtcttcaacctcgctcccctttgcgtcccgggagcctgcgagcacccggccgaaggcgcagccgaatcttgcgggagtcgccccgaaagcgtcgggtttgtgtggggttagcgggggccgccgcgccacctgcacctcgcccgccgccgcctcggggaaagcccgaagaggaggcggaccaggagaagagcaaagaaaagcagtccgtctggatttgtttgcccaggactggcgccgcgcacgcggatcgccgaggggagtgcggtcggagtcaccgcgcccccgcctccccgcccgggcagctgaggccgggggttggagcgctgcccccgcgcacagtccccgagcgcccgacgtctccgcgcaggttcttgaagcag

SEQ ID NO: 42095 - DNA, 2300 bp, Homo sapien
gaaaacaggttgctaaaggccctgggatcctatgattccaaaaagtcctgtatgtcgagcaaaactgtcatcgtcaccaaatttaaccaaggaaagtgaggcagtgctttcttcttttttgttctccatgttagcaaaatgaataatacagccgccttcccaactgtacttaatgagaacaccacaaagctacaatgcccaacttgtttaagaatttactatggcttcgtacagactggttaaaatcgcttttttattttttcatttataattgatatttgggagtgatgcaattatagacaaatcaatatcatacatatttaaaaacaactccaacagtgaaatgtattatctaaaatgacttctaaaactatttcaagaaaaagaactctgtaaaagcacatctttaaataaaatgtatgtctgtttaaataagctccttcccgtaagtctcttgaaggtaaaataataaaataataacgtgggggttattaataccaaaaacttaactagtttccaacataagataaatacttgtccaagatgtgcccttatggaagaagttaccaccgtttggctaaaccagcattattcattcactgctcatgtggaaatgttcctcaaacaaaagcataaatgcggcaatactgacggttttctgctgtgtatttagagacatacacaaaaaccaaagactctcagcattaattatacagcatgtcttgattattacaatctcaaaatcccttttaactcaagttccacttcataagaaccttagccacgtcatttacctaactcttcccatttagctcttcacacagctcagctcaggagtaccacccagactgtgggggtggggtgtgcgggacaggtttttcaggtctcagtgctggtttattacattgtctctctttgttcccaggaattggaaacagactcgtagtcttgtagctgagaagttcctaaaaacctcagccgctccccacctctcccaacacagcgaagtcaggacttttaagacgaagacctgggatttcgcgccccgggcaaaacgtctcatctgcggacacgcgtgccttgttctggcagcaccctgggaatccttcccgccaaacgggacaggacgatctttttgaaaagtggcttgaaatcctgcaataaaaatcaaatcctaccactttgggtgcaaagggggtgggtggggtgggaggacatcacagtcgtctttgctggtgtacctacgccaaccgtggcgttgctcatttacgcatttccaactaagtgcacagtccactccctctcgtacatccgtaaaaaggcagctcaaggaaaaacaaacctcagataaatttttgaatgtggcctcacttttagagtagcatcaaacaaggggtccagcactgaaaaacacatttgctcgaattaccaaaagcccccctccgcctccaataagaaactccgcagctagtctttgagttactttcacttagatctgaggattttcattaaagggaaaagtgagcaagtggcaggatttttgctaactcgagccctcagcttccccggctgcacgctcgccagtccctcccgctagcgcgcgcccgcgcgctctctagccagccccacgttactttgattgacagcccagccccgccgctctccttcccaccgaccttcccatcatcagtgccaatctccgcgaatcgccgcttcccattggctggttttggcgtcccgcggctcctccaggaacagttcctcaccaagcccgggaggacgcggctggcggaggaggggccgggatgggaagggagaccgaggagacggcggagatggaagcgagaggagggggggagggagaacgccccgtccggcgctgcgctgccatacgctccggggaggagcgcgtcagcgccccacgttggttgcagcgcacgcgattggctgatgcgggccttctgccccccccccaccccccaacctcccgggctcacgtcccccgccggctccgcgctcgcgccccccgcccgaacggggctgggcggggccggcgctggttagctccggagtgtgaaaccgcgtgttaatgtaagcggcgcgagaggcgcgggcggcggcggcggtgggagcggcggctgcagaagcagcagcagcagaaacagcggcgggtactctgtgccccgcgtcccggaggcagccgactgcgccaccccaccctcgcacggccgggcgggacccgcgccaccagcccggacctccgtcgtcccgcggcgaccaaaacccccgctggccccacc

SEQ ID NO: 42096 - DNA, 2300 bp, Homo sapien
tccaggcttttagagcttaaatatccacttttaagtaagccgacttttaaccatagtactctttaataaagtcttttaaaatttcttattaccttattttagccaggccaaatggctgatatttctggcttttgaactttactgaaagtaacctcccaggtgctcagagaaaggaaaatttaagacacctgtggaggagaagagactatacaaggtcatgtagatattaaaccagaaagaacttactttctaagtagggaatcaaatctgactgccagtgtgaaagggcaataccttagctactgagctacagcacagggcacatcacaatagctaaggacactgtaacttgtatctggttgaagggagtcatagacttgttatgaaactgatgaggagggctgggactgtgtgtatttgaggtacagttagaaaatgtgggtccaaatgacaaataagagattgaaataaaagaggaactaattgattttggatttgaaaatactgattgatttgtcacactataggtacgtgggtgtgtctataaagaaaggaattttatctgaggaatgtgagtccttttaagttatcaggcctagatagacattaaaatgagacagcaatcatggccctacttcctccttgagctatgtattcatctcttgaaactgcttggtattgccacgtgtagctagacattaaccaaataatgccacatttgacaatataacccacactctatagcttaacaaagtatagccaatcactaatcaatgtcgcttctgtaaaccaatgagaattcctgataacaactttgtatcagcccactccttgtccgctttttcaactttaaaaacccatttgtaactggtgctaattacagcgtatatttagggtgacttgcatctgtgttcccaggttgcgatcctcaagcttcacccaaatgaattctctatttatattgattttgcctgaattcttctttttgggtcgatgcgtatgtgtgtttgtgtatagagcatgttccaaaggtctttgaacagtttaaacttcactaacttcagaaaaataagtgttataaattcacccccaagaaccttgaagttttaattatatatgtttattttatactcgttttagttttgaagatgttaaataatgaattattagttaaaccatgccccagagagttaaaaagccaatgactaacaaaaattatcagtttacaggatagcagattaaacaacaagttgctaaaacaccaaaaatgtctctgcttgtaagattaaaaaaccggctaaaatggattaaaactaataaggccaactggagttggccagaacaggcttgctgaagtcataggccaaatttctaccatgtttcaaactaactcccccaaaatgtgcacatgcgatccatgaagtagcgttaaacaaaactgtgcatgcctgaggatgtcccagacctcctctttccttccacagatcacctactaatcccagaggccacctcctaaaccttttctaataaaaagattgcatgaaagccagcacacgggacagatctgagctggactcctgtctccttgttggtgtaatgttcaacattcacaaaatgaagtaagtataaaggaaattaaagtttcatatctgggttaatgtaaggcaaaaacattctgtagataagacggatttgaggacatatgtgatcctgagagtagcaaagcctgggtacagcaaatattccaggcagtatttcaggctttcaaggcagtgtagttggtggggtccaagttaagggctccaaacagtaaagggggactcggataatacctggtttactgttggaacaaaccgaaaattcgactaaggtaaatatatgacatgaagaaaggatggagttgggaaacagagtgtcagggtaggacagagggacctagagggcccaggaggggtggagacagctggacgggtaaaaggcagggctgtggacacacccttctcttcttgctacccccaccctcagaaaccgtctatgactcttccatgctctgtgatgcaggtctgggcctatagttaagactgggcacctacaacactcagttgccttaggaagccatgctattcaaaccatggagaatatcctctgttttctaaacagctatactgagacagggcttagccctgactcaccttgtttggatggatattgaccacaactgcatctacttgagtgggttggggttgtttatgctgtactttttctatgtggtattgatgctgtgtttgtcaacccttggg

SEQ ID NO: 42097 - DNA, 2300 bp, Homo sapien
tcctctgtccaatcagagccgatagctcatttggtgagagggagtttagttatagaaagttagaaatttgccatgccatccaggccctgaacccttgacccatcggtaactttgtttccttaacctaagggtctgtcttagttgataaaggggcatctattttggtcttttagatcacaatagcttagcgcactgtaacctatccctgctttaagggagttgcatacttgccaccaaagtgatgtggagggttgggcctggttgtgtttgcggtagagttagaaaatgtggggtcaaaatgacaaataagaaattaaaataaaaggaggaactaattgattctggatttgaaaacactcattgatttgtcacaggatgggtgtgtggatgtgtttgtaaagaaaagaacttttatctgaggcatgtgagtccttttaagttatcaggcctagagagacattaaaatgagacagaaatcacagccttatttcctccttgagctacacattcatctcttgaaactgcttgctattgccatatggagctatatagtaacccaataatgccacacctgacaggataacccaccccctatagcttaataatgtacagccaatcactaagcaatgtcactcctgtaaaccaatgagaattcctgattacaactttgtatcagccgactccttgtcccctttttccactttaaaaacccactcataactactggtaattggagtgtatatttaggctgacttgcatctgtgttcccaggttgcaatcctcaagcttgacccaaattaactctctacttataataattttccatcaacttctcccttttaggtcgatgcgtatgtgtgtttgtgtacagagtatgttccaaaagtgcttgaacagtttaaacttcactaacttgagaaaaataagttctataaatttacccctaaggtccctggaagtttcaattatatacatttattgtacacttattttcattttgtagatgttaaataatgcattattagtgaaaccatgccccagagagttgaagaaaacaatgactaatgaaattaatcagtttacaagaaaggagatcaaacaaaaacaacaacagtaacttgctaaaatgccgaaactctccctgcttctgagatttaaaaactggctaaaatggattaaaactattaaggccaactggagtttgcacagaacaagctggctggcgtcacagcccaaatttctgccacattttaaccaactccccacaaatgtgcccatggaatacatgaggcagcgttaaagaaaactgtgcatgccgaggattttcagacctcccctttccttccagcaatcaactattaattccagaggccactccctaaatgttttctaataaaatgactgcatgaaagccagcacacaggactgatttgagctggactcctgtctcctttttggttaatttccaataaaaacatcttttctcaaaaaaatcaaattgggcagggagcttcttttccttgataacgttagttttaatcatttgagtcagtccctctgattggaaatagtaaaaactgacttcaaacaaagaatgtaatgttcaccattcacgaaacgaagtaagaataaaggaagtttaagttttatatctgcatttatgtaaggcaaaaacatactgtagataagacggatttgaggacatatgtgatcctgagagtagaaaagcctgggtacaacaaatattccaggcagtatttcaggctttcaaggcagtgtagttggtggggtccaagttaagggctccaaacagcgaagtgggacttgggtaatgcctggtttactgttggaacaaacggaaaattcaactaagataaatatatgacttgaaaaaggatggagttgggaaatggagtgttagggtaggacagagcgacctagagggcccaggaaggtggagtcagctgggctggtggggttggggctgtggacacaccctcctcttgttgatccctccaccctcagaaaccctctgtgactcttccacgctctgtgatgcaggcctgtgcttacagttaagcctgggcaccctcagtgctcagttgcttcaggcagctgagctattcagaccatggagaatatcctctgttttctgaacagctatactgagacagggctgagccctgactcacattgtttggatattgacctcaacttcatctgcttgagtgggttggggttgtttatactgtacttgttctacatggtattgaccctgtattcatcacccaccgaaaaaa

SEQ ID NO: 42098 - DNA, 2300 bp, Homo sapien
tcatatgttcgttgcagcactattcacaatagcaaacacatggaatcaaccgaggtgtctatcaatggtgaagtggataaagacattgtggtacatgtacagcgtggaatactatgcatccataaaaaaacgaggaaatcatgtcctctgcagcagcatgggtgcagctggaagccattacactttgcaaattaaagcaggaacagaaagtcaaataccgcatgttctcacttatagtgggaattaaacactgggtactcatggacataaagatggcaacaatagacactagggactactagaggggggcaggaaggggaaagcgttgaaaaagtaacaattgagtattatgctcagtacctgggtgacaggatcatttgtatccaacacctcagcatcatgcaatatacccaggtaatgaacctgcatatgtaccccctgaatctaaaataaaagttgaaattatattttaaaaaactagaaactactcaaacatcgatacaaagtaaaattaatattctaccatttaatatattataaaaagattatgaaagtttataatcacataaaatgtacatgatgtgtttttctttttaagtacttatttaagcaatgtaaaaaaatttttcatagcaaaatctggaaataaacatcaaaatgctaagaataattgttttaaggatggaaatctacagggttctgccttctacttttccgtatctttcaaatttgctatacagatgctccttgacttacaagggggtcgcatctgattaaacccatcatgagttgaaaataccataagtagaaccatcaagtcagggactgtccgtatactactttcctttcttttttttttttttttttttttttgagagggagtcttgctctgtcacccaggctggagtgcagtggcttgattttggctcactgcaagctccgcctccctggttcacaccattctcctgcctcaacctcccaagtagctgggactacaggcgcctgccaccatgcccggctaattttttttgcatttttagtagagacggggtttcaccatgttagccaggatgggctcgatctcctgacctcgtgatctgcccgtctcggcctcccaaagtgctgggattacaaaggcatgagccaccgcgcccggcctgtactactttctaaaaagggaaacagtcacaaaaaggacgccctctcacctgttatgagggcaaacatagtgatattcctgtcttacaaggaacacggacacgtagtaggctctcaataaatgcatgaatatatcaatatttgtgtaattaaagacagttacctgagattttctgtcctgcaaaagcctgcagtcctctctgctggagagcctcctgtcttgctgttctgtatcttgaaaggcgtgacaaatggctgtgcttccactctcaggagtacacctaatctctgtccactggcactgcgccttggtagacctttacctggggttcccagccacggttcctaccagacacacttctggctccctcagagaaggggaaaaagcacttgttgacgcctctgaaaaacagcgtgtagagacagcatccttcttccggttactgatcctacagagagggatgatgatctcttaattttgtgtgtggaccagcattttgacatcttacactgtcctcctgtccagcgcaggcatttatttccaaggcactggcctctctggtgtctgaaaaatcccatgttgtaactgcatcagggcccttagcccattccttaacttcggcccttaactgaacaaagttctttacttgttcattgcagtactcagggccaaccctactagcagatatcagtatctcctcaaaaattacgtgaaatatgagattcaaagccaggcagccaatgcaaagcgaagccttaatagcggtcaacattgttactctaattattataccatcatctccctcgagttccatcgagtatccttggcaggtgcagccccgcgcccagggctctgagcggtttccgaggcctcacgcgctggcggggctgttgagatcggttgggggctcccaggccgcgaggcgcgctgccagttgggatgaaaatggcggatgaggccgggcgcggtggctcacgcctgtggtcccagcactttgggaggccgaggcgggcggatcacaaggtcaggaaatcgagaccatcctggcgaacactgtgaaaccccgtctcttctaaaaatacaaaaaaaaattagccaggcgtggtggcgggcgcttgtagtcccagctactcaggatgct

SEQ ID NO: 42099 - DNA, 2300 bp, Homo sapien
agaaaagaatgtttgtaaggccggtcctctgtccgatcagagctgatagctcgtttggttagaggcagtctatttatagaaagttagaaatttgccatgccatccaggccctgaacccttgacccataggtaactttgtttccttacccttagggcctgtcttagttgataaaggggcatctattttggtcttttaggtcataatagcttagcgcactgtaacctatccctgctttaagggagttgcatacttgttaccaaattgatgtggagggctgggactgtctgtatttgagggagagttagaaatgtggggtcataatgacaaataagattgaaataaaaggaggaactaattgattctggatttgaaaatactgatagatttgtcacaggatgggtgtgtgggtgtgtttgtaaagaaaagaacttttatctgaggcatgtgagtcctcttaagttatcaggcctagagagacattaaaatgagacagaaatcacagccctatttcctccttgagctatgtattcatctcttgaaactgcttgctattgccacatggagctatatagtaacccaataatgccacacctgacaggataacccaccccatatagcttaacaatgtatagccaatcactaatcaatgtcgcttctgtaaaccaatgagaattcctgattacaactttgtatcagcccactccttgacctctttttttgactttgaaaacccactcataactgctgctaattggagtgtatattcagggggacttgcatctgtgttcccaggtcgcaatcctcaagcttgacccaaatgaactgtgtgtttataataatttgcctcaacttcttccttttaggtcgatgtgtatgtgtgtttgtgtagagagtatgttccaaaagtgcttgaacagtttaaacctcactaacttcagaaaagtaagttctataaattaacccccaagatcccttgaagttttaattatatatatttattgtacacttatttttgttttatagatgttaaataatgcattattagtgaaaccatgccccagagagttgaagaaaacagtgactaatgaaataatcagtttacaggataggcgattaaaaaacaacaacaacaataacttactaaaatgccaaaactctccctgcttctgagattaaaaaactggctaaaatgaattaaaactattaaggccaactggagttggcacagaacaagctggctggcgtcacagcccaaatttctgccacgtttcaaccaactccccacaaatgtgcacatggaatacatgaggcagcgttaaacagaactgtgcatgcggaggacttacagacctccgctttccttccaccaatcaactattaattccagaggccactccctaaactttttctaataaaatgaccccatgaaagccagcacaggggacaggtttgatctggactcctgtcttattgttcgttaatttacaataaaaaccttcttttctcaaaaacccaaattgggcagtgagcttcttttccttgataacattagttttaatcatttgagacagtcactctgattggaaatagtaaaaactgacttcaaaacaaaaaatgtaatgttcaacattcacaaaacgaagcaagtataaaggaaatttaagttttatatctgcatttatgtaaggcagaaacgttctgtaggtaagatggatttgaggacatatgtgatcctgagagtggcaatgcctgggtacaacaaatattccaggcagtatttcaggctttcaaggcagtgtggttggtggggtccaagttaagagctccaaacagtaaagcgggacttgggtaatgcctggtttactgttggaacaaaccaaaaattccactaagataaatatatgacatgaaaagggatggagttgggaaatggagtggcaaggtagggcagagggacctagagggcccaggagagtcagctgggctggtggggttggggctgtggacacaccctcctcttgttgctccctgcacccttagaaaccttctgtgactcttccatgctctgtgatgcaggcctgtgcttatagttaagcctgggcaccctcagtgctcagttgcttcaggcagctgagctattcagaccatggagaatatcctctgttttctgaacagctatactgagacagggctgagccctgactcacattggttggatatcgaccccaacttcatctgcttgagtgggttggggttgtttatactgtacttgttctacgtggtattgaccctgtattcg

SEQ ID NO: 42100 - DNA, 2300 bp, Homo sapien
gagccctgcccaaattgatgataatggaattatgaacaaataaaatggtagcacttttagatcactactgttgttatgcagtgataaataactgatatcggaggtctgaagtatattaatattggtagaaataagaataagaaaaatgcatgcacaagacatttggaataatttgtgtgttttttgtttttgttttgtgttttttgttttgagacatagtcttgctctgttgcccaggctggagtgcagtggcgcgatctcggctcactgcaacctctgcctctcaggttcgagtgattctcctgcctcagctatccaagtagctgggactaaaggtgcccgccaccacgcccagctaattttttgtatttttagtagagacaggctttcaccatgttggtcaggctggtctcgaactcctgacttcaagtgatccacccacctcagcctcccaaagtgctgggattacaggcatgagccactgtgccaggccaattcgtgtttcttgatgactcttcaatgaaggggcttagggaaagggcaaagcaggtcacagaacataagaattcagaaaaaatgagcacaaaggtcagagtaaaaattcaggaataaagttgtgcaagcaatcttcaaaaaagcacttcttcctaagcagttaaaaacatgaaagcatctatttttaaagacatagatatccattagttgctaacagtataaatataataatagttcaaagatttagtttaataagtatatttgtaaagctttaaaggcattaccaagccagctacttttaaattcatatggaaaaatcaatctttagaataaacaggaaagcacataagctcaaaatcaataacaacttacattgcactaatgataagattcattgtattagctgtccaactgtatacaactatattcacttagcaattaggttgctaagaccaggacttctaatggaatgcctctcataatttaccagttaaattttcagatgggggttatcagtagtagttacagtttaatagaagctgttagtgttgaccatgtttattgtacaattcaagaggaaatagttccccagatgtttagcacttagctttatgtttaagaacactagcctagtaggaacgtgtcagtaatatcccttacttaatgatcacatttttaaaaaatcaaagtaataaacgataaagagaatccagaatgagataaaagaaaaatacagagtcagaaagtctaaaatgtggaggaaatggataatgtaaataaagtaaaaatgagccaaatatatcttcacaggctatgagaatcgcctaaaggcacggttacataagccgtatgacagactgagggtctcctggaaaaggatggaaaaagtgtttaaaaggatcaaaatgggtggattttaaagatctcatatccattaagcagtgttaaagaaacaatagtattgtcgaaaaaagtgtttaaaaccaaagggtaacctacctttggatatgtaatttccataaagtttgtttaagtaaaaaaacctacaaaacgacctcagtctttgtttaaacaatgctgtctgccaaacgattttgtttatcaaattttttctcaggttttggagacaaggattgagaaaaaatgtggaattggagatctggaagatctgtgtttaagcagtgggaccttaacgttagacgcacaaaaatgcgttaacgaaagccagtaaaattgagaatggggtcttctggtaaatcttgtactttggtttgtaagaaacttctatataaagaagtttatcaagtttcgggagtaagataataaaatgcacttaacccattcggaatcctacccctacctaccttacctctgtgcggttagcttctgacgcgcgcgccagcacgttctgtggagaagcggagcgctgggctctacctgagcagcgcttacgccgaagggcaatgctccccccgaatcccagttccggccagccaggtctcccccacctgcgcggcaagcagcggtggactccggggcgtgggaactggagaagcggtggcgcgcgctcctcctccctggctgggcggagctgcacccgccgggaaagtggcgagagccacctcggcgcttgggcgctcagtcgcaggaggcgctccttggcggtgcctggagcccgggcgcaccccaccgctcccgggacctgttgggggctggcccgaaccgtcgtcgaagggagccgctcggccacccccgacgttcctcgccccgcccgacgttccctcaagtggccgaaccagccggac

SEQ ID NO: 42101 - DNA, 2300 bp, Homo sapien
atggagaataactatcctggtagaaaaaaacagaaataaaatatggtgatagttttgtttcaggttttttacttgttttctcttttgtctttggaaggtctgtttgtttcaagtgagctgtcaggtcatatgttgttttaacatgatgataaacataaagatttatctatattcccttcagacaggccaaagggagatttcctcagtattgagccatggcctactgccatgcaaatgagccccggttaatctatgaaattcatcgtgtgttactgcaaagtagtgatttattgtgaacagtgattttcagatttgttcttcagtgtcctaaagatttttagtagttcttcaagaaccattgttggtgactagtgagggaggtgtagtaggtactagtcctgggccccacctttgcgtcagtctatctgttttaaacctggggattctgctcagaattatataatcagggggaattgcaaagggttgaagattttgagaacttttagggatattttcctttcaagcttcagggttgaaaattaactaactcctgtgagagtaggaactcctctgccacactggaggctgctcacccaggagaggggagtggggggcccattgaggtccctggaaatggcctgccccacctcagccacagtgcatggctggcaacaccctttttcccttctgggatttactgtctggtcttacatttatcctgtgtgcagttttacatagtcgatgccacaccatttatataaagatgcttttttcagttagtagtatattgcaagcattttctcacatcattaaattcttctaaacatgaattttaatgtctgtgcaatatttcatcacatgtatttaaccattttcccactggaaatataggttgacttaaaaaacatttttggctataataaatgatactctgatgaacatctttgtcttaagatttttgtcagcatttctgattattttctcagggttaattcttaaaagtggaatttctggttcaaagaataccacagctataaaaatccatgtattttgctaattttctttccagaaatgctaaatcaattttatattgatgcataacaacatggaatttcaattcctgctctgaataaacctttgtttcatagaggattattagaaaatcatcttttggtgacagatatttaaagtagaagaatgtatgcaggcgtgttgaaattgtgtgaggaaaattttttcttctcatccttttcatgaaaagtcagaatgtagtggttgcatggcacctgcatttagaacactaactttagtcagccgatattaattggaagcctaggttcaaatcatggctttgccacttactaacttcgtgattgtggtcaggtcagttactctctctaagttgtcgtttccttatctgtaaagtgaagaaaagattagcattgttatgagatggagataaggcatgtgaggaatccagcactttgaaaagagctgagattaccatgacagcaaccatatatagctactgaacacttgaaatggagctggttcgaattgagatgtgctatacatgtgcagtgtgcaacacacactaattccaaaggcttcgtcccaaaaaagaatgcaaactctttattaataaaagagttgattaattattaataaattttgatatcattacctgttgagatactatttgaatatctcgatttcaaataaaacacattattaaaattaattgtaatacatttattttgctttttaaatgctttttttccctctttgaagtggcttgtgttataatcttactggacagtactgctgtagaatataataaaggctggaggagcaatttttagaagaaaaagtgggttatttctccattatggaattatccagttgtcatcttatcttttggggacatttgattcttaggaaatgatgaggcatttggacagggtcctctgttttggtccggaaggtttagaaaggctagagtagggatgatgcataatctttcattgtttgttagaggggtgagtggagagtttaaaaatagcgtcccctccctcctcccctcccaatgctgatccctcatgagttatttctgttggccgcattaggaacctgacatttgattcattcagtgggtcctgcctaggtcctttaaaacagaatggactgttagggaaaggctgccctgggccatgcaggccgaggagaccaaggggattggaataaccagtatggcaaaatgcttggtcaagatccagactcgacgaagcctccaattgcac

SEQ ID NO: 42102 - DNA, 2300 bp, Homo sapien
ggaatggaaaggttttctatgccctgaatttgcagggcctctaacgctcagaacataggataataatatacacttattgagcatttacttactagatgccaaaacattgtgctaagagctttaagtgcattatcccactcagttctcccaaactctattagatgggcgctattgttctttctagtgtgggatgaggaaagtacaagctgaagtggttaaaggacttgtgctttgtaaatagtggagtcaggacttgaaccttgggttacctggctcaaggtatgcccatgctcttctccctttgttgagcgtttaaagggaatcaggtagtcgggtaggtgtttcacggtgatcaccatgtcagcggtgcctgaggatggagaaccagggcaggagggccagttagtaatttctggtattcagacaagaaacgggaaggacctgaaaaagaataggagtaaaggaaattgaaagaagagagtcatgagaggcgttgcagccagacttggtgatccacaatttcatgagaaaatgagtgaatcacagaagattccaagttgttttattaacattcagaaagctgtagcttggaccctgggccagcacctgagcttgtggagatcactgaaagtggtcatcatgcactcagggaagacgggggtcatcagtcactcgcactttataaatcttggaagtaagttctgtggtttgatcaaagctgccattctatggcacatgtggtcctgcacatttgaaacatccattaagcctttgtgaagagttgggagttgtatgcctgaaggatgaacctgtcaggaatcatatcaccttgcaaggacagcttcaggggctatttccctgtgtatttttgctcattctaagtagttctgtatttcattcagcatcagtgcagcagagagatacttttggtttggagggtaagacaagaagagcagaagaggctgacagtgcagagggagaggagctttcttgcgtctgttgggaaacctgctacagggactgaaggtgctctgggggtgccaccaccccttcatacacaggtcaagaaagtgttatctgtcttgtgtaaggaattgggccttggttgaattactctgcaaacctgaccaagccaggaaggagtcatggatggagaagacctgtgcttggctgcaccaaaccatggccatcctgctctccagagtcaccacaacacccgtgaccctcccacttagctagggatggtgtgtggccatcgaactgctgttctgaagacttcctgagaggattccagttggcttttgttggggtttgagggacccaataaataacctccttcttccttcctgctttctgaatcagctgagaaataaaacacaacaggtgctcaaatattagcagaaatgatgatttacagggagatcaacatgtttacctcaggagggggtggtttcacaaccttctcccagcctttttattgattaggattattctgctcctgtgatctctgagagaggaaaaaaagtcaccattcttggcagaaaattaatgagagagaaaaaagaaatttcctctctgggaggctacagactgcttgaaggtgggaccaagatggcctgatagataggcaagaataacagagttctttgggggatggtggggggagagagagagagagagagaaagagagagagagagactgactcttccttggagttttaagaagaccaagattttaagaagaattttcatgaactaaattagattgatgactgaaggtaaaagttcatgcttggatcaatgtttcttcttctgagtccttcactgtactggaggatagggagaagcaacagtcttgcaaatatagtagcatgttatagttatcgatcatctctatttcagtcaagatcagttagattttgctgaggaaacaaacacccaatgctcagtggcttagagcaagaaaggcttcttcttgactctgctctgtgcccaccagaggccagctggggggctccgcccaccattgtcactcagggaagtcagaaacttggatttgccagatgttgagccacaaggaaaagagccctggaaggtcatgcttcatttcggaagtgattcatagcacttctgcttacaactctctgatcaggactcatcccaagatcttacccaggatcaaggaaatgcaattctatggtgttcagaaggtaataggagctggaaacagtgggcacccagcccttaatggccctcacaactcattgactaatagagttgtttttctttttttaatagac

SEQ ID NO: 42103 - DNA, 2300 bp, Homo sapien
cttagttttctgagatctctcattggtgagaagacactggctgcatgagttttaattatgtatgaccacggagcctttacctgacaatagccggtttctaattcccatctgagctttgaattcaggcatttccctctcctccagtttaatgtgttttttttttctctttgtctcaaataaaaaaggacgttgttgctcttatttaattccatgttttccatgaggtggttcatacatccttatcaatgactttgaaaaggtgcaattatttggtcttaagtttctcctccacaagtgagtgatagcctcatgaataagagatgactcctttttctcaccaggcacttccctgttgcccctgtactctctcatttgactttgacattttgacaattcgaattctccctggcaggtgtgaaatcatgaagttccttgacctgtaggtataccatctaatgattgtctacgaagcatctgactttcttagaagtggctttgtcaggttttgagtggatccctactggattgcttttggcatagttgagctctgttagagtgacctgaatagcagaccctcagcagcgaactgctacttaccactctggggataagatttaatttttgtttgcctctgtctttgatttgggtggctttatttgcttggcgatggactgtctccagccagtgtaagtcttcatccctgctctcgtctgtatcttgcctcattttagtttaacctcatttgaatgctttactgtgtagttgggcatttgtagaacatattggggcagcatgcctggattagctttcatggtagctgcctcccagctctgagcattccagtactgatcccttttatctgactggagtgtttggatacattcatttggtcatgatactgtctgggtttcaaggtggagctggaagtcaaagccacggccattatatggctagctggctgctctcatgggcttggccccaaagaggagcttccctgctcttctccaccctcctcccagatcccatgttgccagggctgtctagtcctccccttctccaatagctgagcaaaggtctatggtgataaattgctgtattcttcctttctgttaattgccataaagtttccacggacacatttactaatcctgctattgggaaggatgggagcaacttaccaagcctcaaatattctgaggaatctgggacagtagggatttacatagccagtgacagagctgagaactaaatctagcagtacttgacttgtctgggccataagcctaattaattccttattgttaataaagagaagaaatgaaccgtttaggaacctgaagttctgtccgactcaattgacctcactgtactgctctttgtggtactgctctcatgtgcttccagaatcatttgcttctgaaatctgcccacctgaaattcctggcttggttacttctctccatatagcagggattcatttaacataatttgagaatgcagcttcaggtggttgttttggtttttgtgggtgatatacctagaaaagacatataaatagaatgacttaagtcacatctattttcttatacagataaagtttgtaagaaaggaatggtttctgaccttgaatctatctttcaatttcttacagaaatgatttcaaatgaatataaaacctgtaatttaatttcttatagaattgattcaatcaacttatatatccatatttaatcaattgggcttagctctatgcagtgccactgtagcctgttgtctaacaagatatgttatgaacaatgaactcattttttggctgatgtctttattcccactgattttttttttttagaattttcctaaggatagctgggagtgaggcctaagtatgatccatccctgtctgatgttgtctgatagagaaacagaaaagcttgcatcttaatatccagcaggttcttgaacaattaaaagcatctcatgtttgtaacttttttaaaaaaccatcaacctatttactgtgacagaaattaggaaataggatcttggtggcagcaagatttctataggtaaacaatgcagtattcaaactgcagcgagcttagattggagccctagagctcccagagacagaagacgagatggcagtattttaaggcactagcagatcacggcactgcaaatcctttttgtcttggcaaggcacaaggagacctgcttatgcagctttcaaaggtatgtgtcagtcagctaaaatgtaatcaactcaggtacgcttttatttaacataatgcatgtcatga

SEQ ID NO: 42104 - DNA, 2300 bp, Homo sapien
tattttcatactagttgaatctcagcctttattcctaatcaggccagacaaccaatctcagattcttctcatttcttcaaaattctgtttcttacagtcccacattgggttatctttattctgtctttttcactactgtccttgttggtcttattttgcttccttggaatttggggtaacaatttttgggtattgatatgactcttttggagcctaacggtcactataataggatggacaagtgtgtgtgtggtcttaaaagaaaagcatggactgtttggctggtgacttttctttgatctctgggctgtctgctcttttggctagcagagatgatccagttttcaacttggggcaggtcccatccctgccacctcatatgtgcatatggggatttacagattacagctgtaagatgtcctccactgacccggtgtcataccagcttcccagccacctgtgggatgaacaggtgttctctcctttgaaatgagaaaagaaatggagagacttttcaaagatccccaggattagccagtagctgggccaagaatgaaatccacatcttcccataccctcaatactgacctctccatcaggatctgccctaacatttgaagggcccagctcaagagcctacatgaatgccccatactatcatctaaatattcataagcaatagtcagctattgagtgctacataaaacattctctatcctcctatcttgacaaattgttgcaatttggaatttccaggagcagatactgagactgagtttgtcctgtgtggtatttattagtgatcaacagggagaggaggcaggagcaggcagagagagaagtccaaatgcaatgcggactcccccaaaccttagccaaccccactaggtgtcctagagaatatatggcccaccagactgtccagggcaggtaaaatttgtgtgccactcttcctcgacccccaggacagggcatatctttggatgaggggactctatgcaggcacaaaccttgaaaaagctgacagctggtcaacacctcctcttctaacaaatgttccttcctaatgacctgttctgctccggcaagagcaacagggtgagaggacttccatctctcccagctcctggacattctagtgctcacattcaagctccatacccctgactcaacagctgctcctggccactctcgggcctacggtacctgacacagtggctctagccaccttggggacaacagagaggcaggatacctcctaccttcaacaccctggaggcgcgtggggaattccagagtcctcaatacccagagattggactaaaacgggatggggcacatccgctttgccattagacctcttaattcctgagcaaccgggaactggaggaggtctgtaaagcaggggagtaggataggaacctatccctcttgctcgggtcaaaggtatgctatcaaagatcacactaagatgttgggagatttaaaggaggatttgcacatggaaggctcttttttggagaaagagactgagtcctagctagcattaaataaaacaatggcttaaacaatctccatgagtaccagagatttttactattagcgatattcctggtgtagccgtgtcagggctgtcactctctctgtcactcgccctgggcccagcaatcctttcccgaggcggaatccccctggcggtgtgggtcaggatcgctctccgtcccctacccgcgccaggtccctggagctgagcagagcagggcgctgtcgagcgcgttggggagccggggccgggacgagcacaaccgggagcccgagcgacagcggccaggggagggaggaggcggtgaggctgaggaaggcagtcgggcccagcttgacgcagcggcggctgcgactgagcaggccaccaccagggcacccgggccagccgcgccagccatccctccgcctcctccttcagctgctcggcgcgcgtgggagtgagtgcgtcgcgagcccgccgggggtctcaggctctgggcgtcctcggcgagcgagcccgggcagagggaggcgcacgagcgcgcgcgacagaaggaggcggggaaaggagggggcgaggcggaggcgagcgaacagagggagggacccgcccgccgcgccccggccgctgggcatgtgtgtccgcaggcgcccgacgctgccgatgtcccggggctgagccgcgcccaggtgtcccggacagtgcgtgcgagcgtgtgtgtccgcgcaggcgagcaccgcgccggccctgagcctcccgctcgctccccacggcc

SEQ ID NO: 42105 - DNA, 2300 bp, Homo sapien
accagcaggtggcactctttggaaagcaaaaaaaaaaacgtggaattcagctcttaggggcacctttgaagttccgctgtcctggaagcaggcacagagtttcactgacactggcatgctgggtatctttcattggtacctccagatacaatctccacccttctcttccctgctctgagcccaggaaattggcatgcatgggcaccgccggactccctagctctccaccttccaattgggtttggctggtggggtttggccacgagcaggagatcacagggcaagaggaggggaggggaggttatttattctcctgattatttttctgctgggtcaacaaggaatgtctatctctctcttcctaaggctacagtcctgtcagacacttctttctatatggtctattctctctgtctctctccttccattctcttcccttcccatataaaggctccctctcatcagcccctttctatttaagagtgaaaacacttctcggttactcagatgtggactctgcccctagttgctttttctgaccctacccacacctgtgctaatagtccctttgttaaatcctgttcacctgccccaatttgagcatgctgtttcctgccaccaccctgagcagcacagcaagtttaagatccttggacatgtctggggaaagaaatccaaggagaagaatcagattttctgctaatcattctgatttgaacattgaaagaaatatgagcttttttttttcatactgagctagcgaagcagggcacgagttaagagtatttgcatacacatctattcctcttatcaagcttgagaatgcctagagggtaatcttttaaatgaatattaatatgatattaaccagcacatggtagatgttcaagaaatgtgtattgaccataactgaattgtaagacctctctccaagcctcaatttcttcacctgtacagcccccatccagattgaaatctcacctactcgggctaagtatatgaaaaacaaaggcagtgcaggggtaattgaactattcattagataaatgcttttatgtcacttttattgttttctaggacacagagtaatacctaccttggttaacaaaagaccaaaggaggtgatgccaaatgcggttagaagtgcttttaatcactttgggaggccgaggcgggtggatcatgaggtcaggagatcgagaccatcctggctaacaaggtgaaaccccgtctctactaaaaatacaaaaaaaattagccgggcgcggtggcgggcgcctgtagtcccagctactcgggaggctgaggcaggagaatggcgtgaacccgggaagcggagcttgcagtgagccgagattgcgccactgcagtccgcagtcccacctgggcgacagagcgagactccgtctcaaaaaaaaaaagaagtgcttttaatcaaatagttcaaacgacacataattaacattgttttaaagcaaatggacactttaaagtggtgctccttcctcttaaagccccaaccagtgctggatttaacagcagagccatacagccaagacatatgctgctacggtcaacactcaaccctaagtttgacaccaaaagatggccgccatttattattgtgacaaaaggccagattacaaaacgctgtgtacggcctgatcccagttttacaaaatactcatacccatctatctacgacggggcgcggggaaaggggagtcgttttaggaagtgctgcttattgctgcctggtgtgggaaattatgagtcttattttctgtttattctttttacaagaacatttttataaatgaatgaatgaatgctttccatgggtggatgaggatccggcctgccagggtgaggatcctctggaaccaagaggggccggggcagtagaacgacaggtggcggggctttgggcggctccctccagcccagggagacgcgagtgccaggccgggcgcgcgcttcacttccgggaagaggaaagagggaggggaggggagaggaaaagaaggggcaggagagagaggccgggaggttgggaaagggaggaggaaagcatggaaaaggggcgcgggaaaacggggagggcgcagaggggcacggccctcactgccccggccggggcgagagcggctccgcccctcgagcgccgggtaggccggggccggcggggcccggaaggcgacgggaaggagccgagcttgggttatggcggcgccgggcgcgctgctggtgatgggcgtgagcggctcggggaagtaggtccgggagagggcggggggcgc

SEQ ID NO: 42106 - DNA, 2300 bp, Homo sapien
ctctgaattgctccccaaaattaaatgaacttgataatcgattataataccgtaaaatgctaattgtagatgatggacatatgtgtatccacttcccaattctttcaactttccgcatgcttgaaaatacaaaaatggtaaggaaaatttttacaagcactgggagacaaaaacaaaagtgataattctgttggtggtaaaagtttctctcatttgatgttacacacctcactgcttcacaaaatacactacctttggaactcgttaaaccaataccccaatcacctactgtccctggggaaactgataggtacatttcaggaattgttgtttcctgtcaccaactgttcacgttgtttgcgatcttcagagattaagtcagtaattatggaaaacacgacgtattcaacaatacactaaaattatttgttaaattccaccaagaatcttaattaactgcaagatttgtattcctgaaccaagtttaagtaatattctgcattcactccgattttcttttatttgattgcaaccgctaatatcaacatcgctatcgcccctctaaaatcaaacaaaaacctacccaatgattggcatctaagagatgataaacatactaaaagggaaagagcaagtcatcagtgaaagaaagtcattcacttttctccttaaacctagtactatcactattacttaagatggagctaaaaacagtttctacgtcataatttttttttaaaggttgcaaggtgggaaagatttcaggagttaaaatgcagaactaaatatacacatgcacctcaccccaaaacccaccttaacaagcaggcacgtaaaacaacgaggatcccacccacccctttttaattcatgaaacaaaaccgcagcctgagctaaagcgaaccctcgcccccgcccagcctccaccccgcccggaggctggcggtgggtccctttcctttgtgaggagttggaggggaggcgacggagggcggggaactgggggaggaggctgagggtcggcggataccagagaaggaaggctccgagaaaagcggcatcagcccgtcccacaaacaggccgcgccgccacgccacaaaccattgcggtgtcccaaggcgcaaacccacgaacttgggtgtgatctaatttgggacgacgcccgggagaatggccgaggacgacccctctcccaggcccttccaaaaggtctcctggggcggcgggcggaggtcctgccgccacccccatcccggcccgagccccaggcggcctcacctgctggacggagctattctcgggcacggcgaattcctccttttccttcggggtcttcacggtgactttcatgattttgggctccgcggaggcagcggccgcgggggcgccagcaccttcggctccggcggcgctatcctgggagcccggaggaccgccgctttcaccactctcggccatggctgtggcggcggcggcggcggtgactcaggcaagcaggagggagcaggcgagcaaggaggagccagcagacaccagagccggcaggcctggacagcgaagaatgcagagcacgccgcctcagtagcaacgggcgcagggccaccgtagcgggtgtggggccccggagctcggtgcaggctctggcgcaggcccgggtcaggcgctcggcagccgccgtgtgttcaggcgccgctcgctcacaccgacatccgcagcagccaccgcttcctcctccctgccccttcccccacgtcccttcgccggcgccgcgcggagcacgccgggtaacgcgcctggcggcgtcgccgagtcatccccggctggcgcgactttgagctcagcctgcgtgccttttcctttcccgctccattgcccaaagtgcaggcgaagccagtgtgaaggactaaaagcaaaatggggcggggtaggtcagttcatggtttttttccactcctttcaccaaaaactaaatcgcagtttccagttaagcgctgtaacggcgcaccgagatgacgtcacggttagcgaaattactagaaagggaccagtgggccctgcggccgcggctgcgcctgcgcgcttgctgtccaggtagtctccccaccttacctcatgcccagctgggccgtgttcacccctccgcgctgtcacaatcgccttgccctcccttgcctctctgtctactctgcgttccccgctgggaggagggtctggtgataaaatagcggcgaggtattttgttattttaatatgcttagcgtttgatatttggaggggtcgtattgccctatgcggggga

SEQ ID NO: 42107 - DNA, 2300 bp, Homo sapien
atccctcacccccatcatccaactatcacttcaagttttttgacggcagaaactgagtcttattattcttgtatgctcaatatagtattatacagtattaggatactgtgataaaatatgttcttaaaattttctccagacagaccatttaacaaacaaaaaccattcagaagaaaatgccacaaataaacatctagacctggggttggcaaactatcttctgtaggccaaatcagatcctatgtctgtttttgttttgcaagtagagtttttagtaaacatagctatgattattcatgtatgtattgtctatgattactctgtgatacaagggcatagcttagtgttttagaccgagatcctgtggctcacaaagcctaaaatattaggttgatgcataaataattgcggtttttgcaaatttttttttttggcaccaaccaaatatttactatctagccctcccagaaagttcactaatctctgatttacaccatagtgcccccacctccgattctcatgcaggtcaggattatatctaaaaagtgccataacaatggataactatatggtatcttcttacaggtaaatcttattaccttatagtgtcacacacatcaaacatttttagacaataatgtagacacagataattgcaaagtccataaatgcagggagacagacacacacacacacacacacacacacacacacacggtatttgttggagaatcaagggaaaaaccatatctctaaatggtagggagtgaagtcttcctggggcatgtgatacaggatgagtagaagttagacaggtgaaggcaaggggaaagtcattctaggtagaggaaggcagcctaggcaaagcatgcaggtaagacacagcatgacagggaaaaacaggtaatgaggagctaatgaagttgaggagaaattttatttagacatatggaagaaattccaaatgattggttgtccagttgtggcactttctagctttagaagcagtgatcatctcacacctggacataaccaagtagtcatccttcattaagcagaaggccttgttattgagccatgctgccagaaatttaggtgatatcaaatgatgtctatactgaaatcgataccctcaggattctcttagacccagattccatagagctctgctaaaaagtcgtgtttatgtaacagtatttattctcagaacagggttggacggcttaggagcagaaaggcagaatgtatctttgcggatttgggtcatagtgggctgtcaggatttaaattgtgcaacattgattaataatgggctggtttgtacattccttgcaagtcatctttaaaagccaatgacgtcatttcaaattaggattctcagagataatttctctctgtattacactgaaaataattttggaactatccttaatgccacttaaagcctgaaattgaccagtaacttaatttgatagaatataaggcgaacacctcaactatattaaattgtcccatttgggtggacactcctcgggcaccctgttccgccctacacacagataatctgggggcgctcgcgcacagctgtcatcgtagcagcagaggccactgtcaatacaggttgcctgactgatcgtctgaccaaaccgggctaacccgagggcggtaaataagctctggccatgaagcaatgactccgcaggattgcgcagggcagtcacgggcgttcactccattttctgttcgttgtgctgaggcctttccaccattaacttaccccaactcccccgcatagggcaatacgacccctccaaatatcaaacgctaagcatattaaaataacaaaatacctcgccgctattttatcaccagaccctcctcccagcggggaacgcagagtagacagagaggcaagggagggcaaggcgattgtgacagcgcggaggggtgaacacggcccagctgggcatgaggtaaggtggggagactacctggacagcaagcgcgcaggcgcagccgcggccgcagggcccactggtccctttctagtaatttcgctaaccgtgacgtcatctcggtgcgccgttacagcgcttaactggaaactgcgatttagtttttggtgaaaggagtggaaaaaaaccatgaactgacctaccccgccccattttgcttttagtccttcacactggcttcgcctgcactttgggcaatggagcgggaaaggaaaaggcacgcaggctgagctcaaagtcgcgccagccggggatgactcggcgacgccgccaggcgcgttaccc

SEQ ID NO: 42108 - DNA, 2300 bp, Homo sapien
attatacaaaggtgacttcttgctgttagacttatggatatatgtctagattctaaagctagaaggattacctgtatccttagaggagaaatagagtaaatagtgttgataaaatgtcgtactcccagccagtgttctttgcacagtcataggtgtagtactcaaaatcattgattttagccgacaataatgactaagagaagggaggaacttcttttgtgtgcaatgggtagtttgatgtgatgacattgatgggtagtcattgagataaaagtcaatattcaataaaacaacttttaatacaattgttttagcctaaggatttttataacagataactaaagtttgggatggcattttctttttcttttcttttcttcttttttcttttttttttttgagacagagtttcgctgttgttgcccaggctgtagtgtaatggcgcaatctcggttcaccacaacccccgcctcccgggttcaagtgattctcctgcctcagcctcccgagtagctgggattacaggcatgtgccaccaccctggctaattttgtacttttagtagagacggggtttctccatgttggtcaggctagtcttgaactcccgacctgaggtgatccgcccgcctcagcctcccaaagtgctgggattacaggcgtgagccaccgcgcctggctgggatagcattttctgttctattctgtcagttattcaccaaataattattgaatagccaaagtgtgccccttgagtgtagtggagggagacatagtgtatagtattgagagatgtatgttctcagtgcagtggaaattcagaataatagaaggcttttcagtgcctttgttggggatgggttttaggaaaggattctttaaagagtcttattacatgtgttagaagttcatgaggtagacaagaggaaagtaggcattctgaaggaaggagtggcaagtatataagatgtgtacatgtgaaagaatatagcatatttgaaaaactgtcatttaaggacctagaacttctggagatacagccagaaggataggacataaatttcttcatgtactaggcaaggagattgggttttatacatccattggcagaaagctgtttaatcattttaacttttagattgattttgggttttcattttagaaactcatgtagcagcgtagaagatggattgaggagctaaaattggagactgttgcagtatccaagcaaaagggagatgggggaatgacagaatgtacaaagaacagagaatgaatttaagatatcttcaggagataagttaaacaagacctagtagttaattggctgtaaggtgtgtaggagagtaggcaaggatactctgaggtttccaacttagacagatgtgcacatggtggtggcataacaaggtacttcataaaggatcgagtggggaaggcagggtagtgagatggaaagatagaatacatttcgtgtggagatgcttattgaacattccagttcagttgtctgtctatacagaaataattagtttattggtagaactttaaactttgagattgaagagcagtgggtataaagcattaaaaaaataggttaagagtgggataatgtgaacaaccgctacgcttttgagaaggttgaggaaagaagccagcaaaggaaacttagcagtagtcagaaatgtattaagaaaaccaagagatgcttgaaaaaaataatgtgttttggatatggcaataaagaggagattgaccttaactttagtatcagagaccagcagaagccagatttcagtgggatgaggcaggaaattgctgattattgtcttaaatttggtcttgaaaggtagaaggtagcaatgaggagggggttataggccaaggtatgactttttttgttttcattttaatgtttaagatgtaagggattgagtaaatgaataaagaggtatctctttatacaatttggctagcctaaattttggttttttatttgccttttatctttaaaaaataaactttaagaaacatattacctgttggtgagtttattttacagtttgtaaactgaacttaattgttgttggtaattctttttaggagtatgaagatgctgaaaatacttcaactcagtccaaagttatgaataaaaaagataaaagaaagaatcatcagggaaaagacagacctctcacagtatcactaaaagattttcattcggaaggtaatgtatatacaatgctattatgctaaaagaactattctacatctgttttatacttcagttgtaaatgtctt

SEQ ID NO: 42109 - DNA, 2300 bp, Homo sapien
cgtccgggagggaggtggggggctcagccccccgcccggccagccgccccatctgggagggaggtgggggggtcagcaccccgcccggccagccgccccatccgggagggaggtgggggggtcagccccccgcccggccagccgccccgtccgggagggaggtggggggggtcagccccccgcccggccagccaccccgtccgggaggtgaggggcgcctctgcccggccacccctactgggaagtgaggagcccctctgctcggccagccgccccgtccgggagggaggtgggggggtcagccccccgcccagccagacgccccgtccgggagggaggtgggggggtcagcccccggcccggccagccgccccatccaggagggaggtggggggggtcagccccccgcctggccagccgccccgtccgggagggaggtgggggggtccagccccccgcccggccagccgccccgtacgggagggaggtggggtcagccccccgccgggccagccaccccgtccgggaggtgaggggcgcctctgcccggccgcccctactgggaagtgaggagcccctctgcctggtcagccgccccgtccgggagggaggtggggggtcagccccccgcccggccagccgccccgtccgggaggtgaggggcgcctctgcccggccgcccctactgggaagtgaggagcccctctgcccggccaccaccccatctgggaggtgtacccaacagctcattgagaacgggccgggatgacaatggcagttttgtggaatagaagggggggaaaggtggggaaaagattgagaaatcggatggttgccgtgtctgtgtagaaagaagtagacatgggagacttttcattttgttctgtactaagataaattcttctgccttgggatcctgttgatcggtgaccttacccccaaccctgtgctctctgaaacgtgctgtgtccactcagggttaaatggattaagggcggtgcaagatgtgctttgttaaacagatgcttgaaggcagcatgctcgttaagaatcatcaccactccctaatctcaagtacccagggacacaaacactgcggaaggccgcagggtcctctgcctaggaaaaccagaaacctttgttcacttgtttatctgccgaccttccctccactattgtcctatgaccctgccaaatccccctctgcgagaaacacccaagaatgatcaataaaaaaaataaaaaataaaaaaaaaaccatgtaattaaatattgtaaactgtggattcatttaaaataacagagatctgtatttaccaatatggaaaactgctcatggttaattttttttaaaagccagttataaaacagtctattatataaccccattttcatttaagtattagaaggatatatacatacatgtatatattcatataaatttatatatgtgtacagaaaacacataccaaaatattaattggttatatctctggttatatctataaatgacctgtttccttttaagactttcctattttaaactttatgcaatgaacacacaaacttccagtcagaaaaaacgtactttaaaaatgttcaggcagggtgtggtggctcacgcctgtaatcccaaccctttgggaggctgaggcaagcagattgcttgagcccaggtgttcaagaccagcctatgcaacatggcaaaactccatctctacaaaaaacgcaaaaattagccaggcatggcagtgtgtgcctgtggtcccagctacttgggaggctaaggtgtgaggctaccttgagcctaggaggttgaggctacagtgaactgtgatcatcccactgcactccagcctaggtgacagagtgagaccctgtctcaaaaaaaaaaaaagatcattacatttgattttaaatatacacaaattcacatccattcattgaagtaatattttcagagtacctgtggaacaggtactatggatacacaggggaacaagatagtatctgttctcaggatgattaccatctactgggaaagcagacaacacagataattgtgttacctcatttgcttcactctgttgctgttccttcttttttcttcttttctctctttttttctcatttgtagttgacttgcttcctaaagtttgagactttccagtatttcgacctttaccttttccaggttcagaatcagagccactgccactatccacttgtaacagggcaaaacgagaagcggtggtgggaacagaactaagtactgctgaggccatcgtaaagatttttct

SEQ ID NO: 42110 - DNA, 2300 bp, Homo sapien
agtatctttcactttggcttcttaaaaattagggttcacaggccaggtgtggtggctcacacttgtaatcccagcactttgggaggcagaggtgggcagatcacgaggtcaggagttccagaccagcctggccaacaaggcgaaacaccgtctgtattaaaaatacaaaaaaaaaaaaaaaaaaaattagccaggcgcctgtaatcccagctactcaggaggctgaggcaggagagctgcttgaacctggaaggcagaaggtgctgtgagccgagatcgcgccattacactccagcctgggcaacaagagcaaaattccgcctcaagaaaaaaaaaaaatagggttcacaatcagcaagtgtgaagtgcatactaaaactctgctccaaacacacttactgtaagtgatgtaaacccaatgggtatgccccaaactccatttttttctcatagttaagtactgagatccctctccaatctgcagctcccactttctgcaggccaagaaagttaaacaaaaaatacaagcaggtactcagtgaggacctgagggattctcccacgagtaaaatacatctattttcacacaaggttcttttggtcaacttctgggttttgctcttactccagaattgaagctactatagtgttataaatctgttgagaaaagaaatctagacttctatgaagatttttaatattttaatttgccaaaaagcttctcaaatatttttatagctacaagtcacatttattaaatgattccagttacaatcccaagcacatttactacacaacagacaatgctaaatggtgaagaaaagtgtctccggctttttagtgtaagacagacgatctttcattagttcttctaatgaaagcacttgcatctactctgaaaaatctggcgaaggtaaagagtgaaaaagaggaggaagagaaaaggcaatcagccaatttgataaactatttttgtcgttactgttcaatatttatgaagcaccttaatgctagagatctgacaaaaattcggtaaggctgttccaaacaataacagaaaaaaaaatcacttttcaatagctggcgggggaggaggaggagcactatattcaaaaagtaattcactatacctcattcatgaatgaaagccaaatttcacccataggctgttaaccgatgctccgaaacttattcgcaaagtacatagagaaagaaattgcgctgggcgaaacctaactcgggcagagaagcggcttcaaaacctgaaagggagaaaacgagtcaggtcgttgctccagaaatttccgagcgcccggctccccgggagggagcgcgggcgccagcggcggggaggggacggtggcacctgtcactcgagcggcccccacggggtctcgggaggctcagcggtcgccggcctgggagtcgggtgcgagtccctccccgccgccccgagccttgcgccgagcgtcgggccgcggccctcccgtgccctctgcccagcggctccggtcagtggggcccgtcgcctcaggccgagtccccgccacccgaggccggggcgccgaggggagcgctgtcgagccgctgcctacgcctccggggtgccggagcggacacccgcgaggcgggcccgcctccgcgtactcaccgggcctcccgtgccgccggctcggccctcctctccctcctccccccgccgccgcctctcccgcggctccccgggcggccgcactgggcgttgggactggtctgggtcaagtgtcggcagagctgggggcaggctcgcgccgggcgggggtcgcggtcggcccacaggctgggcactaacgggtcccggggcgccggggcggaccgcggaggtgagcgcggctgcaggctgcggtgaggggcggggagagcgcggctgagagcaggcgggcgggcggagggtggagggaagcccgggcggaggaggcggcgtgagagcctcggggcgggggcgggggcgggggcggggcctggcgcgtccgccgagcgcgggggtttgtttattttcgcggttggtagcggcgctggcgctggttagaggttcgccggtgacgtgagcgcccgagttgggggagaggaccagaaccacctgctggagaaggggagctacgggggccgggcagggtccaaacgcctcacgtaggcggcggcgccacggtcttcggggtcacagggaagagaagggctctcctcaagcgggtggaaggagggaggcctcccgagggagtgagactctaggccactcccccgcagcaaggcaggatcacctg

SEQ ID NO: 42111 - DNA, 2300 bp, Homo sapien
tggttttggatattgttgagcaacactccttccagccctgtttttgtgaaactccaatttaccttgtcttgatgattctgcgttaccctattctcctcccattttctgctccatcccctttctttgctggcttggctcacctagatcagagcttctcaaactttttgatgtgacacaaatctcttcgggttcttgttaagttgaagatgctggttcagcaggtctggggtggagcctgagattctgagtttctaactaacatcctcatgtcagtgctgctgggccactgaccacgttttgagtagcgagactctaaagagggtgttttccaagattctgacctttgttttcttcttttatctcacagcaatatcactcctaggctgattatttatgagtctattttctagttcagtcctctttcccatattacaaaacctttatttctaacttattagtgtccatgtctctctggctgtcttgacaaccctttgaattcttaaaatgtccaaatctaaactgatctctcaagaagtagctccctctcctttgtaattgtctcttttctctcttgcaattatctacaaactcaaaacctccactttctttgatttctctcttcctacccacaattaatcaatcagttgccaaattctatagatactgcatgcacatcatctctcaactatgctcttttaaattcccctagctgtccctttaggtcagactcatcatttttacctggcctacagtagatctgtccgtttttccacctctgatttctgcttcccctcacagataaatcactagcacaaagaaaaaaaaaaaccttccttttcttcccccaaacttctgaaccataaaaactcaaaatactgaattaaatataaattcatccatttggtatcttaggccccatactcctttgtcttttctacctctcaacataccctggagtctttgctctttccccaacacaactttcactgattcgccttcatatatattctcatgctatccctgcttgctgtaaaactctccctgtctccttcaaggtcaatcccaaatgcctactccttcatgctgcctttctttccttatccccaagacagatatacacggttctttgattcccggcagtactctgccacttttcacgtggcacctatcatggtttgtcttttattgtctgttttatctttgttttattccttacttctttgaaggcaaaggtatcttcaactcccctctaactctgaagcatcttacctgtggggcgtctaatattagttgaatcatggggatttatggagataatgtgatgcgctggtaagctaacagaattggaagccagtacagctgggtgccggctctgccgtttattagctgtgaggttttgggtaagtcacttaacttcgcctgtaaaattagtccactacgacctgatggagaaccaagggagataacgttaaagcgccctgcaactctacagggaactgagcaatgttagttattttccttacagagatctgatgcactcttgctactggaatcttgacttgcaggaccatccctacttcattgcctggaggtcgaaccccaagttgcagggaacccaagctaccaggtcccactgcccttttccactccagggccctctaaccgctctccgcgtcgcaggtgatcctgccttgctgcgggggagtggcctagagtctcactccctcgggaggcctccctccttccacccgcttgaggagagcccttctcttccctgtgaccccgaagaccgtggcgccgccgcctacgtgaggcgtttggaccctgcccggcccccgtagctccccttctccagcaggtggttctggtcctctcccccaactcgggcgctcacgtcaccggcgaacctctaaccagcgccagcgccgctaccaaccgcgaaaataaacaaacccccgcgctcggcggacgcgccaggccccgcccccgcccccgcccccgccccgaggctctcacgccgcctcctccgcccgggcttccctccaccctccgcccgcccgcctgctctcagccgcgctctccccgcccctcaccgcagcctgcagccgcgctcacctccgcggtccgccccggcgccccgggacccgttagtgcccagcctgtgggccgaccgcgacccccgcccggcgcgagcctgcccccagctctgccgacacttgacccagaccagtcccaacgcccagtgcggccgcccggggagccgcgggagaggcggcggcggggggaggagggagaggagg

SEQ ID NO: 42112 - DNA, 2300 bp, Homo sapien
ggtgcaacaacagctcactgcagccttgacctcccaggctcaaaccattctctcacctccacctccagagtaactggaactgcaggcatactcagccacacctggctaagttttgattttttgtagggatggggggtctcattatgttgcccaggctggtctcaaactcctgggctcaagtgaccctcccagttcagcctcccaaagtgctgagattacaggtgtgagccactgtgcccagactgaatttttaaaattttaaataattcagttaaaagaaaaaaaaataaaaactataaataaaatagtcagcttttttcccccaccttcattcctatatttcatgagagaaggaagggtttttgaagatgcttagattgtgctactaaaaacaggaggcattaaagcatttaaaactaaattggtaaagttaaatattaccatacgacccagcaattccactcttacgtccatacctaaaagacctgaaaacaggctcggcgcggtggctcacgcctataatcccagcactttgggaggccaaggtgggcggatcacctgaggtcgggagttcgagcccagcctgaccaacatggtgaaaccccgtctctactaaaaatacagaaaacttagccaggcgtggtggtggcacatgcctgtaatcccagctactccagaggctgaggcaggagaattgcttgaacccatgaggcggagcttgcagtgagttgagatagcgccactgcactccagcctgggcaacagagcgagactccatctcaaaaaaaaaaaaggaactgaaaacagacatccaaatattgtatgtgaatgtccatagcagcatggaaacagcccaaatgtccaccaccagctgaagaatggataaacaaaatgtggtatgtctatatccatacaatggaattttttcagccctaaaaagtcctgatagggccgggcagggtggctcatgcctgtaatcccagctactccggaggctgaggcaggagaatcgcttgaacccatgaggtggaggttgcgttgagcctagatggcgccattgcattccagcctgggcaataagagcgaaactccatctaaagggccgggcgtggtggctcacgcctgtaatcccagcactttggaaggccgaggcgggcagatcacgaggtcaggagatcaagaccatcctggctaacacagtgaaacaaaccccgtctctactaaaaatacaaaaaattagccgggcgtggtggcacgcgcctgtaatcccagctactcgggaggctaaggcaggagaatcgcttgaacccgggaggtggaggttgcagagagccgagatcacgccactgcactccagcttgggcgacagagcgcgactcggtctcaaaaaaaagaaaagaaaaaaaagaaaagaagtcctgatagatgttacaacatgactgcatcttgaaaacattaagcaaaagaagctagacacaaaaggtcatatactgaatgattccatcaataaagaaatgcccagaataggtaaagctatcacagagtcagaaagtagattagtggctggctggggttgtggggagaggggaaccagaaggaatgactgctaactggtttggggattttcttttggggttatgaaaatgtttctgaactatatacagaggtgatggttgcacaacactgtgaatgcattaaacgccactgaattgtgagttttaagatggtttatgttaggcaagttttactcaataaaaataaaaataaactgaattggtagctaagatattgaaacacggtgtggaatcgttctcactcatttcacgaacccgtagaaagatgcttgcgctcaggcctcacagaccggtcccagcgcgttggtgggacacaactcggatttgcaggcaagcccaggggccggccctttgcggacttcctggggacgcaggactcctgcgcggcgggcttggaggcgtggccaggatgggggcggggccaggacgcggcatccaggagaggacgcggcgggaggcgggcttcgccggttgccaggagaactcgcgacaacaaaagacgcggacggcggctgcgcggtgtggcagagcgaagctgaggagtccagcgctcgccgacaggggcctgggctgtcccgagccggtcagtgctcggcgggcctggcgggcggtgcggggaagtggggcgccctcccttcgcggtgcccgccctccagcccgccgcgcccgccgctcccgcgcccccagccggccgttgggactagtaggctccggcttggggtcggg

SEQ ID NO: 42113 - DNA, 2300 bp, Homo sapien
tatctcaaagttgagtgaaggaggcatgttttattcttgtgtatactacttttagtgcttaaataccttgaacataggcaggaatttgactttttgggtgggagggggaacgggggggggtctcactttttctcacagtctggagtgcagtggcacaatctcacctcactggaatctctctgcctcctgggctcagacgatcctcccacctcagcctccctagtagctgggaccactggcgcatgccaccacacccacctaattttttgtgttttgggtagagacagggtttccccatgttgctcaggctggcctcgaactcatgcactcaactgatccacccaccttggcctcccaaaaagctgggattacaggcgtgagtcaccacatctggccggcatttgacttttttctatcaataaacctcagtgagagaaaagggtctaagttatttacccttctggattattttgcagattgctagatttccttgctaaatcaatttgtctcccaagacttaggtgctgtggtagaaaggaaaaatcccaagccaacagacttacatttccttaacaactgtattaatgtactagtgactttttctggaaaacgtatcatagtggagtccttaaagttcctttttcttaccaaaatgaagaaactggagtgatgaagatctgcttttctagggtaacagctgtcaaatttaaaagctccatttggggccaggtgtggtggctcatgcctgtaatcccagcattttgggaggccaagacaggcggatcacctgaggtcaggagttcgagatcagcctggccaacatggtgaaaacctgtccctactaaaaatacaaaacttagccgggcgtggtggcgggcacctataatcccagctactcgggaggctaagccaggagaattgcttgaacccaggaggcggaggttgcagtgagccgagactgtgccactgcattccagcctggatgacagagtgagactccgtctcaaaaaaaaagctccatttgggaggccgaggagggtggattacctgaggtcaggagtttgagaccagcctggcccacatagggaaaccccatctctactaaaaatacaaaaattagtcaggtgtggtggctgacacctataatcccagctacttgggaagctgaggcagggagaatcacttgaaccggggaggtggaggttgcagtgagctgagatcatgccactgcactccagcctgggcgacagggtgagattctgtctcaaacaaacaaatttaaaagctccgaatcctccaaaaataccaagattttcctgtcggtaactagagatgggtactgatgattatttttaataggtgattttcaaagatgtgaacgttatccatggagatttaagtctccaaaaggaaaaaaaatgcatacctttatactaaaacttcatcaccagtcaaatttggatcatcactaaattggcttctacacctctctcctaatataaggtacttgtgtaagtttgcagttgtgagacacttatttcctcatttttaatgtcttctcagtagggccactgatatagtcactatttgactgaccagaatggttggcactggtgattggctcataaagtgccctcgatttagggggctcaattatcaaaggtttaaatcctagcccaaaccattgctgtgatgggggttaatcaatgaaccactcagcttcacttgcaaaagcgggatcacaatagccgctttcgtcatgacccagcctaggtgagatttagtacttaagtacactgccaggcacacaaggttaatttaacaatttaacacatttgtttcctcatccatttctccaaaccttccaactaatcctaacgttcgttcggccaaatgggccaggaattcacttaaacaaaaacaaaaaacaaaacaaacaaaaaaacactccctggggcttggggaaggaggcaccgccgcccatgtcgcagtctgggggtggctcagtcctcagcacccagatctacggccataatgctcttcgaggccaaggagcccggatgcggggcgttgccgaaggcgtcttgctcaggctgcgggaaaggagaggggtgggagcggggtgggggcatcgcgacccagggcaaggcggcgagtcgccgtcttcgagtcccacctgtccgaagcggggtgagaaaaggcaaaacatggcaaagccatgcacctcccagggtgggcaactcacggccggtgaacgccggacccttagcagtttccagacctttggaaccggaagcgga

SEQ ID NO: 42114 - DNA, 2300 bp, Homo sapien
tccttttaagaggaacgtttcaacaaattttacaggtgtcaatcaacccttgttcaaatcgggcacacatcaaatctagcatcatgggtgttttatttatttggaagtgaattttaactatcaatacaaatgccaagatactacacaaaacatccacaggaacttttttcatcttttttttttttgaattgtacacaaacatttcctacataatccaacatacaacagagaaatggtacatctttttctttcaatttgcatacaatggaaaaacaagtatatatatattttacaaagtttaactaataagacactagagcaaattgacagtttaagtctataggtgagaaattatctaataaaaataatcaattttttcagcattagtcacttccataaccaagtgttattctgattaataaaacttgctgccaatcagaattctggtatatactcataccattactcaacttgtagtactgctccccaccttagttcttcacaactaacatagaaaattgttgaaaagtaggggcaagcatttgcaaaaacaaacaaaaaatccccagcttattataagcatgaatatgtatgatggaatttcttcccagcaatagacttccaaaccatcaagaaatcaccagaactaagtttgccaagttattttgcctatgtccaacaagagatgcacttatatgtccaacagaggagctgaaaattaaacttagtgtttagtttgggggtgggttgggaaattcagccaccattttaaaatgactgtcttaaaaaaaaaatgaccaccaaaaataggttcactaaatttattttaaaaatcataaaacgtttcttacaaaagagcattacattctgcacactgctctgaacagatgccagggacatgtggactattgttacttttcctccctgtcccaccccccaaatgttacagtgaccacaaagcaaggtgttcacaataattacatggggggaattttttaaaccaccaacaataacgaaaaataaaatccactcactctgctgctgtttcaaaatttcaatgttagtttttgcacgcccttcccccccccaaccctgtttgtaaggaactaaaacattacatctggtgaacagcaaagatttcactacacctcaaatgcagaacacctatgaagcagaggaatgttggctttttaaacagaagcagataaaaaaaaaaagatgcaggactccttcagttcttcactagtcttagaaaaactttccagaatactgcttcacactataaaaaagaaaaaatatcttgcattagaatccttcaacatctgcatactgcttcacactataaaagaaaagaaaaaaaagtgcgaattagaatttttgctcgtaacatcttaatcaacatcaagacaatttcaatgctaaattaaaatgataaacacgtccattacaattagaagagttcaaaaaccattagcaattacaaattaaagcaatgttaagtgtcaagaaaaatgatgagtagtaaatcggacattagtagaacagaattaagaaaacggaattgaaagttgttaatatttggtagaaaagacaaagaatgctagtaaggtgtgaaatgctgcattttacagcaccaatcatttgtcctgtagaggcatggcctgtgccatatggcagactgtgatttgttgtcgatttagttatctaaaaacaacaaaatcactagtcttccacacagaactaggccaacatccaatgaatcttctatattttctacaggctctgtacaatttttaacaagtggttttggcagcagttttcaccagagaaatgagaagtttgcttggttaaggcttcttccagcaagattagtattgaatgtcttcatttttagtaagaaagcagaagaaaaattaaggcaaactattagaatgtttagaagttaggtccccaaaaggttgagacaccatggcttctaaaagaaaaaaatcaattgagaagaaaagctttttaaaggttttagtatgtataagctaacacaaagctaaacttaaactgacctgttctgcagcaaatactgtgcattctgtatctggtcctgtgttcctgtaatggtaatgatccgatcttcggatccttctaaaggctcatcaattttgatcgaagctcccgactcatgacggatttgtttaatccgctgaccacctttgccaataatagatccagccaactgaaaagattttttaaaagtatgtgtttacgatatacttttaacatttactacctgtattttcaaggag

SEQ ID NO: 42115 - DNA, 2300 bp, Homo sapien
cctttggtcttttcaaaacatgcctaagattagcaacaagtctcttgaaacagaatggagttactttggagacttcgctgctttctttgaaatgtgaactgttaatttttaggtaaacgccctgcagaagatatggaagaggaacaagcatttaaaagatctagaaacactgatgagatggttgaattacgcattctgcttcagagcaaggtataaattttattcttgaaaatttgaaggtggttcatactcaggtagaaattaaggtctggtttggctttctagaaagtcaaagttttacagattgaagaatataaaacatttggttctttctaaacagacttgaaggctctggtggttttcttattccactaacagttaagattaaagcccttgctgtagtgaaccgccactacaggtcaaactaggaggagagtgtgattcttaaagtgttaatagattaaatcttaattatgtgtggactccttaggaaactgcttggttggcagtttattgtttgatcacaggtcacaatatgaaggtacctactaatactaaattaattgacttattttaccaaagggtgctataaaatctgtgcttagttttattttatacttggtgttatttctgacattgagtactccaaactatctagtcctcacagcacttagaattatattttgatttttggtttggttttggcctggtcgtttttacaaccccaaatagatttttattcttataacaaacaggttagaggattttttagcaaaatctaagagcgtaggtagctattaattttagggaaaggcaaaataattttttgtctttgtatcttctccagaatgctggggcagtgattggaaaaggaggcaagaatattaaggctctccgtacagacgtaagtattaagagtttaaactactacacgagcagcttcagtttatatgtctatagaaatttaaagatttacatcctagaaatcatttcatagtttagctacaaagacatttgtaataatttattattacagaattgatttcgaagttatccattcctgttttaacaaaagcccagattgagcagggtgggggggtggtttctttcaaacctcttcacattttaataagagtccaccaaattattcacttcatcaagcaagataacatcttaattagaaatagcgacaaagtgtaaaaatccttgattgcaccatttcctgtgtgtgaatcaattacagtattactgaaaaccattgcaggtggctggttaaatccagaaaaatttttttgttttctttgggaagaaaaatgtccatctgttctttaacagcttgcacatggagcacaaagaatttaatgttgaggttgcatgatttaaatatgggtaaagaatagagtaggcacttaatcttataattgggaaactgttcgtcaatgcctatgatttgtttgagtcttcattttacagtgggttgactcttgtgattagacacattaaatgttggcagtgccagaagtgagcacatttataggacttggctacaccaaaatttctaaattttttttctcatagtgtacacatttcttaatgtttttcttgctaaaaatgaggcaaataactttgtgtcgagtacttatttgacagtatttcatttctctcttggtcgcagatctttgtatgttcctcttgattactgtaaactgaacttgaaaatttgtttaaaattttacaaacttgcctgttaggatctaggaatgcatttcaaaacctccagaaaaccaaaccagtcttattagttagggtttttggtggtgtgggaatttttgttttgtcttttataaacctctctcctcttaatccagatgttctgtataattatctgggttattaatttccccatttcctcaagaatttcagtaaactttgagtcaggttttgtgtctaccctcatgagccagcctgctactgaaacatcgtttgtttttcttaaaaaataaaaaaggctagaaccatcatttgaggtccttaatgttaagccacagtcagatttagagaagtccattattgtgttagtcttcagaacaacttaagcttgtttcattgagagtatgagtatagtttgtattaaattaaaatttattgcttttcccccttttccctctccttgtttttttggccatatatctccgttgcccatgtactggatcgacttacccctgcgttgcccaccatgacgttggcccatccgcccctgaacgcccatgtgaaaaccctggttggctatgcccaaaaat

SEQ ID NO: 42116 - DNA, 2300 bp, Homo sapien
aagtcccaccacagcaatgaattgttttatacggcacattcccaaaaccctgaaaagataaatgtcatccacaaagcatacatttatgaaaagttacaatgcatcttattcactgggaaaactaattttatattaaaacttccaattgctttcctatttctttcgactcatgcttgaagcgatcttatgtgacatctctaaagtttacaaatacaacggcaattgcgaacacatccaacaaccagaacaatctaccggagggataaatccaaaaatctaatataggaccagacccaaactaccacaataccagtctattattaatcagcgaaacaaatggagcccttgaaaactaacagtcactagcggattattttaaattaggcttaagggagtacaacacaacaatcatgcctgtaacacgaaaactaaagtgtctacgtgccaaaacggtcgataggactacaaacagcctttttaagcttccctcttgtcgggactaggagttgacaagcggcctctactagaaggttggctagacagcaaagagccaacaagcgaggcacatttatgcctcccattctcccataccgttggtcgacttattgctctcctaacgacaactgaaacgacatccttccggcccagcacgcaatttctgaggtgtggtgggagaagagttggataagaaagtttaagcaaaaacagcagggcttatctgtaagaataacgttgccgcttgccgttcacccttcgggtcctgcagtcactagtccccaggcctcaaaaatccgctaagtatgtgctccactggccgagcgccaacgcgccctcccctccccgcctcccggcaccgagatcaaaaacagccgggtaacaggacgggaaaaagcgaaagtcgacagcagaagcaccgcacctctcctcacccggatccgacaggaaatggcggcccgcgtaatggcgactacgtgctactaggcggagccgagcgccgaccccctcccccacccaccacgcggtcccgaggtctcatcccccgcatcctccccccactgcccgagacaaagccatcgaggcagccctgaccgttccatccccgccgctccagctccgaccccgggccgggagacccaaggtgaggcggggctcacacaaagagagcggcggcgcgaccttctccccgcaccggcctcctttcctccacgaggtccctagttcccagtgccacatagctccagctcatcctagaggcacatgcctcacgaatccccaagtctctaggaccacaacgcggactgcggatacacgctcagggaaatggcggaggtgggggaggggacaccgggcaacgttcccactcggagaagcggccaaacaccaaagcggctcccaggacgcctccctcaagcggaaaaactgggctccgaccctcacctccacgagccgctcccccaacccggctcctcaccgcgcgagactgccgtccctccgctgccgcgccgcctcagccggtcggagctagacagaaaacgagcgcaggctcccctcccccgccttctcgcgtcctccccgccgtcgcgccctattggctgccagggcttcagcgatggtgcgagggcgaagcgattggcccgaggccacgtcaatcaaggcgacggaggaggcgacaaccccgcctcccgccagcgcctcccttcgggctgggaggccactaagggctcgagaaaacccgggcttgggaaaagtaaacgcagcctttcagggagccccaacccttacccgaatcagcaatacccaagctccaataactccaattacctataggccgcgaacaagtgggacacaggcaagacgtcgaggtcggtgcagcagagaaacagaggataatggcgtctgcagtgctgtcgcctggagcgccctcctcctttctcgttcgcgcactcactagctggggggaggggcggctagggggcgaacctctcgcgagatctaacaactgcctagttcacgcgcacagggagggggcggggaaggggcgttttccagccccgaaggagtcctttggggttggaggaggggcgcgagcgcgcggcaaatcgggcgggaagaggtaaaaaaggaactgggagcgcgccgcggcggttcctgtccttacagttgcgctgcccagggaccgatgttgcgcgaggaaaatgcgggacgcccaggtcggtgctcggcccagacttatgcccgtgttttcacagcccacactcgtgcccgaagccccttaccccgccccgggctgtggtctgtgg

SEQ ID NO: 42117 - DNA, 2300 bp, Homo sapien
caacataaatcctaatttgaaagaaagcacagcatcatcattaccgtaccgctatttgtgcatattagtgtcagtgacatgtctcaggttttaaatgacaaactcaattaaatgttgcaaatactaactggcggattaaatctctataatccaagtatcctaagcccctacataaactcatcagttttgaatatttaataaaattctgaactttgtgttttagaactgaaatgcgagttaagttttacctacccaacaagactatacactcttcatggtggggaccatttaaaaaattatattatcacttaaagagaacttttataaattccacaatcccggacattatgttctaacagcatgtgttaacgtatcctcccagaatgtaaatactggtgtttgtcatgaaatcctcagtgcgccctaacaagagttttcctctaatcagtcaagtaaaagatgctgggtggatgcaatcatggccatttaaaagaatgctggtatatatgttttgcaaattacccaagaaggaaacattataacaggaatgaatcagcacaaattcatcaacactaaaatatatgcatgtattcggccaatggtggatttcgctttatgtgcagattatgacacctttatgcttcaaaatgagtttgggattgtgggcggaggctggaaggttgacgagtaaggatgtggaaagcgggtactaccagggctggagatttcccagggctgtcaccgattgaaagtgaccttatgtgccttaacaaaggaagtcatgaaagcttggcacaggagccttaaaagtaaggaaccgaatacaatgcaagtgtgcgctgaacccgctagaacaggagcacgtttgagggcaagggtttttgtctgttttcatcactgccacaaggcaggcgctttgaatggaacgtggaggtctgcaacgtattcagcgatacgcattcattttaggagacaagggcaatacatattgcctaaaaattttatcggaataaactacagcgacgacactacaaaatacttccatctcaggtcccattacccaagaggaaagtctcagaaccgagagccctgtgaaaccgcctgtgccctctcggcgagaagttctccagtactcccaggctcgccccgcgtttccccggctcccgccccggcgcaaggcaggccgagaaccgccagctgcgcccccgggcccggccttgactgacgggcgccccggaccattacaaacaacgggtttccgaagcgtgggcccggcccagcggacgcagacggcccgcacttaccgcgccgcagctcgtcccacagcccacagaccacagcccggggcggggtaaggggcttcgggcacgagtgtgggctgtgaaaacacgggcataagtctgggccgagcaccgacctgggcgtcccgcattttcctcgcgcaacatcggtccctgggcagcgcaactgtaaggacaggaaccgccgcggcgcgctcccagttccttttttacctcttcccgcccgatttgccgcgcgctcgcgcccctcctccaaccccaaaggactccttcggggctggaaaacgccccttccccgccccctccctgtgcgcgtgaactaggcagttgttagatctcgcgagaggttcgccccctagccgcccctccccccagctagtgagtgcgcgaacgagaaaggaggagggcgctccaggcgacagcactgcagacgccattatcctctgtttctctgctgcaccgacctcgacgtcttgcctgtgtcccacttgttcgcggcctataggtaattggagttattggagcttgggtattgctgattcgggtaagggttggggctccctgaaaggctgcgtttacttttcccaagcccgggttttctcgagcccttagtggcctcccagcccgaagggaggcgctggcgggaggcggggttgtcgcctcctccgtcgccttgattgacgtggcctcgggccaatcgcttcgccctcgcaccatcgctgaagccctggcagccaatagggcgcgacggcggggaggacgcgagaaggcgggggaggggagcctgcgctcgttttctgtctagctccgaccggctgaggcggcgcggcagcggagggacggcagtctcgcgcggtgaggagccgggttgggggagcggctcgtggaggtgagggtcggagcccagtttttccgcttgagggaggcgtcctgggagccgctttggtgtttggccgcttctccgagtgggaacgttgcccggtgtcccctcccccacct

SEQ ID NO: 42118 - DNA, 2300 bp, Homo sapien
gaggaagaggtttttttttttgtttttgtttttgtttttgagacagggtctcgctctgtcgcccaggctggagtgcagtggcgcgatctcggctcactgcaagatcagccttccgggttcacgccattctcctgcctcggcctcctgagtagctgggactacaggctcctgcaaccacacccggctaatttttttttttgtctttttagtagagacggggtttcacaatgttagccaggatggtctcgatctcctgaccttgtggtccgcccgcctcggcctcccaaagtgctgggattacaggcgtgagccaccgtgcccggccggaagaggttcttatatagggctgcttacttgtgattcccactcatcattccttatcaagaaaatgatgactgcaacataaatcctaatttgaaagaaagcacagcatcatcattaccgtaccgctatttgtgcatattagtgtcagtgacatgtctcaggttttaaatgacaaactcaattaaatgttgcaaatactaactggcggattaaatctctataatccaagtatcctaagcccctacataaactcatcagttttgaatatttaataaaattctgaactttgtgttttagaactgaaatgcgagttaagttttacctacccaacaagactatacactcttcatggtggggaccatttaaaaaattatattatcacttaaagagaacttttataaattccacaatcccggacattatgttctaacagcatgtgttaacgtatcctcccagaatgtaaatactggtgtttgtcatgaaatcctcagtgcgccctaacaagagttttcctctaatcagtcaagtaaaagatgctgggtggatgcaatcatggccatttaaaagaatgctggtatatatgttttgcaaattacccaagaaggaaacattataacaggaatgaatcagcacaaattcatcaacactaaaatatatgcatgtattcggccaatggtggatttcgctttatgtgcagattatgacacctttatgcttcaaaatgagtttgggattgtgggcggaggctggaaggttgacgagtaaggatgtggaaagcgggtactaccagggctggagatttcccagggctgtcaccgattgaaagtgaccttatgtgccttaacaaaggaagtcatgaaagcttggcacaggagccttaaaagtaaggaaccgaatacaatgcaagtgtgcgctgaacccgctagaacaggagcacgtttgagggcaagggtttttgtctgttttcatcactgccacaaggcaggcgctttgaatggaacgtggaggtctgcaacgtattcagcgatacgcattcattttaggagacaagggcaatacatattgcctaaaaattttatcggaataaactacagcgacgacactacaaaatacttccatctcaggtcccattacccaagaggaaagtctcagaaccgagagccctgtgaaaccgcctgtgccctctcggcgagaagttctccagtactcccaggctcgccccgcgtttccccggctcccgccccggcgcaaggcaggccgagaaccgccagctgcgcccccgggcccggccttgactgacgggcgccccggaccattacaaacaacgggtttccgaagcgtgggcccggcccagcggacgcagacggcccgcacttaccgcgccgcagctcgtcccacagcccacagaccacagcccggggcggggtaaggggcttcgggcacgagtgtgggctgtgaaaacacgggcataagtctgggccgagcaccgacctgggcgtcccgcattttcctcgcgcaacatcggtccctgggcagcgcaactgtaaggacaggaaccgccgcggcgcgctcccagttccttttttacctcttcccgcccgatttgccgcgcgctcgcgcccctcctccaaccccaaaggactccttcggggctggaaaacgccccttccccgccccctccctgtgcgcgtgaactaggcagttgttagatctcgcgagaggttcgccccctagccgcccctccccccagctagtgagtgcgcgaacgagaaaggaggagggcgctccaggcgacagcactgcagacgccattatcctctgtttctctgctgcaccgacctcgacgtcttgcctgtgtcccacttgttcgcggcctataggtaattggagttattggagcttgggtattgctgattcgggtaagggttggggctccctgaaaggctgcgtttacttttcccaagcccgggttttct

SEQ ID NO: 42119 - DNA, 2300 bp, Homo sapien
gtctgtgccacacacatttttaaacaaccagatctcaggagcacttactatcatgagagcagcactgagggggaaatccatcaccatgattcagtcacctcctaccaggtcttacctccaacactggggatttgggtggggccacagacccaaaccatatcacctatactttgcttttcttaataagatagggagtatttttttttttttctgagagacagggtcttgctctgtcgcccaggtggagtacagtggtgcagtcatagctcatggtagcttcgacctctgggctcaagcagtcctcccacctcagtctccctagtagctgggactacgggcatgcaccaccatgctcaggctaattaaaaaaaaaaatttaaagatgggatcttgctttgttgcccaggctggtcttgaactcctgggctcaagtgatcctcccaccttggcctcccagaatgctgggtttacaggcgtgagctaccatgcccagccaagataggaagtatttccatttggtaaatcagagagctggcgtggagatttggtttctttgttaaagagacctgctcatttgacctgcatagtttatcttcatcacaacaagtaaagactttttgtacttttgaatttttacattgttttttacatatagtttaaaaaatgtttatactctcattttctttaatataaagattaatcagttctataattatgaccttaacttccccatgtcctttaaattctaatcatccattaaattaaattaataatgtacccactgtttataggttcctgagaactatatgcttctatgtcttcttttatgggacatttaaaaatttttaatggtagcaagcacttacatacatttactatgtgctaggacagaagtacagaacaaaagaggagaaattgtttagaggcagtgataaggaatccatgtcactgagaaatatgaaaagatgttcaactgctagcattagaatcaataataaactgaagttttagttccttccatttctcagacatgtgctgcatttctttcagctgtttttggggatgcaatgtaaaatagttttgttatagcagtagcttaaggtgagctgtattagcattttcagggtttaaacccctaaaatctcaggtaggtatatattattttcttgagaacctacaaaaaagtctcatttcagtaatttcagagcagtgtagaacttatccaatgtaggaattggtcattcagtctaaaataatggctgggcgcgattgctcacacctgtaatcccaggactttgggaggctgaggtgggcagatcacttgaggtcaggaatttgagaccagcctggccaacatggcgaaaccctgtctctactaaaaatacaaaaagtagccaggtgtggtggcacacacctgtagtcccagctactggggatgctgaggcaggagaatcgattgaacctgggaggcagaggttgcagtgagccgagattgcgccactgcagtccaccctgggcgacagagcaagactctgtctcaaaaaagtaaaataaaatagaataaaatagaatagaataaaataaaataaaaaaaaataaaataacaataagtatagtttttgagtggctgctttttgccagttgctgtagtaggcactgtaagtctaataatagtatacatttactgagttctcgctgtgtgccaggtgctgcttttttcatattaatctaatcttcataacaagcctgaggaaaatcctgttattcttgttttacaaatcagataaggataagtaggatatcatgaagttgagtaacttgtttagagtcagaggttataagtaagagtttatgatatagtctagcaccagagatgtactcttaacatcaaatactatacctcctatcttctttaattttcacagtaagcctatgaggtaagtatatagaaaaggaaacaggcttagagagaatgtgtaactttctcatggtctcttgtttctgatccccatgaaccataccatcaaactcttgcacttaagaaaatagtcctgtctttctacaacttcatcttataactcttactgctttttgtcttatctcccagggccatttctgagcagtggaggtttcaagtaatccactaacaaccagttccaaattctgtcatcaaatcctgtgctgctgttcctcgtggtaagttttcttatggacatagtaaaactttaatatattctacttcataaatatcttcatctgtagaaggaacaaagtatacttttgtgaacacatgattgatt

SEQ ID NO: 42120 - DNA, 2300 bp, Homo sapien
ctccaaaacaaacaaacaaacaaacaaactatatatatatacatacatatatatatatgtatgtatatatattcaaactacagcaattgtcttgagttgggctttctcagatgtatatagtgatttatgcagaagtagtttatttgggaggtgatcccaggaagccctgatgacagaggtgaagggagagggaaaggaaggaaactacttcagagcaggtcactgctgggggcaactggatctgcattccactgggggcctctgaaaactgtgtagaacacacctcaggttgtcccacccgaggggcaatttaccctccatctcccattcgttatggggggaacagggattggcttacagcctggcagcacctgcctgccctgcacagtagtgagctaatttctgctgctagagaaagccctcagggagggttgggggagcttgcaataagaactgcaggtgtgcacagcaacagtctctgtgtgttttatttgcttttgtaataacaaacaataaagatttcaaaagcaggaaagtgattgtattactgggaacaattttatttaactttaacattataacaaatccattgccagtttcactttggaatttggcctagaataaaagtggctttctctaggcagggtgtgagatgtgatataagccgtgttctttcagcgccccggtggtatcatgcatcaggctcctcacagtgccagactcactgtcattcttaaattcctagagattgggccttgttagtgctaaaggcctctgaggctcctttaaatcagtcacatattgattaaaataagaagggagattctccctttcctacctaagctagctgagggcatatagcaaaatctcttttccttgtgtcaaaattaaaacaggactctcagtgtcctgcgccatctacccagggtaacttcctacccttcccattgctaaaggagatagatagtaattattcagcacccccctccatgaggactgacatagataatgcaagtagagttctcagcaaagggcatggctactaactgcacacatcgaagcccattgagaatactggtaatttgtatatttatttcatgtaaccagaaatctccatattttatttaaaaataaattttgtctctgggtgttgtttcacttgcgagtacgccaggcttgtgactgtgtatcctttgtcctcctggcttaagtatctccaagtagaattattgggaagtttttagataaaataaaaatcttaggaaaggttggggctggccttggaggaatagaggggagggaaggagacagaactgggtcctgggaaaaaggaggcaggcaggctccatgccaagggctgggattaatcctgggcacctagcctcttcctctctgagttctccttcaccctttgccagttttcaccagtgactctgatagactggggtgcaaatatagaaatgactaatgacataaaaaagttgtttgtccatcgtatgttctcactcataagtgggaactaagctatgaggatgcaaaggcataagaatgatacaatggactttggtgactcaggggaaagggtggaaagggagtgagggataaaagactacaaagtgggttcagtgtatactgctctggagataagtgcaccagaatctcacaaatcaccagcaaagaacttatgtaaccaaacatcacccattccccccaaaacgtatggaaataaaacattttaaaaaaaggaaaaggttttaaggtttttaaaatatgtgtagggaaagattatctcagatgtatttttaaaaaaaccaagatattttatagggatttaatagatgttttcaaaatcaaaataaaagttgtttttcctcattagtaagccagaaagttggaattaaaactacagtgatgtaagtgcctgagtcttaagtaagggtcttaatattagtcttaaacagaggagggatagggttagaaactttctaaatgaatgctccctgactgaactcattgttttaatgcagcatataatcctctggataaatctctgaataaaatttcagatgaaaagaacacttaaatggccacattatatcaacagaaagacaggcatttcaggactaaaaaagaacataacatatggaatactgaaaacctgtactgtagcccagcgccaggcaccaggtatgtcttcaacagatgttaactatgattatgattattgtcacccaataaccatctttcccatctagtatctcatgggaatttcagagaattcacgtgtatgggagtataat

SEQ ID NO: 42121 - DNA, 2300 bp, Homo sapien
agtggctcttccagacctccaaagaaacattgtcttctggaatagaaacaacccctgccctgtttcttcccttgcggagctcttggacccttcctctgaacacaagaaaaaagctaatcccaggtttgccttctttcttctgaaattgcaggttccatcctcccacttgttaacagcgtcagttatgtcagcacctgcgtcattggctgctgctaaactcttttggcctgagacagaaaaacctaaaataaccctcaagaatgccatgaaaatggaaagtgggtaagtgtgacacattcacctaattaatgactacccaagccggggcgggggactccaggagtcaatgtacagcaaaaatttgataaccggaaagcacagtgaattacaatattaaagttagtccaaagactatttagacttcacagaaaaaagtcttattttatttcctttttttgagtcttgctcaaaaaagacttttttaaagttgctctgtcactcaagctggagtgcagtggtatgaacacagctcactgcagcctcaacatcccaggctcaagttatcctcccacctcagcctcttaagtagctgatactacaggcatgcaccaccactctcagctaattttttttagaaacagggtctcactatgttgcccaggctgatctccagctcctgggctcaagggctcctcctgcctcagcctcccaaagtgctgggacctggccaaaatcttgtttaatacttgacataaacctctctaaatacctaatgtcaatacatttccatatctgtttgttgtaaagatatttctttataaatatagcagagtgtttatggagccttggtttagacagaaagccataggatgaccatttctggaggttcctcctataagaaagctggttccttttcttttgctctgtgaaaaagaaaaaaaaacagagtggaaaagactaagggatttagggtgttcaagagtatttcattaaataacagaattcatcagcaaccaacatgtgtctgaaattcacccatacttgtatgtagataaagtcaaccatgagcgaaaaagcaagttaccaaagaatacagcgtaattccacttgtaaagttactcagtgtgcagacttgcacaatgttgtttttttgtttgtttgtttgtttgttttgacagggtctcactctgtcacccaggctgagctcaagtgatcctcccacctcagccccttgagtagctaggactacaggcacgcagcaccacacccagctaatttttgtactttttgtagcgacagtatttcaccatgttgtccagactggtctcaaactcctgggctcaagcaatctacctgcctcggcttcccaaagtgctgggattatagggtgtgagccactgcacccggacacacaatgtattttttagggaatacagacatgtaggaaaactgtatagaaaggggatgatgagtgaatttcaggaagacagatacctctgagattagaggggaggatgagatcaaagaagagtacacagggggattcaaagtgatggtggcactccatttttaaatgaggtgatggatttacaggcttccttggatcattggtttgttgttggttttgaatcattagcttttataccatttgtattttataactattctctggcagctacttgtaataaaaataatttttaaacttgtaattttttatcattttccaattttttattataaatgtccccaaatttaaaaagtaatgtaagttacccagagactctggaggctaagataagaggatcgcttaagcccagaagttcaagaccagcctgtgccatgtagcatgaccccgtctcttaaaaaaaaaaaaaaaaaaaaaaagccaagcatggtggcacacatgctattcaggaggctgaggaaggaggatcacttgggcccaggagttggaggctccaataagctatgatcacaccactttactccagcctgagacacagaacaagaccctatctctttaaaaacaagaacaaacatggttaaatactcatatgcccacttcatgatgtcatgggattcaggtgagtattttgagcaaggcaggggccttagagtttgtctcttatctaagctctgattatgctacttctgcaccaatggtgtccatcccctgacaactccttggtaattctggaattgctatttcttgataaagtgattcagggaatcttctagaagctgcaacacagggagcatcctcctccatctccctggtggccaacatcgctgtgaatctg

SEQ ID NO: 42122 - DNA, 2300 bp, Homo sapien
ttggtaaacaactcagaaactccttcttttcctttaaaattcacttgtggccaggcacagtgcctgtaatcccagcacttttggaaaccaaggcaggtgggaagattgcttgagcccaggagttcaagacaagtctgggcaacatagtgaggcccccagttctaccaaaaaaaaaaaaaaaatttagccatgggtgatggcacctgtctgtagtcccagctactcgggaggctgagacaggaggatagcttcagcccaggaggtcaaggttgcagcaagccatgatcatgcactccagcctgggcaacagaacacacacacacacacacaagaatctacttgtaactgctactaagtgtatattcagagcaacttgaatatgtgctcccaagttgcaatctcaaacttagaccaaataaactctatacttacattaagtttgtctccgttttttcctttaggttaacaataataaaagtaaatcattctctttatagaaaactcagcagcatttgaaggagaaaaaaaaaacaccaactgcccataaaattaaaaaccgagaaataaccactcataatacttggtattttcttactttttctttttctttttcttttctttttttttttttttttgagacagggtctcactctgtcatccagatgggaggcagcggtgcgttttcggctcactgcaatctgtgtctcctgggttcaagcgattctcccgcctcagcctcccgagtagctgggactacaggcgcacgttatcactcctggctaatttttgtatttttagtagagatggagtttcgccatgttggccaggctggtcttgaactcctggcctaaagtgatccacccgccttgggctcccaaagtgctgggattacaggcgtgagccaccgcaccaggccttttccattcttttgtccacagttttgcagtattttaaattgtactaggggggaaaatccctattttaaaagaattctacagctaatattttcataaagcaaagtgaattgctttatgaaaacaaagcacttctattcacttttgataattgaatagctggtcacctttcatttacttgtcacatatcggcatttctgtaagctggatttttgaaagcagcccagtctgaagcagggatgtaataaaaggttttggaattaaccaaacttgaatttgaattctcattatccctttattagctaaatgacactaaacaaattgttaacttttctgtacttcagtatagaattttgagttgttcggaagaagagccaagacccttacctacctacctatctgtctatgtatctatccatctatccatccctggtatacagtaggtgatcactgagggcggcatgaccttatatcctgtgttcactcaccctccaccccaccaccactcctagtctttaacaccacccacaggaaaacagaggatttcactaagcactatagagaacgtgtccttttctggctgggcacggtggctcatgcctgtaatcccagcaatttaggaggccaaggcaggtggatcacttgaggtcaggagttcaagaacagcctggccaacatggtgaaaccccgtctctactaaaaataaagtcagccaggtgtggtggcatgcacctgtaatcccagctacttgagaggctgaggcaggagaattgcttgaacctgggaggcagaggttgcagtgaaccgagattgcgtcactgcactccagcctttttttttttgagactccatctcaaaaaaaaaaagaaagaaagaaagaaaaagaaagtgtccttttctgttttgtgcaccacaagagttttctccccaggagtgcaaataggatgccaaaaatggggataaaggaaaagattaataaggtgggcgggccagcactagatgcctccaccccgccaacccgcccgcctctctgccccaccccaaccaggtgtcagccctagtcattcaggagattattgcagaagtttccaaactgaagcaagctgtgcccaggtccctgtaacagcaggtggctttctgacatcagcagagactggtgctttttcccaggtacaaaggacctccagaccagagccagccagcagcaaaaagagcatggagctgaggagtacagcagcccccagagctgagggctacagcaacgtgggcttccaggtgagcagagctttcctcttatgttaaaggccttcagtggaaaagctgccctttccttagccccttggcaagtttcttacctaagcagggagattatcaggacaatacgat

SEQ ID NO: 42123 - DNA, 2300 bp, Homo sapien
cccacagaatgggagaaacatttcgcaaactatgcatctgacaaaggtctattatccagcatctataaggcacttaaattttacaagaagacaaacaaccccattaaacagtgggcaaaggacatgaacagacacttttcaaaagaaacatatatgtggccaacatgcatgtgaaaaaaagctcaacatcactgaccattagagaaatgcaaatcaaaaccacgatggataccatctcacaccagtcagagtggctattattaaaaacacaaaaagtaacaggggttggtgaagttgtagagaaaaaggaatgcttatacactgttggtgggtgtgtaaattagttcagccattgtggaaaacagcgtggcaattcctcaaagatctaaaaagagaactaccatttgatgcagcaatcccatttctgggtatatacccaaagaaatataatccttctattataaagacacatgcacacatatgttcattgcagcactgttaacaacagcaaagacatggactcaacctcaatgctcatgaatagtagattggattaaaaaaatacaatatctatacaccatagcatactatgcatccataaaaaagaatgacatcatatcctttgcaggaacatggatggagctggaggccattatccttagcaaactaatgcaggaacagaaaaccaaatactacatgttctcacttataagtggggactaaatgatgagaacatatggacataaagaggggaacaacagacaccggggcttactggagggtggagggctggaggaaggagaggatcaggaaaaataacaaatggataataggtttaatacttgggtgatgaaataatctgtacaacaaaccgctgtgacacaagtttacctatataacaaacctgcacattacccctgaacttaaaagttaaaaaaaaaagaaccaaaaaatcacatgagccctcaaagtacccccacccctccattccacgcttgaccccagcagtagcatggtgcggagcgcgtctctgggcactgagggagggagtaaacagcagttgtaaggcattgaactcagtgctgttctgttagagcagaaaggaaaactaaaccaaactcagctaacacccacctattgggggagcattcaaaccagccctagccagaggggaatcgcctattccagctgtctgaacttgagttcccacaaacctcaccactgagggctacagtgctctgggactctaaaaaaccttaaagacagtctaggccgtaagggctgcaaatcttaggcaaaaaaaaaaaaaaaaaaaaagtaaatgtgatcatgccatgccctacagagtccatcttcatctgactgcatcttctttttttttttttttgagacagagttttgctctgtcgcccaggctggagtgcagtggcatgatctttgctctctgcaacctccgccccgctccgggttcaagcaattctccttcctcagcctcttgagtagctgggattataggtgcccagcaccatgcccggctaatttttgtatttttagtagagacagggtttcatcatgttggccaggctggtctcaaactcctgacctcaagtgatccacctgcctcggcctctcaaaatgctaggataacacatgtgagccaccacgcctggcatgacttcatcttctaccccctctccccagttcctccaccctgaccagcctgcagttcttctgacatgacttcatgtcctagggctgaactgggcccagagacagtggacttggtgggggggcaggggtgtggcatgtgacatactgagacaccagctggggtgcccctcctctaactccaggctgcacagccctccgctgcataagacactccttccttcctcttgaggagagaaggaagagtggggaggactttgtcttgcatcttggatgccaactcagccacagcaggatagggcactgggcagagttgtgaggcccccattccaggccccagctcccagatgacatttctagacacaccctgagtcagaagtgaacctgccaccttgaaggaaaggacccagtccggccagcattcagcatctgctaaatgaagagcgcttgggacctgaacaaccagcagcgatacccaggtactgtatcagtgtgggggaaaagaagagagatcagactgttactgtgtctatgtagtaaaagaaagacataagaaactccattttgatcatattaagaaaaattgttctgctttgagatgctgttaacctgtaactttagccccaaccctg

SEQ ID NO: 42124 - DNA, 2300 bp, Homo sapien
aactttaatatattttgttcagtgttttggtcatatgattgagagaacaaatccgttccctattactccattttaatcagaagttggcagtattcttgcttatttttttacaactcagtattggatgttaaaatcaatgtattgagttattacatgcattcagaaatgaaatggtgtagaagagaaaaggatatattagtttatgtactaagggtaagtaagttttgtattatgacacttcttttttagttagtatatgcctttatgtatgtgttcattgggttgtgatataaaaggcatttcttattgtggatcatggtcaaaagagtttgagaaacattgctctaggtacatcatggttcagtgcaggtaggaacctgcagcacttaatttctatgcctgcattcaagggatctagaaaaaagtcatctctatattgttcatctgaaaaatgttcatcatctcttacaaaggtgtgatctgagaatccttgaagtgatctctgggacatatcttataggtcttaaaatcgaggtagatccacaattctatcagttaagaaatagctactgatcaccagtgtgttctagacactgtccatggaggtgttcagttactagcatgaataagtgggaggccctctctggcccagtactgaagcctatctggctactaaatgagacagaaagtaaggcaaggttttaagcagtgctaggagcactcagaacgcaaggaagatttgaaattgtgaaggtgagaaggagcgtgtctgggggaattatccaggttcttgcagacttagaggttaagaaagtgagatctcctttattttattttatttattcattaaaaatacacatatattttaacacctactatgtccttgagagatatcaatgaataaaatagataaaaatccctgccttcatggagtgtacattcttctgggagaaattttaaaaatatatataataagtaaattatctgtccaaaggacaaactgctatggttgaaatagtagagcagaagtagggtgattagaagtaggaccgcaaatcctaattttaagtgggagatagtggaatatatttagaatccaactataatagtagcatatatttactctaatagaaactctacaaatattccaacataattagactcttctggtgtacaaaccaccgtaagactgcctattctccataccgcattgacatgctgcagccactagggcgaaaatgggccgtttcttagaaaaatgggctcagagtatgggagtgtgagagaaatgtgggtgattacgcacacactccttccttccccaagtgttcctcaggggcttctccgcttaaggttcactgacaagacaggcggagttttacgtgcgtctgagaccaggtcatttttgcccttggcgtctcttccttggcgcgtcctcacctagtagagaatagaggcgcagctcaggagtaaacttcagcctggccgttcaccactcgatgtgtgttacagccgagtgacagtggtgagatagacctgctggccttgctttcgggacctgcagcaagatttttgggtgctgtccaagaattcccgcggttacactcagcgcccaggatctgtacaaaaaagccccaatagatgttttacgttcccttcgtaatatttaacgcttggcctagatccgagcattcactctaacgttcggtttcttgatccttcccatccccaaactctgcgggtagatcagtgactattactatattttgaacgagactccaacccattgctctctcgagagagaaggattgcccgcctttttcccccgggcaggagctcggcgaggccaggagagccgcgcaccggccgggcagggacgcgcaggcgtcgggcgccgctggttgcgcatctggcgccagagcgcgcccccagcgctgtgcccgccgcgacccgggccatgggctggtgctccggagcgtgccgggcgctctctccccgcgcgggggcaccagagccctcggaagtgtcaggcactgcggtgtattttccccgttctcttttaaatgactgcggaaaaacagattccgagccgcaaaagggaagacggattctcagacaaggcttgcaaatgccccgcagccatcatttaactgcacccgcagaatagttacggtttgtcacccgaccctcccggatcgcctaatttgtccctagtgagaccccgaggctctgcccgcgcctggcttcttcgtagctggatgcatatcgtgctccgggcagcgcgggcgcagggcacgcgt

SEQ ID NO: 42125 - DNA, 2300 bp, Homo sapien
actcttctggtgtacaaaccaccgtaagactgcctattctccataccgcattgacatgctgcagccactagggcgaaaatgggccgtttcttagaaaaatgggctcagagtatgggagtgtgagagaaatgtgggtgattacgcacacactccttccttccccaagtgttcctcaggggcttctccgcttaaggttcactgacaagacaggcggagttttacgtgcgtctgagaccaggtcatttttgcccttggcgtctcttccttggcgcgtcctcacctagtagagaatagaggcgcagctcaggagtaaacttcagcctggccgttcaccactcgatgtgtgttacagccgagtgacagtggtgagatagacctgctggccttgctttcgggacctgcagcaagatttttgggtgctgtccaagaattcccgcggttacactcagcgcccaggatctgtacaaaaaagccccaatagatgttttacgttcccttcgtaatatttaacgcttggcctagatccgagcattcactctaacgttcggtttcttgatccttcccatccccaaactctgcgggtagatcagtgactattactatattttgaacgagactccaacccattgctctctcgagagagaaggattgcccgcctttttcccccgggcaggagctcggcgaggccaggagagccgcgcaccggccgggcagggacgcgcaggcgtcgggcgccgctggttgcgcatctggcgccagagcgcgcccccagcgctgtgcccgccgcgacccgggccatgggctggtgctccggagcgtgccgggcgctctctccccgcgcgggggcaccagagccctcggaagtgtcaggcactgcggtgtattttccccgttctcttttaaatgactgcggaaaaacagattccgagccgcaaaagggaagacggattctcagacaaggcttgcaaatgccccgcagccatcatttaactgcacccgcagaatagttacggtttgtcacccgaccctcccggatcgcctaatttgtccctagtgagaccccgaggctctgcccgcgcctggcttcttcgtagctggatgcatatcgtgctccgggcagcgcgggcgcagggcacgcgttcgcgcacaccctagcacacatgaacacgcgcaaggtacggcaggggagcaagggcttgggatgccctacgtgggggtgggcatcgcggggagtgaatccacgatctgggaatggctacatcccgtcaggttaaaggatgagagaaaatgacgcggcgccacacatcggacaggccagggtggccaccgagcatttagaatacgcatcaggcgcgctcccttcccctcacatgtctctatttcccgggcgtgtgatggcagaaaacggcaggaaaaagacccacttagagagctagaattgtgtttggagactcccttccctctgcaaaagcaccaacaggaagcccctccaaaaccaccgatccccaaataggtggcccggaatgggggcggtgatccttggttaccaatgcagaacacgttttggtgtttacaacatttatttatttttaggatagcttgccctcccttttaggcagggtgggaaaggagaacgcggggagggagaagggagggaggattcctataataagaatcagcgcatttttcagagctgaaccaagcacggtttccatttcaaaaagggagacagcctctaccgcgattgtagaagagactgtggtgtgaattagggaccgggaggcgtcgaacggaggaacggttcatcttagaggtacctggatgtaaatgcacacacacacacagacacacacacgcacgcgcgtgcatgtctacacggccaggatgtgtgcgtgtgtgcgcgcgtgtgtgaactcccacatgctgctgctgtctgcttctggccagtggcaccgatgcctccctcctccctgctcgcccccagattcccctcccctccctggtgcttttgtctggagggtgttatgggtttgtgtgtgtatgagcgtgtgtgtgtttttggatttcagactaattttctggagtttctgcccctgctctgcgtcagccctcacgtcacttcgccagcagtagcagaggcggcggcggcggctcccggaattgggttggagcaggagcctcgctggctgcttcgctcgcgctctacgcgctcagtccccggcggtagcaggagcctggacccaggcgccgccggcgggcgtgaggcgccggagcccgggtgagcagcgcagatagtgccc

SEQ ID NO: 42126 - DNA, 2300 bp, Homo sapien
ccccccacatgtgtggcacggaattttgcttccttccatgtttggaaggaaaaggaggtgaggagcacctagtaatgcagtgactagaatgctggattcctgaatccttcttgagaatctggaatagacactgagcagagccactgaagggcctgccctgggccttggtgagcttttcctgcaggaatctttacaagtgctgggatatgggggcatagggattgttaactttgtcaatgaaaggtcaaacgtccaggattggattaattagaagagatgatggtctttctccagaaaatttggcttccagctcttcccttttgcccactgggctatgacatctttccaggtggtaaaatcatgtctgaattgaagtgctgagcacttttcttcctgagctgcttgaagcccaagaaaagagccctgagcactgtgaaatgaagctcccatgaataattatggtgagattttattgccaaataaaacattcagttccatgggctaaggtaaccaactctgcataaatgaggaggatggcccagggcctgtgtcagccacagctgtgctcagcttctagcccagaggaagctccatcggagcccctatagtgtaaaggatacttctgagaaagttgaaaccctcattctcatagacatatagaatgaacttgtgttggagatgtattcaactcattaatgagggagtcagtaagatggtaaggctggtttaaggaggatttgaggaactgagtattgataagcatttaaaaattcatattgaaattatttgccaagttagatgcaaaacttattaatgcctacatggcacataaaaccaaaaaccttggagttattttatatgctagagagaaatcatttgtgtttctcctggacagaagtctgtgttatgaaacatcacagaatctaattactagtcagcaaagtcaaacacaggtatcttctcccaatttaatactctctaggcaggcctattaagccatgcctgttgaaagaacctcattcttcccctttgccttatcttcaagtcttggaaaatatatcttaatagtaactctttgaaaaactgctgacagtgtctagagcttatcaaagagctataaactctgttaaatcggttctttggggcctgaatatatatgcaccataattgaggaaaacacacagaccattgcagaagagctctggctggaggaagggaccggctgggagacacagggagctaatggcattttgtgtcattgagcctcatgtgattattagtttggactcaaatagggattttggctcagcttaggtaaaaaaagaaaatggagcaaagagaacaggtcgtttgatttctggttcagccactgactgaatgggtgacctgggcagctcacagaagatctctgtaggtggtggcttgtctccaaagagggctccccacaaataactctgcctctaattttaacaccatcttgcagatcccccatcgtgatgcaggctgcccccgtgactcgaattttccagtggaatgttgggaattgatgctacctatgccccaaggaagggttacagcccctgtgttttgtttttggaagcagttaggcacataactgtgactgtcctgctggagagggaggccacaagcaggggacctggaagatgaggggccacatggagagtgaggcctcagagaggagtgcggaggttctggacatgtgaatgaaggtgccaccttggacgttccagacccgtcgaggctccaaggacaccagacccatccatcgtgtgataagagccaacaagagcccccaggtgagtgcagcaggaccaccctgccaagcccctcagcccacagaattgtgagaaagattaaactgttgtattccactaagttttgggttatgatggataaccgagatgctgctcccagcaaccgcttctaggattcccttccagaatgactatgccttgattctcagtctgatggacaaggttgtgcatgcctcacccctatgaaatcagcactgttctgtaatgacaggcacacaatgcttatttgagaaagggagcctttgttgcatttgagagggatggaaatgctactctgctgaagtgagcacctggacaacaaaatgagggattttagaagtttctcttgacccaaaaggaagattgcagcccagctgtaaaggaacccatgtctgctaagtaccctattatattttcctcatagttcttgccttgatgtttttgttccactcaggtctttgttcagacttcacctcctcacaggga

SEQ ID NO: 42127 - DNA, 2300 bp, Homo sapien
ttttaagtttttctataaaattttagtattatttctaaaagataaaaattctgtgaaaaatgttggtagtttttaaaataataaataaaaatatagttaatttataactagttgtgacttaattaggttttcatcctttgggatgtaatggtaatggtaagtcacgtttacctacttaactctatcacgagattttgtttgtttttaggtagatttttaatgggcttgaggtaaaggttacacaatgatgttgtatttttgaaaaactgaaattactttcacttaggagagtggatattttatatgaaatgctggcttgtcttgcaatactgagccttcatttcattaggataacaaattaccatccctttcgaaggagcatctgcttgatccttctccatagtccccaccacaccctgttgtctcttactgcttataatcggctcagtcatttaggttgcctgctccatctttggaatgcctttttttgtgatccttgatgtgttagtcatttactatttaggattgtcactgatatcatcacattttaggatttaaatataagtaaataaatgaaaattacaaatattgagtttgactattatttagtcatctgccttctcatatgagaaattcaattagccctcagtggctttcttctctccctcaacatacaaatatttttggaaaatttcacatcttgccaatcatatgtggaggaaaaaaacacctttttttttttttttttttagatgaagtcccatgcactctgtctcctaggctggctggagtgctttggtgtaatctcggcccactgtaacctctgcctcttgggcttaagtgattctcctgcctcagcctcctgagtagctgggactacagacacatgccaccacgcctggctaatttttctgtatttttagtagagacggagttttgccatgttggccaggatggtctcgaacttcctgacctcaggtcatctgaccacctcggcctctcaaagtaccgggattacaagtgtgacccaccgtgcctggctaaaacacttttttttttcttttaaagttttgttagataagagtataagctgtagcaaagctaatgactaaatttgaaataatactgttataaaaaagaggaaacatataccttatttatttaattatttcaacattgataattctttgtcagataagacaggcagaagtggtagaaacagaaactcaggaaccctgagtgtggcataccagtgctattttggacagaattattgagcatcttagagtcctagtcttctcttattagcgagtaggctccagaagagcaagagtttgcattcagtcggggaaccaagcagacatatgtctcaaacagtatctggcacctagtagatacatggtaaatgcttatttaataatcaatatgtaaaatgataatacgtgtgcttcttgatgctaattaaataagataataggtaatttagctcttcaaattgaaaataatattttcttcagagaactgcatcgtttatgagaattattgctgctcagtacaggtcatagccgttttaaaaatgttcttttttgtataaaaataagtattttagaaatgacatgcattcagtgaggcaaaagttcttactatatcagtataaacataagaataaatctcttattataagttttgtccataaatcttatccacatttaatgtattgattgtgcttgttttgtgctttagtttaaaaataatgaggaaggtgatatggcagtagtgatgtatttttaattataattttatttactttttgctcatctgtttaaatgcaatgtattttaatacatttactttaaaacttttatttagttacaccattccagaagagggagatattttgaaatttaactccaaatttgagtctgggaatctgcgcaaagtaattcaaattagaaagtaagtcacttaagattttctcattttgtatgtgcacagatatttcctaattttcatcagatttctttgtcttctattttcagaaatgaatatgatcttattctgaactcagacataaacagcaatcattatcatcagtggttttactttgaagtcagtggaatgcgaccaggtgttgcttacaggtttaacatcattaactgtgaaaagtccaacagtcagtttaattatggtaagacagttttctttcccaattgaaatggcatgcaggcatcttaactgtggaaaagaagtttttttaaaaaaattgtcaacttttaaaaaatgtttcagtgtcttgtttt

SEQ ID NO: 42128 - DNA, 2300 bp, Homo sapien
gaatgtccactctctttatcactatactgtactaaaatataatttttcttcaagaactatggaattgttggctttttgagactgctgagctttattatcttctttttctttcctactgctgcctgcctcttactctcattgactttacatttagacgttacttaatttttcctttttttatctgaatcctattccttcatccttcaggtgaactgctacatcatagtgggggtattatttatttgtgttctcttatggttataactttttttcctgtgattccattttctttgtcccagatttttcagagtttggagcatttatagaaactggtagcttctagaagattcatctccagctagccacaacttgaccgtatataagtttcagtgcattctttgttccttccttaactagcagaacttttaaggagtggtagcaggttgttttgtttttttctaatgagtctgtaagtagtccttcactactgtttcttcttaaaccaaacacaaaattccctgctgttgagctttcggagtgttgtagttttctttccccattatacctgttttacaggtaaagccttttttttttttttcctctccaaatagccactatgtaaggccatattttcacaaaatagtgtcaaatattgaactagtatgtttagagaaaagaatatctttgtaaattattttttattttagaaacattatgtattctattagatgttaagaaaattattacattattggttcctaaatgtataatttaaagagattaaattacatattaatgtaataataagtatacaataatgatacagtgattaatatgataacatttaaataaaatcaatctctattatgcatatcaatgaggaaaatctttttcattggctatgtaaataatagctaaattcctgaatatgaaataataagaaatacataatatgtttttttcttttaaactagtagttaatatgtgtaagtatggtcagatacatgtatataaagttttttaaggattgaagcatagtaaaatatacttgtaaattaggctgaaaaataagtagcttactctggtagtaagtaaatacaaaattaaaaataagtaccaactgaaaattattaaatggtattattatctctcttcagccataacaaagataataattagtttgtgtgaggccagagtcattgaggatcctagaaaatagcttgggtagtagataatctgacatttgccctcttatcatgggattcattagctcttctctgaagagcatttagaacacattgatcctggatacatatcttgtttctctgaggacatacttttcctttaaatccacctgctttttttcctagagagacatggaaatcatttctggctcttgttccactcctgacttttttcccccactgaaaacagagtgaatggtgacactgagtttttctaaaagaactttatttcccatgcactctaagattgtgtgatcatcattaatctgtattggggcagtgtgtgatgctggctgacagtgtggtgcttcagaatcactctaactggtttttatcctggctcctgtctttgcaagatgtgtaattttcagcaaatggcttaacttctccgtacctcattttcctcttcagttaaatgggggtaacttcatagtgttcttatgcagaataaattagataatagatgtaaaatgcttagcatagtgtttcatttattttcagtgcttaatgttagctgttttattatcaccatcatcatatatatgtatgtttttcataatggagtcttgatctttacacaagtttttctgttttgagtagccagaatactctgttatattagagtaaccatgacaaaaacaaaacaaaactacccaacaataacacaacaaccccaaaacaataagcaaatttgaatttaagataaaattaatgcagtatttattcagtaattattctttaattacatgtaattaataacttggaacattttaaatctaaaatgttttctgtaatttttaaaaattttgttttacctgataacatactctttttatcatttcagaatgatgatattgaaacagatattaacaaactaaaaccccagcaagaaccgggacgaacaatagaagatctaaaaatgtatgaacaccttttccctgagcttgttgatgattttcaggtataaatatagaaaattcagcatcttaactgattttaataaaaagttattttttttcccttaggtcgataatcactgtttttattttctttcca

SEQ ID NO: 42129 - DNA, 2300 bp, Homo sapien
tagccaggtgtggtgacgtgtgcctgtagtcccagatactcagtgggaggctgaggtagtacgattcattaagcctgggaggtcaaggctgcagtgagccatgattgcactactgtattacagccttggcaacagagtgagagtcttgtctcaaaaaaaaaaaaaaaagaaagaaaaagaaaaagaaaaagaaaaacaactgaggtgtacctttaccttttggaggctgaggttctcgggagagatggtgtccaacatacaggagatcggtgaggatatgcaaggtcccacgatgctagagggctgtgccagtgttggtggacaggcttcaaagcttaaaggctaacagggtgtggccctgttgcagcctgagctggtagcgttcagggaagtggctgacagagcacgcgatctgccacccgctgagctctcaaagtatcttgcaaattcttgagtttatatgtatttcgaaatcctgtagttgaggtcagtaacatatatatggtgtttgataaggtgtaacgtcacattagctaggagaggtgaagtttatttcaacttcatacacgtgggatctgatgaagagtgatgtcacattcccagggggtgggggagtagctctaagttcttaattaccgcaaaacataaatcactcactcttgtggcaaactatgtgattggaatcatttcaaagctatgtaatgctgctatttatcttgtgtgggttaatctcctgggtctgtgttgtggtcatcaaactatgctaacagtgcttgtgaaagtgggattcaaattccacaaacacacacatccacataatatcttcctatattgcaggttgactcatttagaaacatgttctttaagaaaagtttcaggtatattacatacatatttagcattattgtaaaattattacattattattgggtattttcagataatacgtttctgattgggtggtttggggtggtggttgtttcaaaattattttaaataccgtaacctatcttttagtgctcacgatgagggaaactacgatgtttataaaatggcagtttcttgttcatctgaataaagacatctaccaagggcaaactgtaagaagcactgtggtgtaccttgggttactttttgaattgctttcacacctgcttaattttatttgaacaagatcataaaacaaaacaaaaatctcacagttctcaatgcattcccttatctagttgtgatattacattccttaccataaacagtagcaaacatgttcttgtgcaacgtgaaaaagtaaatgatgtcagtatttatttgcaatacattgcagtacactgaagtacagtcaaaacagaagggggtgtattagtaatttctctgacacattactttggctcagataaaacattccgcctttgccttcagtagccaacttagcattaccgttttgattatatgcaggcactttttcaaaaaacagtaaatcagcatgctattttgttcgctgcagcactaggcatctaatttactgagatttggccacaaggtgcaatcctgttgttttctgggagcccgattgtagtaacagcatgtcccttccagcctcttattatggaccctccttgaggtcaggaaaggtctaagctttaccgcagtccccagcgtttgatgcgaccccgggatcacgtggggagctttaagaacccttcctaagaaagtgactgattgatggcgggggagggggtgggcgcgggcttagttccgggaaaaggctggggccctcgttgggagtgtacagaaagatgacttgaagaacgtggggagtcgctcgcagttcggtacggaggggcggtggccggggctgctgggtacaagggaccggcagcgcgcggaacacccgcccctaattcccgctcccgtgcgcgctccgcccccacgcgcgcgctccctcccgtcaggcgcgcagagaggcggggcgcagcgcgcacggaggtaacaagggacgcggcgggaagagggcgtgcgctccgccccgcccctttcgcggcctcgcacgccccgcccccactccctgcgcgtgctgggagccggctggcaaggcgtgcggtgggcggggcgccgcgctgacgttgcccgggatgcggacaggttccgccgcctccagcgccgccgccgcagctgccgccgccgccgcctccgcctcgcctgccaccggggtttgtatgaaaacaccgggcggcgggcggcgagggatccgccgtgatccaggtgctgagccgggtgctgcggctctgcgcggtccccgc

SEQ ID NO: 42130 - DNA, 2300 bp, Homo sapien
ttaatcaatcagttagcaaattctatagattctgcatgcacatcatctctcaactatgctctttaaattcccctggctgtccctttaggtcagactcatcattaccttttacctggcctacagtagatctgtcagtttttccacctctgatttctgcttcccttcacagataaatcactagcataaagaaaaaaaaaaccttccttttcttcccccaaacttctgaaccataaaaactcaaaatactgaattaaatataaattcatccatttggtatcttaggccccatactcctttgtcttttctacctctcaacatacctggagtctttgctctttccccaacacaactttcactgattcgccttcatatatattctcatgctatcccttcttgctgtaaaactctccctgtctccttcaaggtcaatcccaaatgcctactccttcatgctgcgtttctttccttatccccaagacagatatacacggttctttgattcccggcagtactctgccacttttcacgtggcacctatcatggtttgtcttttattgtctgttttatctttgtttcattccttacttctttgaaggcaaaggtatcttcaactcccctctaactctgaagcatcttacctgtggggcgtctaatattagttgaatcagggggatttatggagataatgggatgcgctggaagccagtacagctgggtgccggctctgccgtttattagctgtgaggttttgggtaagtcacttaacttcgcctgtaaaattagtccactacgacctgatggagaaccaagggagataacgtcaaagcgccctgcaactctacagggaactgagcaatgttagttattttccttacagagatctgatgcactcttgctactggaatcttgacttgcaggaccatccctacttcattgcctggaggtcgaaccccaagttgcagggaacccaagctaccaggtcccactgcccttttccactccagggacctctaactgctctccgcgacgcaggtgatcctgccttgctgcgggggagtggcctggagtctcattccctcgggaggcctccctccttccacccgcttgaggagagcccttctcttccctgtgaccccgaagaccgtggcgccgccgcccacgtgaggcgtttggaccctgcccggcccccgtagctccctttctccagcaggtggttctggtcctctcccccaactcgggcgctcacgtcaccggcgaacctctaaccagcgccagcgccgctaccaaccgggaaaataaacaaacccccgcgctcggcggacgcgccaggccccgcccccgccccgaggctctcacgccgccccctccgcccgggcttcccgctaccctccgcccgcctgctcgcagctgcgctcttcccgcccctcaccgcggcctgcagccgcgctcaccgccgcagtccgccccggcgccccgggacccgttagtgcccagcctgtgggccgaccgcgacccccgcccggcgcgagcctgcccccagctctgccgacacttgacccagaccagtcccaacgcccagtgcggccgcctggggagccgcgggagaggcggcggcggggggaggagggagaggagggccgagccggcggcccgggaggcccggtgagtacgcggaggcgggcccgcctcgcgggtgtccgctccggaaccccggaggcgtaagcagcggctcgacagcgctcccctcggctcctagggtggcggggactcggcctgaggcgacgggccccactggccggagccgctgggcagagggcacgggagggccgctccgcggaaggggccgcggccctacgctcggcgcaaggctcggggcggcggggagggactcgcacccgactcccaggccggcgaccgctgagcctcccgagactccgtgggggccgctcgagtgacaggtgccaccgtcccctcaccgccgctggcgcccgcactccctcccggggagccaggcgctcggaaatttctggagcaacgacctgactcgttgttttctccctttcaggttttgaagccgcttctctggccgagttaggtttcgcccagcgcaatttctttctctatgtactttgcgaataagtttcggagcatcggttaacagcctatgggtgaaatttggctttcattcatgaatgaggtatagtgaattactttttgaatatagtgctcctcgtcctcccccgccagctattgaaaagtgatttttttttctgttattgtttggaacagccttaccgaat

SEQ ID NO: 42131 - DNA, 2300 bp, Homo sapien
agatccctcaaagagcttttgtttatgtgggttatatctattgatatttactgtgttagaattaaaactgaaaaaatctaagctatttattcattcaaaactaacagtaacccaattacatgttaatataaagggcatttttaatgaaaaatattttctaacaattttttttttttttgagatggaatcttgctctctcgccaggctggagtgtggtggcgtgatcttggctcactgcaacctccgcctcccaggttgaagcaattctcctgcctcagcctcccgagtagctgggactataggcacatgccaccatgcccagctaatttttgtatttttgtagagacggggtttcaccatgttggctaggatggtctccatctcttacctcatgatccgcccgcctcggcctcccaaagtgctgggattacaggcatgagccaccgtacctggccaacacacaaaaaattttagtaagagtagaattcctttacatttttgcaaatctctttaacatctgacctaataacagaaagttggattttcatatctgcttcagtattcagtttgttgcaatatgttttggttgaagtttgtaaagaaaattcagcctcataattgcatagtttgaagggaggagtatttcactgattttttcagataattgtggatgttcttctttcctattacaccaaactcaacaagcagaaatttctagttacttgaaatatgagatttgaaactatcttgttacattaagatcggtacattaaaatgtactagtctcagccagcacagtggctcatgcctgtaatcacagcactttgggaggctgaggctggaggattgttttgagcccaggagtttgagaccagtctgggaaacaaaatgagacctgttttacaaaaaatcaaaaaactagccaggcatggtggcatacgcctgtggtcccacctactcgggaggcttaggtgggaggattacttgagcccaggagttcaaggctgcagtgagctatgattgcaccactgcactccagcctgggtggcagagtgagaccctgtctctaaaaataaatgaataaataaataatagcataaaaacaggtaaggtaatacttcttaaatcttttttttagttctttttttttctgaaaggtaataactgtctaggtagagcaggcccttcctcattagtataagaaactggtggaacaggaagtactggtaattggaagcttgaatgttgggacacatataggagttggtttatataggagttgtgatatagatatatatatatatatatatatatatatatatatatatatatatatatatatatatatatatatatatatatcaatcacagtttctttatccattcgttgattgataggcatttggtttggttccacaattttgcagttgcgaattgtgctgctgtaaacatgcgtgtgcaagtatcttttttgtataatgacttcttttcttctgggtagatacccagtagtgtgggattgctggatcaaatggtagttctacttttagtccttcaaggaatctccacactgttgttcatagtggctgtactagtttacattcccactagcagtgtagaagtgttccctgatcaccgcatccacaccaacatcttatttagtgagatttttaaaatgccaagccaatatgtggaatgaggctctcgacaaataattttctgtttatttcatttaaaaactactttattatttacatatcccaaatgtacttaaaaatcggcaaatttactagaaaccaaaaagtaaaactgtttaatcatttttagacatcttcaaaatatatctcttcataatgaaagtgtacaaaatcagcaaatctgcttcattcaaatgccctaatgtattcttataaccctatatgtcaatttggaaaatgtgagctctttgagtgatccacgttaaaatctcatagcagttctagcaaacttgtaaaaatcttagtgaaggtactctagaaccaaaacaactagtttttatatacaggaagtaaaaatcaggaaaatcttctgtcttcatggtaatgaattcctgtgttatagcaatggtaggttctctgaactctttctgcctttcttagaaagaaatcagaaaaagttgaaaatgaaaaaaaatttatgagacatcatcaagctataatcaaatcaccatttttgtgttatcatatggggtttcttgattattttccatggtgaatgtcacttgtgccttctttccccactagtgtgtgcttgctgctgat

SEQ ID NO: 42132 - DNA, 2300 bp, Homo sapien
ggcatgatctcggctcactgcaacctacacctcccaggttcaagcgattctcttgcctcagtctcctgagtagctgggagtacaggtgcacgccatcacgcccggctaatttttgtatttttagtagagatggggtttcgccaagttgaccaggctggtcttgaactcctgacctcatgtgatccacccgtctcagcctcccagaggactgggattacaggcgtgagccaccacgcccggccatttaaaaattttttaaaccaatttttgtgaagttcggtttacaaacaataaaatgtacacattgtaagtatatacttcagtgaaattttacaaatgtattcacccacacaggcactaccttaatcgaaaacagaatatttacatcacttcaaatcaagctctatccaacttagtctcttcttgagccctgagcagccactaatctgtcttctgtcactatagatgtcttttaagagcctggggtctcacttggggaatcatactcttgcatttgatttcttactctgtcgcccaggttggagtgcaatggcaccatctcgggtcacagcaacctctgcctcctgagttcaagggattcccctgtctcagcctcccaagtggctgggattacaggcgcacgccaccatgcctggctaatttttttgtatttttagtagagacaggatttcaccatattggtcaggctagtctccaacccgacctctccactgccagcctcccaaagtgttgggattacacgcatgagctaccagctaccaagctcagcctgatttcttttactcaatatatttttgaaattcattcatgttgtatgtcaagtagtttatccctgtttattgataattacattcattacattgtatggatatgccacaaattgtttttattcaacagttgatggacatttgggttgtctgtagtttttgatgattaaaaacaaagctgggccaggcacggtggctcatacctgtaatcccagcactctgggaggctgaggtgggcagatcacgaggtcaggagtttgagatcagcctgaccaacatggtgaaaccccatctctactaaaaatacaaaaaacagcctggtgtgggggcaggcgcctgtaatcccagctactcgggagactgaggcacgagaattgcttgaacctgaaaggcagaggttgcaatgagccgagatcaggtcactgcactctagcaggggcgacaagagtgacactctgtctcaaacaaaaacaaaaacaaagcaaaacaaagctggtatgaacattaacgtacaagcctttgtatgaatatgtttttgttcctaagtaaattcgtagattactggatcgaatgataagtatatgattataaggagagattgttaagttttccaaagtggttgtaccattttgcattaccaccaccaacataacagaggtccagttgctctgcatccttgccaacatttggtattatcttttccatcttttaattttgggccatcctaaagaacaggtggtgataaagatgtgcttcttacctgcgcccgtctatttatgtaaccccatttaaaaactgatcattttattaataaattaaaaaaatctaaaacatataagaatctgaaattaaatgtctggcttgactttgcagatattttgaatctatgtttcctcacgaaactcccaggcgctgtataggaaacataaatccgttgtcaggcagcagtagcacgctgttgctctcggagcttggctgctcgttcgtgctcgcaaccactaaggtctacgcaaacctccacggtttccttccgccttcgcgtcacctttctaagaaattcccagagggcagcgcagacggggcgggctctgagactccgggctccgcctctttccgggaaccgcccactacccaggactccgacagagggtgaaaaaagataacttccggtctcgcgatcgtctctaatctcgcgagaagagaaggcggccgccatcggccgaacggaggcggtggcgagggagggggtgtggccggggagcgcgaagtccccgggagtaagggagagggggcggggtcgcgcgtcccgggcatacgcatgcgtgcacgctgccggtcgggctgggctgagaggggagggggcggcggcggccgaggcggcgtcgttatttccgtggtccggacagtgcgtggcggcgcgggtgaccacgggagaagtaggtagggaccgcccctgcgtagccattgaaaccctctcgctcgtgtgtccgagagccgcagccccccgcgcgt

SEQ ID NO: 42133 - DNA, 2300 bp, Homo sapien
acatcacttcaaatcaagctctatccaacttagtctcttcttgagccctgagcagccactaatctgtcttctgtcactatagatgtcttttaagagcctggggtctcacttggggaatcatactcttgcatttgatttcttactctgtcgcccaggttggagtgcaatggcaccatctcgggtcacagcaacctctgcctcctgagttcaagggattcccctgtctcagcctcccaagtggctgggattacaggcgcacgccaccatgcctggctaatttttttgtatttttagtagagacaggatttcaccatattggtcaggctagtctccaacccgacctctccactgccagcctcccaaagtgttgggattacacgcatgagctaccagctaccaagctcagcctgatttcttttactcaatatatttttgaaattcattcatgttgtatgtcaagtagtttatccctgtttattgataattacattcattacattgtatggatatgccacaaattgtttttattcaacagttgatggacatttgggttgtctgtagtttttgatgattaaaaacaaagctgggccaggcacggtggctcatacctgtaatcccagcactctgggaggctgaggtgggcagatcacgaggtcaggagtttgagatcagcctgaccaacatggtgaaaccccatctctactaaaaatacaaaaaacagcctggtgtgggggcaggcgcctgtaatcccagctactcgggagactgaggcacgagaattgcttgaacctgaaaggcagaggttgcaatgagccgagatcaggtcactgcactctagcaggggcgacaagagtgacactctgtctcaaacaaaaacaaaaacaaagcaaaacaaagctggtatgaacattaacgtacaagcctttgtatgaatatgtttttgttcctaagtaaattcgtagattactggatcgaatgataagtatatgattataaggagagattgttaagttttccaaagtggttgtaccattttgcattaccaccaccaacataacagaggtccagttgctctgcatccttgccaacatttggtattatcttttccatcttttaattttgggccatcctaaagaacaggtggtgataaagatgtgcttcttacctgcgcccgtctatttatgtaaccccatttaaaaactgatcattttattaataaattaaaaaaatctaaaacatataagaatctgaaattaaatgtctggcttgactttgcagatattttgaatctatgtttcctcacgaaactcccaggcgctgtataggaaacataaatccgttgtcaggcagcagtagcacgctgttgctctcggagcttggctgctcgttcgtgctcgcaaccactaaggtctacgcaaacctccacggtttccttccgccttcgcgtcacctttctaagaaattcccagagggcagcgcagacggggcgggctctgagactccgggctccgcctctttccgggaaccgcccactacccaggactccgacagagggtgaaaaaagataacttccggtctcgcgatcgtctctaatctcgcgagaagagaaggcggccgccatcggccgaacggaggcggtggcgagggagggggtgtggccggggagcgcgaagtccccgggagtaagggagagggggcggggtcgcgcgtcccgggcatacgcatgcgtgcacgctgccggtcgggctgggctgagaggggagggggcggcggcggccgaggcggcgtcgttatttccgtggtccggacagtgcgtggcggcgcgggtgaccacgggagaagtaggtagggaccgcccctgcgtagccattgaaaccctctcgctcgtgtgtccgagagccgcagccccccgcgcgtgtggcagatcctggggaccccaggtcaccctgcggccccggccctcccgctgcgcgtcaggtaggagcggcgggctccccagtgcccgctgtcggccgaggccccactcttgcccggtgttgccgaggcgacgacccggcgccggacgtgcccgccctcccgcgcggcgacagctctgtccttgcttatgcgcccagtgggaccggggctgggctgggctgacccgggcagggcggaagggaagcgtgtgcccgcctcaggtgtgcctcggccctaggcccggccggcgggaccctgcggtgcctgccggctcctcattgctcccggcgaggttctgcctgggtccgggccggctctggcccgggagaggtcccagcgagctc

SEQ ID NO: 42134 - DNA, 2300 bp, Homo sapien
tatatctacttccagttactaaatatatattatatataattacattatatatgtacatcacaaacactcaggtttagtatattagactttgagttcaacttttaaacttatttaaatatataaatatatattatatgatatatattaatatatattatatatcatataatatatactataatatataatatagtatataatatataatgtatataatatataatatatattatatataataatatataatggaaaggcagcatggtatggggaaagaaaaaacaatagaagaccagaatttatttcatttttatcattaatattttatcaggcatatcactttaatttttaaactttcccttttttttttgtttttttttgagatgaagtctcactctgttgcccaggctggagtgcagtggtgcgatctcagcttactgcaacctccgcctcccaggttcaagaagttctctgcctcagcctcccatgtagctgggattacaggcgcctgccaccacgcccagctaatttttgtatttttattagtgacggggtttcaccaccaacagtcacaactgttgacctcatgatccacctgccttggcctcccaaagtgctgggattacaggggtgagccactgtgcccgacccaactttccactctctaaagagtaaaatgcttatatcttctctgacctcttacagggtagttactgatcaaatgagataatatctgtcacagtatgcaaatataaaacagtattatactttgagaatcttctaactcagacttacaaatccatgtctcttgcctggttagtggaatgttacatagtattttagatgagaacaccttatggagaaagcaggaataaagaaccatagtcaagctttatggctattagctctttttaagctaataattattaggcattctgacatatttatagcagcacaggaatgtcagccttgaacattggcttttgactcaagcaggaaagaaattgtccttgtgaaattgcaagaagatatctaaagatcgaaggaagctatttttatcatatgaaagcaagtttcacatgaagctgtttttttccagttattgataaattctggtgttgagttccttaaaacaaacacctatgtaaaattaaaagtatacatagacctaattcttacatacacagcatttttttcccttaaaccagattgtgaacttggaatgttaagtttctttggtactaggaaatttcatatttacagttgacaaattatatgtgtattgcagccattctgtagtcttattcagatccatggacataacagggctcgacagagagataagcttggtcatattcttgaggaatttgccaccttgcaggatgaggtaagagccaggttcccctctcttctaaaattaaatgatgcacacactttgtccagatttttaaaaacaataattcagaacaatattttgactaatttttcaacatgatccacttttcacttaaaatataacagtttcttacaccaacgtttacaaaatgaaacagaacaataatccaaactgatagatatcttaaatatttctttgataataggaataaattatgaaatatgtataaaatgatagttttacaagcttacattataaaaaatattaatacattaattttaaagttaatttgtgtgcagcagcaatattgataagacctgaagtgtatttgtatttttgtcctttaaaattgatttggtttaaggcatgtttaggtaaatgttaaccattgtgaaatgagaacttcaaatgtaaacctaactaaaaatgcatttaaaaatgtttctttgggtggtcagatttaaattttctgctcatattctttttagctgtacgtttttttaaagttctgtcattaccttaagaaaacaaaacgaacacagtttatgacattttattttaataggcagagaaggttgatgcagcgcttcacaccatgctgttgaaacaggaaccccaaaggcaacatttggcctgtttaggtacctgggtcctttaccataaccttcgcattatgatacagtaccttctaagtggctttgaattggaactctacagtatgcacgagtactattacatatattggtaagagcacagtttgagttaaaattggtggtgggtgcaatggataagatctgagaattcagagttaatttcagggtactttttcatttagtatattttatctttagttgtgggacagttggaaaaatttgaaaattagagctagatcatcttgaatatc

SEQ ID NO: 42135 - DNA, 2300 bp, Homo sapien
attaacctagtttttaaaatctattttgtgctgccttgtttctaagaacacaagaaactctaaaataaaaatagtctttgttttgtgtaccatctgaatatttgtagatacattaattgagtttcgtttttctttaacaggttcctcctgaatttgatttctctgctcataaatattttcctgttgtgaaacttgtttgagagagactggggaggtggccataaaggggcagagtcttctttcagacccaactcttagagggcacatcaccaggctccacatcacgggaagtgagatggatttcttgggtaacaactcattataaggaatacttttagtttgacagccttatatgacatgaatgaaaactgctgttttaaagtggtttattatgttccatggaagaaactggtcttattgaatgcattgatgaacgttatatggttttattacagatttaatcacaaatcattttttatgaatgattgagtgaaaatagtgtttataaaggttaataaatttcttgacaaaaaaaaaatgcactgctggagatgaaaaacagtaggtctttgtccatgttaagaactgaagaaggtgtatgctctttaacatttgagtagttccaaaaacgttatccaaaagaagtttcaaatcaagggattaattaaacacttgtatgagattttggtaaaatacatttagaagggatttttgggagggcctctaaattacatgaaaattgtgatttttatgtgtcatgacatcacaaattatatatctgtaagaatacagatgtgtaaaaaaaatccttttagcacttttaaaagattatacattgtttgctggtgacatgcaaaaaggaggcagatagaaatgtatatagattaaaatttaggactaggtttaaatgtggtgtactttttgtttacttcatattcagtttaacccatgaaacattttcaaatgggtgtctgttcagtatcctctggctttgaaaaactgactacatccccctgtgcttgcaagtgcctgctgccagaggccctccccttcctttcctgcttgtcctgtgtctgctctgatgtttgcggtggcagctttctaggcctcttgggccttcctttttgtcctctgtagcaggcaatactcttagcaaaatgagttactctgtggtgtaaattggctttggtggcttagcctaagactagtgacagttttatatttggtctgtggttaaaagggttctcagcttcaaatatcttaactctgatttggtacctttcataaaaacatgatagtatagtgaaacttttctggcagtactttaaagcagctaacctgactgaacttgctaagggtgttcctgttgcccctctttgcagctaatgagccctcttggctctcctttccaagagcggtaatacttgtgttattcaagaacagccattaggtgtcctgaaatttcagaaccgaaaaatcttaaaaaaaattattttttaagtagcctgtacaatagaaacttcaattatggagagacaaagagtatacctgttactgatgtagttactttgttgagaatgaaaactgtttctggctggtaattactgaatgctttaaacaaaaaaaggcaaaggaatggtaggaaataggcaagacaagaaacaaagaatcaaaagaaaaagcaaagaggaaaacagaatgagcatggacatttggcaaacaaccaagaagagagcctgaagcaagttagaaagctgagaaattattattctttcccagtggccaagatacaaagtataaaaaatatgtcccccttaaaagcaaaaaaaggaatgtagattaatgcaacaagggccctgctagatgatgggatcacttttaattaagagggtgtgctggcattttttagctactatgtctgattgggtctgctggtatagacgagcatctaggttattttgaagtaggtcttcctaagtaaaagttttcctattaacccattatcaactaaaaaagattgattagtgttagatttatcagtgtatgttactgacagaatcatgtggtttcctttaagtagctttaatttttggtttttagtttgtttagagaggaggtttcactatgttgcccaaactgacccaaacttgtgggctcaagcagtcctcctgcctcagcccccagagtagctgggattataggcaaatgcctgcttggctagtttttgtttttaaacagcaggtttctaattataaaaacaaatttgccattttataatttttaaagtaatctgccattca

SEQ ID NO: 42136 - DNA, 2300 bp, Homo sapien
tgtttaggtcataaaggctccactcttataaataaattaatgccaattatagagggtttgaggctgcaagttcaatttcacatacaccctcttgcccttctgccttccaccacaggctgatgcagcaagaaggcccttgcaagatgccagcaccttgatattagacttcctagccttcagaactatgagaaatacatttcttttctttataaattactgagtctgtggaattgtgttatagcaacacaaaatggactaagacattaaggaaaggatgcttaacaggcaaaacatggatgcttccttcaaccaaccactgtagccccttgcacattgtttaatcaaaacccatccaattgaattttcagggccagcaactgattagcttttttataaggaatgtaaattatgtatatagatatatataaaactgcatcttaaaattttcaacttttgtcataaagaatctaacgaaaaggactaattcatcttcaattaaaatatagctcattcagccagctgccttagcacctagacatatggacctgttccataaagtgtttaagaatcactgagtgagtcgctaattagttgctgataaatgagagactaatggagaccctccttagagccaaatgatatagaagttacagtccaccagtctaagaatgtaaactatactaagagagctaaaatgggcaagaaagggaatttcctgtacctgtccccgattatggttatttaagctcactagaagatcaaagtgacacaacttaagtctgcaaaaccagggctgacatctgatacagcctcagcttctgaatgctttggtctgaccctacaacagtttaacagttgcagataacaaaaatatcattttggaatatagtagaacattcctctaaaggggtcatgtatggtcagcttctaattcagctaagaggttttagctggtaaagatacgtttcctgcagttaagaagctccatgctcaggtagcaatagggtatcttgatcaccttttttaaggtgactctttgttctggttaaaatcaatttcagctgtgagcattcctttaggtgttcatgtatttacttgtttttttattgtgatttgagagaggcgcagaggaaggagtttcctttcccagacaccagagctaggaagacatgaagacatgattctaggaaaactgttctcaatcttggccgtatactgtattaggattatctgggaagctcaaaacaaacaaaaaatatcaagttcactttgaactctggaagtgggaccctggttcctaaatgctctaaaagctccccaaataattctaatggatggcaggtgctgccagagttaagaaccattgctttagaattttctagcatggtttccctgtaggtcactagttttgtggcattctctccgggaggtacggcctcatagggcttctcaaacatcagtgcgcctgagcgtcatctgaggcgctgtttcaaatgcagctgcccgggctataagatcacacccgaaggcgtccgggaatcttcactttttccgttgctagcagtggaagggtcacagaccaaacactaaggcctgagcggtgacaaccgaggcgagatgatggtcaacagggaatgcctcgtgggagaaaaaagacaattttgtgagtataagccccctaaaaacctgtttttcgttcgcttccttctctgggcagttttgacccgacgacttttataaagaaggtaacgtgagtgtggcgctgggtgcggttggctgttcgggaacattccctcggggcggaacgtgggatgggggctccccccaggtaccctttccccacagccgcttccccgctccgcgtcgctgctcaggcgccagctcccgcgtcggaaggggcgatggggtggcccgggggaaggggcaacgcccagcggcgagaactgggcgcacgctggcgttcctgctcccgccgaggggcggccaccggccggggcgcgcgcaccgtggggccgggagtccgcgcggccccggcagcccctgcctcgcttctccgcgctcgcggcgccgcctcctcccttcgcgccgccggcgctgctcgggggcggggccttgccgctgcggaggccggagacgcggcggcgctggacgcggaggcgctgggcgcacggcgcggagccggccggagctcgaggccggcggcggcgggagagcgacccgggcggcctcgtagcggggccccggatccccgagtggcggccggagcctcgaaaagaggtgagtgggcggcgcgcggcccc

SEQ ID NO: 42137 - DNA, 2300 bp, Homo sapien
aggatgaattgtgccttgaatcttgctcatatctgatttagatgagactctggactttctagttggtgctagagtgaagaccttagggctgccaggtgcagtggctcatgactgtagtcccaccactctcgaaggctgaggcaggtggattgcttgagcccaggagtttgagaccagcctgggccacatgtcaaaacctcatctctacaaaaaataccaaaaaaattagctgagcatgatggcatacacctgtagtcccagttactcaggaggctgaggtgggagaatcacctgagcccaggaggttgaggctgtagtgagccatgatcacaccactgcacttctgccggggggacagagtgaaaccctgtctcaaaataaataaataaataaataaatattaaagcctttagggctgttgggatggaataaatgtattttgtatgtgagaaggatatgaactgggggtggtggggggcatagaagcagaatgctatggtttgaatgtgtgctccataaagcacgtgttgaaaactgaatctccagtgcaacagtgttgggaggtggggcccaaagggaggtgtttaggtcataaaggctccactcttataaataaattaatgccaattatagagggtttgaggctgcaagttcaatttcacatacaccctcttgcccttctgccttccaccacaggctgatgcagcaagaaggcccttgcaagatgccagcaccttgatattagacttcctagccttcagaactatgagaaatacatttcttttctttataaattactgagtctgtggaattgtgttatagcaacacaaaatggactaagacattaaggaaaggatgcttaacaggcaaaacatggatgcttccttcaaccaaccactgtagccccttgcacattgtttaatcaaaacccatccaattgaattttcagggccagcaactgattagcttttttataaggaatgtaaattatgtatatagatatatataaaactgcatcttaaaattttcaacttttgtcataaagaatctaacgaaaaggactaattcatcttcaattaaaatatagctcattcagccagctgccttagcacctagacatatggacctgttccataaagtgtttaagaatcactgagtgagtcgctaattagttgctgataaatgagagactaatggagaccctccttagagccaaatgatatagaagttacagtccaccagtctaagaatgtaaactatactaagagagctaaaatgggcaagaaagggaatttcctgtacctgtccccgattatggttatttaagctcactagaagatcaaagtgacacaacttaagtctgcaaaaccagggctgacatctgatacagcctcagcttctgaatgctttggtctgaccctacaacagtttaacagttgcagataacaaaaatatcattttggaatatagtagaacattcctctaaaggggtcatgtatggtcagcttctaattcagctaagaggttttagctggtaaagatacgtttcctgcagttaagaagctccatgctcaggtagcaatagggtatcttgatcaccttttttaaggtgactctttgttctggttaaaatcaatttcagctgtgagcattcctttaggtgttcatgtatttacttgtttttttattgtgatttgagagaggcgcagaggaaggagtttcctttcccagacaccagagctaggaagacatgaagacatgattctaggaaaactgttctcaatcttggccgtatactgtattaggattatctgggaagctcaaaacaaacaaaaaatatcaagttcactttgaactctggaagtgggaccctggttcctaaatgctctaaaagctccccaaataattctaatggatggcaggtgctgccagagttaagaaccattgctttagaattttctagcatggtttccctgtaggtcactagttttgtggcattctctccgggaggtacggcctcatagggcttctcaaacatcagtgcgcctgagcgtcatctgaggcgctgtttcaaatgcagctgcccgggctataagatcacacccgaaggcgtccgggaatcttcactttttccgttgctagcagtggaagggtcacagaccaaacactaaggcctgagcggtgacaaccgaggcgagatgatggtcaacagggaatgcctcgtgggagaaaaaagacaattttgtgagtataagccccctaaaaacctgtttttcgttcgcttccttctctgggcagtt

SEQ ID NO: 42138 - DNA, 2300 bp, Homo sapien
tattacaaaactgtgatatatccgtataataaaatattactcaacattaaaaagaaaggaactattgatacacacaacatggatgaatctcaaaataattattgtgtgataagccagacaaaaaagagcaaatatcgtataattccatttatataaattctaggctgggcatggtggctcatgcctgtaatcccagtacttttcggggcataagctggtggatcacctaaggtcgggagtttgagaccagcctggccaacattagtgaaaccccgtctctactaaaaacacaaaaattatccgggcatggtgccacgtgcttgtaatcccagctactcaggaggctgaggcaggagaatcgctcgaacccaggaggcagaggttgcagtgagctgagatcgcactactgaactcctgcctgggtgacaaagtgagactccatctcaaaaaaaaaaaaaattctagaaaacaccaactaatctgtattgaaagaaagcatatcagtgttggagcgttggctagggaatgaggaatgggtggggaagatcaagagggaggcattgccaaggggtccaagaaaactttgagggggatgaagatgtgtactttttgagatgatagttttgctggtgtatacatctatcaaactatatactttaaatatgtgcagcttattgtctgtcagttacacccccaacaaagttgctttttttaaaaaaaaggcggtgggggggtcgggtgcggtggctcaggcctgtaatcccagcactctgggaggcgggggcgggtggatcacctgaggtcaggagttcgagaccagcctgaccaatatggtgaaaccctgtcactactaaaactacaaaaattagctgaacatagtggcatgcgcctatagtcccagctactcgggaggctgagacaggagaattggttgaacttgggaggcggagattgcagtgagccgagatcgcaccactgcactccagcctgggcaacagagtgagattcagtctcaaaacaaaacaaacaaacaaacaaacaatctgttgccagtttcctaggaatgctctgggcttattctctgcattttcccaccctgcctctcccctcctccccctctcctctccacaaaagggaacacatcacacaggctgtactgctccttactttgtcagtctctggtgtgttttaggcttattccatatcagcacacaggctttgcctcattctttttggtggctgtgtagttctgacctcagtgctctaaagccatgcatttaagtgatttgtcctctgcttgttcagctctgaaatttgtcattacgcaggcttaaccctgtatcagttaggagccgcttttctattccaccctcttattgttaatatgtgagtccaagagattatgagttaattgagggcagggactcacatatccacatctctatcttccaccaaaaaataatgttctgctctgcaaatagcaaatacaaaaagcacagcacaaagttcgcatccagcaggcttcatcccagcagaataagcgagagggactcagcaccagtcagtcccattttggttagtgagaaggtggtgccttagggaagaacactgcatacttcgaaggctgctctagggtctgtaatcacagccctctgtgtttgggttcattcacacggtgtttatcttctgggatttgctccacaacacccttcaggaagggttttgaaggttgtggaaaaatcagtgtgtgcagccaacaaaagggcaacaagccaattgtggttatacagggctgttttaagagtcaagtcatgtttgggatgggggtggggtgcacagtcttgtatcaagcattttctgtagcagagctcaatcagcatctacaaggcagggctgggccactcctgcctctgagcctgtcttcagtagtgggtgcctttgtaacgagccagcctgtccccggacccaggcagagtgacaaaacagctacacattcatgaagaacactggctgtctccataacaaccacggttaacatgactctgtagaactatgggcgtggcccttgggtctcctggcctggctaccaacatgcctgtggcttctcattgggccccgtgagtgctggcagggctgtgaagcaggtgtgactaatgggtcagctccccgctgggactgtgaccctgaagctaacaaacctaagggcaaggccaggcgcagcagctttctgagtctcttctgaagtggcttgaagtcgatactgtgtgtgtatgtaagatctagcctgaaggaaggcgctt

SEQ ID NO: 42139 - DNA, 2300 bp, Homo sapien
gcggggcaagggctctgtaccagcggtactcagcttaaaactagcctactttgagggccttgatgggttactgcttttacttccactagctagtgattccgaaacttttcatgatgaagtgcccatttattgggccaggtgtgttggctcaagcctgtaatcccagcactttgggaggcaaaagtgggcagatcacctgatcccaggagttcaagaccagcctgggcaacgtggtaaaacgccgtctctacaaaaaatacaaaaattagctggtcatggtggtacatgcctgtagtccccgttgctcaggagaccaaggtgagaggatcactttagcccaggaggtagaggttgcagtgagccaagatcgtactactgcactccagcctggatgacagagcaagaccctgtctcaaaaaaaaaaagaataaaaaataaagtactcattttttgttctccatggattctatgtcttgaagcagtcctcaaactttaaggtgcaaataagtcacctgggggtcttgttaaaaagcagattcttggccgggcgcagtaggtagctcacgcctgtaatccagcactttgggaggctgaggcgagtggatcacttgaggtcaggagttcgagaccagcctggccaacatggtgaaaccccatctctactaaaaatacacaaaaattagccagacatagtggtgggcgcctctagtcccagctactcaggaggctgaggcaggagaatcacttgaacctgggaggtggggaggttgcagtgacatgagatggcaccactgcattccagcctgggtgacagagcaaaactgtctcaaaaaaaaaaaaaaagcagattctgtaacaaaggtccagggcagagcctgagattctgcattagtagcaaaggcccaagtgaagccagtgctgttgctctgcagaacacctttgaatggcaggcttttgaaatattttctcattggaagaatcttctgtatttattaaattctgcttaaaattattaactttcttgtatatccatgttcataacagcattattcacaatagccaaaaggtaggaacaacccaggtgtccattgacaggggacagggggtgagaaatttatttcatggacacagattcaggtggaaaagatgaaaaagctctggagatggaaggcagtgcaggtggcacaacaatgtgaatgtactgaatgccacagaactgtgtacctaaaacggcttaacacggtaagcttcatgttatggatatgttgccacggtgttcacaagttattaactcaatcagactatttaaatgcccagtagattgcattctggggaaatggctgtttcaggaaaattttcagtgattgccacagggacctcccatgggtggggaatggagtctggagcacggctgcatggctcatggagagaatttgcacagccaggtagcccctggtccacttctacccatatctggccaggtgcaaagagcatagctgtaccttctattatctctctcaatttcttatttgcactttgcccatgtctatagaaggaaaaacttgactgattaaaaattacattcacggcacctgtagtcccagctactcaagaggctgaggcaggagaatggcgtgaacccgggaggcggagcttgcagtgagctgagatcgtgccactgcactccagcctgggcgacagagtgagactccatctcaaaaaaaaaaaaaaattatactcacgccagcctgggcaacatggcgaaaccccatctctagagaaaaatacataaattagccaggcgtggtggcgtgcgcccggggtcccagccacaagctgaggcagaaaaaaaagtagctactcagctactcaatgttcactctttaaaaatgcttttccatcatcctccaccgtctcccaccccccaccaagcagcaagataattccccatcgcttagcatcatatagctgcttatgtgaccttgagaatgtccacatgtcacaatggacagtcacttaacactaagcaatgacacatgctaggagtggggctgggccttggggctgctggatgaatgagacccagcctctgccctgggagtgcagagactcaagacagatatgaccacgtgaagagacaactgtaaaacaagtggtaagtgcatctacagccatagccacggggcactgtgagaccacagagcagtgaaaactaagccagtctaggcttggcaaggagagatggagtgaggtgggcagtggctaaggtgggaagaccagagctgggaggtgagatggga

SEQ ID NO: 42140 - DNA, 2300 bp, Homo sapien
tgtgggttttgacaaacgcataatgatatctatccaccattatagtagtttcacaatacatggcatctttaaatactcattaacaattaccatttgagtgaggctgtgtgccttgcacccctctaagggcttctcctgtattaactcatttaatcttcacaatatctgtaggagggaggatatgagatcccaaacccccaggtagtcaaagatgaaggccaagaaacaaacccaccacaccaccacctctctatgtccctccctccctcccttcctccctcccatcactttttcagtttctttctttcgagatgcagtctcgctctgtcacccaggctggggtgcagtggcgcaatcttggctcactgcaacctccgcctcctgggtagctgggattacaggtgcccgcaaacacgcccggctaatttttgtatttttagtagagacggggtttcaccatgttggccaggctggtctagaactccttatctcaagtaatctgccggcctccggcctcccaaagtgctgggattacacgtgtgagccactgcgcccggcccccagtttcttttattttctttctttctctctctttctttcttctttctatctgtctgtctgtctctctcttcctatcttccgttctttctttttttttttgagacagagtctcactccgttgcccaggctgggagtgcagtggcacgatctcagctcactgcaacctccgcctcccaggttcaagcgattctcctgcctcagcctcctgagtagctaggataacaggtgtgcaccaccacacccggctaatttttgtatttttagcagagatggggtctcaccatgttggccaacctggtctcgaactcctgacctcaggtgatctccccgcctcggcctcccaaagtgctgggattacaggcgtgagccacgcgcccggcccccagtttatgtgcagataaggcttaggggaaaaaaaaaagcgtcctcttattgtcaatgcgattgcatttctgtagcaggaagtcagaactacttgatggaattttgaactatcctttcagaaactgcaggagatcgaagataaacttggctttaaaaaatgtttcactgattagttcttcccacattcaaacactgcgaatctgtcctccccaggactgcttcatagacccctcctgccctttttccttcacttctagcacttcaatgacaaatgccacctgtcttgatgtcctcctctcttcatctgctagccctgtcctgccagtatctcattcttccctggcccctctttacctggcttcctgtgtatgcctgggtaccgcgcctgtgcagtgtctggtgctcaggaatactgcatcaaaaggcagaattaagcccctgagcagccaggacaaggtctgacaacacgttttaaatcgagtaattgttgctcgctataaatgtgactattcacactgctgcccagtcacattttcaagtagggttggttcccagttcagcaccagaatgaaaactgcattagtcaccacccttcagcatccccagcagtacagcacgctggggagaagggtggagggtggcgattatacaactctgcggtaacgccatgctcttaagaacagcctaattggaccacaaaagaagaatgaaaatggatgtagatgtctgggcatcggaacgatcactctgcatttgagagcataagctcccagtgcagggttgacttatgcgtccttaagtgtcaccgcctatgatggtgtttgtcacggtgagtattaaagcagggggtgacgctgcaccttgccccgggggcaggtggtgaagctacgtgcatccggagtcagcaggtctgaggtcattcctcgccccctcccgcccgctccccgacgtcacgccgactccgtcctcggcggtgaagacattcctcccgggccctgcgccctgcagcgtggtaaccccactgccggagaccgtgcgcaacccagctgctagacccccggcgttgagcggcaaaaccccgccccgagcggcttgccccgcccccggctcgtcactcatgcaactcacccaatggtggcggcggggggcggggctaggactgagggcgccgtgcgccgaagcttgtggcgtcaatgcgcccgccgtgtccatggagagaagctgaggcggccgaccttcggcccgaggcaccggggcgccgggacggcgaagatgtcggcttccttagtccgggcaactgtccgggctgtgagcaagaggaagctgcagcccacccgggcagccctcaccctggt

SEQ ID NO: 42141 - DNA, 2300 bp, Homo sapien
tttggagggtgatggtgagacagggtcttgctcggtcccccaggctggaatgcagtggcgcaatatcagctctccacagcctctaactcctggactcaagcaattcttctgcctcaaccacccaagtagctggtattacaggcatgcatcaccacacccagctcattcttatattttttgtagatacagggtttcaccacgttggccaggctggtctcaaactcctgacctcaagtgattcatccaactgagtctccgaaagagctgggattacaggcttgagccatggcgcctggccagcaggtttctttttaaagcttagtattaaatatctttccccatttaaattttccattactctgccaagaaaaaaaatttttttttttttgagacaaagtctagctctgtcacccaggctggagtgcagtggtgcgatctcagctcactgcaacctccacctcctgggttcaagcaattctcctgcctcagcctcctgagtagctggaattacagtcatgcaccaccatgtccagctaatttttttttttttttttagtagagatggggtttcaccatattggccaggcaagtctcaaactcctgacctccagtgatccgctcgccttgacctcccaaagtgctgggattacaggcgtgagccaccgctcccggccaaaaattaaaattcaagttacttgaagcctggacacacttccctggctagctgggctatgtaaaggttggtggtgttattcttcctgctgtgtaagcagatccaggccccagaaagaagggaccaggttatataattgtttttgaaaagtttgctacaaaaatgcatggcctgttataagccaggatacaaagtaaggatgagggtaagggagcgacatttttttccagaagaaagatattttctgaagagtctcagttcataattttcccaaaatcgttggaagagagggtaaaatctcaatatgaatttcaaagtactgtctctgtgaggggccgaaagttgccttgctgaggatcttttattaagtcttaaaattagagtagtagcatttcccagctggcattctttgaaatgtttttctagatggcagttaataatatttcatcaccagaagtatacctaggccagcgagggaataacactacacactcccttctctcttagaattcctgggttatttccaggacatattagcatattgaaggtatctgagaaatattatttctaaaatttgaacatagaataatttttgagtaacgctaattaatagcctacttaacagccctttaaggaacacaaatttggggaagcattggtgtagagagccttaaagttttacaaaagaaaatatttaaaggatagatgttcagctgcttaaaatgaaggaacttgtttcacatggcttcatcataaggtgttcatccgtgtcagaagacacgtgttcttaacaagtccttttttttttttttttgggaaattttttttttttatattatgagctattaaaaaaactaggttctccttagggaaaaaaatacatgcaaatgctcacaaacttttaaattcacactttagcggggtggtgatttctgaaggccctttctgtaaccctggtgtctttcaggaaacccaggtggagatcccatgtttaaattactttccgtttcaagagcacttcttagattctttaaaaaaggacatcttaaattttacattactgttacaaaaattagccaggcatggtggtacatgcctatagtcccagctactcgggaggctgaggtgggaagatggcttgagcctgggaggcagaggttgcagtaagctaagatcacactactgcactgcagcctggccgacagaaccagaccttatctcaaaaataaataaaaaacaaactttaccttgttaatgctatctactgagaagacacaatgatttaggaatttttaaatttaagcttgtaagttttattttctaaaaaataaatttttttcagctttttctaagagtgtcaaccggcttattttgtcaatatgtctatttatttttaaacagaggatttttctccaacaattatagaagatcaggctcgtgaacatattcggcaaaacctagaaagtttcataagacaggactttccaggtaaatgatttattttttatttttaagaaaagtagtgtaaccttttttccaaatcagttcatgtgttacaagcacactgattttgagaatcaggatttccattgttttgcaatatacccaggatggtccttggtctgcc

SEQ ID NO: 42142 - DNA, 2300 bp, Homo sapien
gagtgtttttcctttttctctatgcctttagctactgtccatttttgtgtgtctgtgactgtaaaggtgcctccagcagcagtaacaggaagagttcagtgctgagaatattagcaacccatgcacagtcctctccacctgttattaacagttcaaaattaggagctctgtctggttaaataaaactgatcctgtctattcctgtgataatgactggattatagcatactctaatcctaatagtgcagtgaagtaatgctgttttaccacaaacaaaatagaagttagaattgatttatctagatggattgtcaggcttatatctttgttaaggttttccagatttttttaatttgatgcttaaatgatctttaattttccagattgtacttacatctgaaataacctgtatgtttctctttgctattaataggtgtcattaatattggatgtgaaacaccagccttcagtaccagttgggcagctctgggtggaattgctgcggttctatgctttagaatttaatttggctgatttagtgataagtattcgtgtcaaagaattggtatctcgggaattgaaggattggcccaaaaagcgcattgccattgaaggtatctcaaaatgtttatcttattcccccccactcttttttttaaaggtaccagtctaacagcatgctttttatttcagtctcttttcagctcctacaagtaaggtaggcctgccctcaaagggaaataaatagttagaatcttgcatgtgttaacagtgggtcatttcaaggaatcaaactgttcaccctgggtttttaaagtataaacaacttgaataatggctggctgagtccttgctttctttgtagattgcttaaccacttaaatgcctaaagtatgtttttcacagtgatgtgtaaatccccctttcctctttaccattctcacctctggattttttaattcagtccttttgtggattgttgaagttgtttagttttgcaaaggtgaggacaatactttttctcgtcaaaaatgtcattctccattggattcctctccagtagagagaatgagtagttatttttgacatatctacagtagcatttagaacttattcataaaaacacatttttagtgaagcctcatttaactgaaatcactttatcaaagacacactgatgtgccctgtagacatcattaaatggactagctcttctcagctttgcaaagtcaggaggttgaaacccctctagaaatcttaattctcctcctttaaataatttaaagaacctcctaaatggaattctcttatttttgcttgatttttttttcaagctttatgttgcataagagggttttttgcattttgcataaattctgtgtgcagtcatggggatctcacatttttaaaccctcccctgcagtttctgtggctcagctcttctggccaattgcctaacctgctggagttctaggggaggagaaaagattgagagaagtggtgtctcctcctggtgcctccctctcgcccctgaaattcagtccagccaattcagtgatggggcttcccagggcagaagagtggaggtaagctcgataaaccacagggcctggctgagtggggaggcagagcactcagcagcagcagagcctggtgggaagatcttccttcccaagggcctgagagccacgctgataacatcttttctacctccacagtcacagagcacaatagggagaaggggtactggttctgaacagaatgggttcccttcatagagccgatgtttcagaaaatactgctttttgttcttaaactctgttttcttactccccacccccagtttttttttaagtctataaaatgcaagataaattttaccattgtttgttgtctgtttttatctgcagcaggctaatttttaaaacatgaaatatagtaacatatgaagagatggatttttctttctttcttttttttattacagatccctactctgttaaaagaaatgtggcaagaaccctaaatagtcaacctgtgtttgaatatatacttcattgtttaaggacaacatacaagtattttgctcttccacacaaaattacaaaatccagccttctaaagcctctgaatgcaattacatgtatttcagaacattctaaagaagtaataaatcatcatccagatgtacaaacaaaagatgataagctcaaaaactcagttttggcccaaggtcctggtgctaccagttcagctgcaaatacctgtaaggtacagccacttactcttaaagagactgc

SEQ ID NO: 42143 - DNA, 2300 bp, Homo sapien
ttacacatattcttcgaaatgaactgattttttttttttccaagtaaaagtaatccttacacaacctaagaaaaaagcagagcattttccttgaccactttgagatctgggtgagcagtggatgtttaaatgctggcatttctacaaggtcggcaattaagaattcacgaaaacattaatcactacgaattatcagaaaaacaccaagagcgctacgaggcctcggagcctttactccccctggaagtaaccggggagcacccaggggcaaagccgaggccccaagcgcggggaatgcggctttgcccgaccgctggctccgcgtccctctccgggtgcataagtcttggctcccgcgcctctcccgagcacttagcctcccgagcagagaggggaaccagaggagcgtcgaagccgggagagaaaaggggcgggcgccgctctggtaagaagttcgggcctggcccccaagcgccggcgaaccggctatccggcgagccagtaattagcccgctccgacggttgcgcccggtggccagacccggcgcccgacacctggagcgagtgcgctggggcgccggacaggagaggccaggctggcaaaggcgcgggaggcggggtcggagcgtgggcggggcaccgcggggcggggcgcgtcgctcgtttccggtgtgcgcggcggagcgctagggcgggggcacagtcggctcccaatcgcgcacaatgagacagcgctgagcgccggaagtggggccgaaggaaaacacggagagggagcccggccgggacaggaagaggctggggaccgcggcgaaggtggtgagtgctcttgggcgccttctcccaacgtccctgccagactcgcctccgggctgattctccagttggtttcctggactccagagtagctgtccggcctggccccggaggtacgttggttccatcccccgccggcctcctcgcaccagtttgggtgaccgaggaacccccaggccggcagaggctgagccctcgggttcgagtccgtgttttcactttttgtcagactgcgggcgcagaagacgggatttgggtcaagacattcggctctggccccctggccggccgggggaaccctggaaccccatggagacagcaggtcacttcctgcttcctggtccccacggtggcttcttggccaggagtgcagggacgcctcctctttctccacgtcgggctcaaaagggtggaaactaaggcagatcggtggtggagcggtcagatggggattgaagaggagtgtcattcctcagggaattgctgttcctgacaaaaccaaacttgtttggggttggagaacggggattgaggaggttagatggagttgtcccttgatcggaaacccagcctctttaattacagctgcaccttggtcggaagcccagcccctccgtaacctaagcgctcaaagccggtctgtccagaataggggtggtgaagggacggaaaattggagttgagaaatgtagtactcctttcacgtaaagtttcggtgtataacacttacaagtaattgccaacttaaaaaacaaaagactgtttcggtagtttagtaataatattggcttgggatgaggttttctttgaagagaaacgccttgttacagagggaaaagccgaccatacttgatatgagtaatattctactatgctacagttctggaacctatagagcttctcttattcacacatttaatcttcatgctaaatagtaagtattaattttcatgaagaatattagaggaccaagcctcccaacctctagggtaaagcactgattattaagaatgtgatagaatttttattttaaaaaaatagggagtttctttcttacaggctttggggcatctgtacgataaattgttattttgtatacttgtatgatatcttgttatatagtttgatatttccccaaaataccttctttcaggtgcaaagtaagaaaattgaagtcaaagaccatgggagatacagcaaaaccttatttcgtgaagcgcactaaagaccgggggactatggatgatgatgacttcagaaggggtcacccccaacaagattatttaataatagatgaccatgctaaaggccatggcagtaaaatggaaaagggccttcaaaaaaagaagataacaccagggaactatgggaatacccccagaaaaggaccatgtgctgtttccagcaatccatatgcatttaaaaacccaatctacagtcaacccgcttggatgaatgacagccacaaagatcagagtaagaga

SEQ ID NO: 42144 - DNA, 2300 bp, Homo sapien
caagcaggagccaaagtgcctggcaaaagtattttaaatcgggccaggcctggtggcttacgcctgtaatcctagcactttgggaggccaaggccggtggatcacttgaggtcaggagttccagaccagcctggccaacatggtgaaaccccgtctctactaaaaatacaaaacttaaccaggcatagtggtgcctgtctgcaatcccagctacttgggaggctggggcaggagaatcacttgaacctgggaggcagaggatgcagtaagccaagatcgcaccactacactccagcctgggcaacacagtaagactctgtctcaaaaaaaaaaaattaaatccttagaaagatgtatcctctgctgctgctctagaactctaggtggaggcaaaggttgcagccagcggagatcatgccactgcactccagcctgggcaacagagtggcactccatctcaaaaaaaaaaaaaaaatccttaaaagtatgtatcctctgctgctactctagaactctaggtggaggcagatttctaaaccagttcttttgcacaggaattactggtttgggtggggcgtggtgacgctgctgtctcagaattaatgtaatcatgcatctccacactcccttttggactatattttcaaggccactgtctgcctgttgaagagactatcagtttgatcctcacgtattttcacaatcaaaatatctaagtaaggaattatataaaagttgtaggaatgtgttttatatcacttttagtatagccacatggttaataacagcctcatattcagggtctggattgcagcagtgccatttacttcactgcaagtgctaaatgtcctcatctttaaaagtgggataatgatatagtcttcatgaagctgtgaggattaaagaagttaaggctgggtatggtggaccacccctgtaatcccaacactttgggaggccaagttgggcggatggcttgaggtcaggaattggagagcagcctgggcaacataggagacccctgtctctacaaaaatataaaacaaaggagttaatatttgtaaagccttcaaaacagttattggcatagccagaactttgtgtgttattattttaagaccattgctccacaggacctgacagctttcaatttacatgctttaaaaaagcagagaaatgaaaactgtcgattttcccaacgctccctaatttcactagttgcttgatgtttttcaaagcatttagaacactgtaaacagcaaggaaggtcatacagtaaagaaagaaaaagcaaccccgagttcgaggtgtgcactcttcaactcaaaaattcgaatgtaacgctctctggtcatcccttgccattacacatattcttcgaaatgaactgattttttttttttccaagtaaaagtaatccttacacaacctaagaaaaaagcagagcattttccttgaccactttgagatctgggtgagcagtggatgtttaaatgctggcatttctacaaggtcggcaattaagaattcacgaaaacattaatcactacgaattatcagaaaaacaccaagagcgctacgaggcctcggagcctttactccccctggaagtaaccggggagcacccaggggcaaagccgaggccccaagcgcggggaatgcggctttgcccgaccgctggctccgcgtccctctccgggtgcataagtcttggctcccgcgcctctcccgagcacttagcctcccgagcagagaggggaaccagaggagcgtcgaagccgggagagaaaaggggcgggcgccgctctggtaagaagttcgggcctggcccccaagcgccggcgaaccggctatccggcgagccagtaattagcccgctccgacggttgcgcccggtggccagacccggcgcccgacacctggagcgagtgcgctggggcgccggacaggagaggccaggctggcaaaggcgcgggaggcggggtcggagcgtgggcggggcaccgcggggcggggcgcgtcgctcgtttccggtgtgcgcggcggagcgctagggcgggggcacagtcggctcccaatcgcgcacaatgagacagcgctgagcgccggaagtggggccgaaggaaaacacggagagggagcccggccgggacaggaagaggctggggaccgcggcgaaggtggtgagtgctcttgggcgccttctcccaacgtccctgccagactcgcctccgggctgattctccagttggtttcctggactccagagtagctgtccggcctggccccggaggtacgtt

SEQ ID NO: 42145 - DNA, 2300 bp, Homo sapien
tctatctatctatcatctcttatctatcatcttatctatctatctatcatctatctatctatctatctatctatctatctatctatctatctatctatctatgttttactagcctaaagagtattaaactcttttcttatagttaaatctttgtgtacatcctcaactatttcctcagaataaacacataaatatataattgcctggttagaaagaatttgcattttaggaattttgaagtatattgccaagtcgtcttccagaaagcttggaccaatttgtagtcttgtgagaaatatctttctcactctaaccagtggtttttgggagaaaaattcccactgtgttttaaggcaaacaattggatttaacttttatcaaagttccaccaagaatcattcttgaattctctttcaatcatgcataacataaaatctgagtctccaagagcctgggatccagaagaaggcatctcaaagactggctctcattgcctcctatgtgcttgagggggtgaattagaaagtgagaaccctgggcactgcagccagagaggccactgcactggtgcctggatgagggacactgtgccaaccgactgctgctaccatctcattgcagagactgtgtgtgctgccacagagagtgtcacagctactgggaagcaagaaaaagtccgccatatgtaaagaaataaaataaacagggaagaggatcaacctgagcaatcagggctgtggctccccagagtggaagagacaaaagggtactttagttaaaaaaaacaaaaaacaaacaaacaaaaaaaacaaacaaaaaaacacctctcaaagagatgcattcacagaacccctaaaaggaattttaaaactaaaatacatgtttgcaagttaaaacgtttaataggagaaatgtaaagacaataatcatggccaataattaaatatcttgtaataaaaaatgcaaatgaagaaaaggaaaaaaggaaggaaggagggaaggagggaaggaaggaaggaaaaaagaaagcaatgaggaaaactgtaagagagttggagactcaagaaaatattttatgcaatagtgaggaatttcaacagaaaaaaagaataaagaagtaatacaaaattcataaaagaaaacatgaactgaagaaaacctccattttaaaattgaaagatcttggcaagtgccatgcatgattaataataacattaatgatgataataataataatatagaccagaccagagctggccaatagaacttcctgcagtggtgaaaatgttctgtgtagttcagtatggcagccaccagccacatgggctattgatcacttgaaatgactggtatgacgaagaaactgacttttaaattttacttagttttaatttattaacattcgcatttaaatagtcatatgtggctagtcattatcacattggacatcagatctagacatttcctggtgaaatttcttaaatataagcattgaagtaaaagcttataaacttgtgggctttcgtattcaagaggggatacattccaagacccccagtggatgcctgattcagtggatagtatattatgttttttcttatacatacacacaataaagtttattttgtaaattagtcatagtaaggcatcaacaaaaaatacagacaataaaatagaacaatgataacaacatgccagcatcactactcttgtgcttcgaggcccttatttagttaagatacgggttacttgagaacaagcactacgataccacagcagttgatctgataactgagagggctactaagccattaaagggtgggtaaccatccagcgaagatacaccaaataattcacatcctggcgggaggaggaggactgcgtgagatttcatcaccatactcagaacagtgcacaaaacttacaaattgttaagtataacggtgtaacaaaacttacaaattgttaatttctggaatttcctacttaatatttttagacctcagttgaccgcagttgatggcaggtaaccgaaacctcagaaagtgaaaccaaggatacaggaggactactgtgtagaaaatcagatttgtattggacttcttatctgaaacactgaaggttaaaataaatagaagaatttacaaactgttaatagaaaacactgattggaggcgggtcatggtggctcacacctgtaattgcagcagtttgggaggctgaggcaggcagatcacttgagctcaggagttccaggccagcctgggcaacatagtgaaaccccatctccacaaaaaata

SEQ ID NO: 42146 - DNA, 2300 bp, Homo sapien
ctgctcgtcatcgtagtcctcatcgtagtagtcgtccaggcccccgtccgagccgctgctgccggggccgttgcccagctcggcgccgaagcacaggcgggccatgttctccttgaccgactcgcagatgggccgctcgaggccgtcgcacacgcagtcgttgagcagcgccgccttgggcatagccagcatgtcctcaatgacggtgcggcattcgtccgtgcagcgcagcccgttgaagactttgccgcagtaggtcaggtagcggctcagcgccaggttgcagcggctgtcgcggtcgcagcgccgccgggcctcggtgcagcccatgaccccgcccgcgccggggccgcccgcgccgccgccgctcgtccggggcaggcacggctcaatggcgcgcttggtggacttgcagttctcgtcctgcgcgcagtcacagtcctccagggcgggcccgcggcgcgtgtggttgagctgaatgagggccgagatgcagtgactcgggcagcgccagcgcgacgagaaagaggcggccgaggccgggaaagcggcggcggcggccccgggcgcgtcgcccccgccgtgctgcgccagcaccggcgcgcacgcctcggcgtactggttgtaggcgtagctgcactccggctccccctggcactgcagcagcgcctgccagcagatgaggcggcggccgtgcgccagccccgatccccgcggcgccgagcccagcagctgcagcagcgccatcaggcacagccaggcgcccggcactgtccccccgcgggcctcgccgccgccgcccagcagcgcggccaccatcgcgggcagcggcggccgccgggagaggaggggaaaggagacgaggcgcggggagcggcggacgcggagccggtggaaaagtttgtccaagtcctgcccacttcttgcatgagtgtcttcataaatccatgcgcgccgctggctgatgccccgctggtggcagaaggtcccctttcgctctggctgcggtggcttcctggaaatgaacagctgtcgagatctggtcccgctctcccacccgagagccctccgctcggcccccggtggtggcgggagaggctcactgtcgccccgggggggtgcgggccgcggggccgtggcggggctgcaggaccgcgcggcgcggcgggtgcattttgctccgcgcctgcagatccgttgtgcggccggctgtccccgtgccggctgctcgcgctgcggccgcggcggctccttcctcctgggctcagtgcctcgccgccgccaccgccgccgcggtctctcgcatcgcgccgcttcctggcccggcgtccgcgcgctgcccgccttcccgcggcccggccgccccgcgtcccctccccctccgcccgcggcaaccccggcctccgcagagctccggggagctctttccgggaagcgcggggagaacaagaaagtcggcgctgccggagagcggctccctggcttcactcggcggcagcttctcgggtgaccaagagcccggggagcggatccgctgagcccggctgcagactcgttagcagcgaggctttaaatacaaaagtgggccgggagcccccgcgtggtgccgcggtgccccctcattatgcatgcatggaaaagcaaacaaacaaaaacattagcaacgctcctccggctcgccgagccccggccccgcgcgctccgagcctgcccgctttctcctttctccactctctttcgccctttgctcggccccctttcccggcttttcgagatgctattggtcctgcctgttgttgttgaaagtttttttttttttttttacgagccgctggagtggggttgcggagtgggggagggcgggagggtggtgggcagctcacattcaggcattcagggcttgaaaggaacggcttagggagcctgacggaggcccggagctcctcctactcttaaggaggctcggatatgcagccccagctcgcgcacagaaccagcgggcagggcttaggggcagctgtttgcatccggctcagccacgggccttttttgtttgttttttttttctttttttttttttttgtagttttattaattctcgctggcccccatctgtgctttcgactggattcagaactcagtttatcttccaggctccctgtctttgggtcttgatcaccacagaggggaaggggagaatccagagataaaatgtgagactgaaactgttttaaagaagcatacaagaaagaagcacacactttattagggagatgttgatgagatgcttacaacccgcc

SEQ ID NO: 42147 - DNA, 2300 bp, Homo sapien
cactccggctccccctggcactgcagcagcgcctgccagcagatgaggcggcggccgtgcgccagccccgatccccgcggcgccgagcccagcagctgcagcagcgccatcaggcacagccaggcgcccggcactgtccccccgcgggcctcgccgccgccgcccagcagcgcggccaccatcgcgggcagcggcggccgccgggagaggaggggaaaggagacgaggcgcggggagcggcggacgcggagccggtggaaaagtttgtccaagtcctgcccacttcttgcatgagtgtcttcataaatccatgcgcgccgctggctgatgccccgctggtggcagaaggtcccctttcgctctggctgcggtggcttcctggaaatgaacagctgtcgagatctggtcccgctctcccacccgagagccctccgctcggcccccggtggtggcgggagaggctcactgtcgccccgggggggtgcgggccgcggggccgtggcggggctgcaggaccgcgcggcgcggcgggtgcattttgctccgcgcctgcagatccgttgtgcggccggctgtccccgtgccggctgctcgcgctgcggccgcggcggctccttcctcctgggctcagtgcctcgccgccgccaccgccgccgcggtctctcgcatcgcgccgcttcctggcccggcgtccgcgcgctgcccgccttcccgcggcccggccgccccgcgtcccctccccctccgcccgcggcaaccccggcctccgcagagctccggggagctctttccgggaagcgcggggagaacaagaaagtcggcgctgccggagagcggctccctggcttcactcggcggcagcttctcgggtgaccaagagcccggggagcggatccgctgagcccggctgcagactcgttagcagcgaggctttaaatacaaaagtgggccgggagcccccgcgtggtgccgcggtgccccctcattatgcatgcatggaaaagcaaacaaacaaaaacattagcaacgctcctccggctcgccgagccccggccccgcgcgctccgagcctgcccgctttctcctttctccactctctttcgccctttgctcggccccctttcccggcttttcgagatgctattggtcctgcctgttgttgttgaaagtttttttttttttttttacgagccgctggagtggggttgcggagtgggggagggcgggagggtggtgggcagctcacattcaggcattcagggcttgaaaggaacggcttagggagcctgacggaggcccggagctcctcctactcttaaggaggctcggatatgcagccccagctcgcgcacagaaccagcgggcagggcttaggggcagctgtttgcatccggctcagccacgggccttttttgtttgttttttttttctttttttttttttttgtagttttattaattctcgctggcccccatctgtgctttcgactggattcagaactcagtttatcttccaggctccctgtctttgggtcttgatcaccacagaggggaaggggagaatccagagataaaatgtgagactgaaactgttttaaagaagcatacaagaaagaagcacacactttattagggagatgttgatgagatgcttacaacccgcccgccaccccccagccccagctaggccatctggcaggtaccgcccgtgcgccaggcatcgttttcaaattgcaagaccgaaatccaatcaaccgaaataatttcttaggaagataagcttgcaacacgtgcaataatgaaaaaatttaactagcattaaaaatattcaggaatgtcgagcaattaccacctggccgcagtcacaggacagaagacggaataaatgggcacgcaccaaaggtttatattaaagtgtaagtttcagcccctcagtatatttaagggaggctgctctgcagaggaaacctctgccttctcggcgagggagtttccgagctaccttaactggggcgcaacgcagccttccgccaccagaggcagcgggcgtctgcggcctgtcaaaaactggcgcttttttcctcccctttccgtggagagactatcaactccatctgtcacaaaaattaaggctaaatctcctctccagaagcagagggagccggggctccgacgcgctcagcgtcgggctgtctgcctctccctagaggccaagtgaatttgaaatggcaaaagtcacagccggaggcccagcactaggagattcctccggctgcgggaaatcttcctgtacctgctgaa

SEQ ID NO: 42148 - DNA, 2300 bp, Homo sapien
ggcctaaaataacaaagctttaaagacaagaggggatttttcaattgtctaattggcttcgaaccttacctgtggagggatcccagacacagagaaggtgtctgagttgtccaagtcctccaggccggactgagaggacaactccaaataatagagaaaaaaaaagagacagagagccagggatatggttgttttgatgtgccatgaagttgcagcctttctggatttttttagtatcgatttatattgctgtttgtctaccaatactcaaatcagagcaagacggtccgccttacctcagtctggctcttttaaggtttgattttggttttggggactgcagaggtgcagcttcccacggcagaccaagcgcctctgaggaacgcagcagcttcagcaggtacaggaagatttcccgcagccggaggaatctcctagtgctgggcctccggctgtgacttttgccatttcaaattcacttggcctctagggagaggcagacagcccgacgctgagcgcgtcggagccccggctccctctgcttctggagaggagatttagccttaatttttgtgacagatggagttgatagtctctccacggaaaggggaggaaaaaagcgccagtttttgacaggccgcagacgcccgctgcctctggtggcggaaggctgcgttgcgccccagttaaggtagctcggaaactccctcgccgagaaggcagaggtttcctctgcagagcagcctcccttaaatatactgaggggctgaaacttacactttaatataaacctttggtgcgtgcccatttattccgtcttctgtcctgtgactgcggccaggtggtaattgctcgacattcctgaatatttttaatgctagttaaattttttcattattgcacgtgttgcaagcttatcttcctaagaaattatttcggttgattggatttcggtcttgcaatttgaaaacgatgcctggcgcacgggcggtacctgccagatggcctagctggggctggggggtggcgggcgggttgtaagcatctcatcaacatctccctaataaagtgtgtgcttctttcttgtatgcttctttaaaacagtttcagtctcacattttatctctggattctccccttcccctctgtggtgatcaagacccaaagacagggagcctggaagataaactgagttctgaatccagtcgaaagcacagatgggggccagcgagaattaataaaactacaaaaaaaaaaaaaaagaaaaaaaaaacaaacaaaaaaggcccgtggctgagccggatgcaaacagctgcccctaagccctgcccgctggttctgtgcgcgagctggggctgcatatccgagcctccttaagagtaggaggagctccgggcctccgtcaggctccctaagccgttcctttcaagccctgaatgcctgaatgtgagctgcccaccaccctcccgccctcccccactccgcaaccccactccagcggctcgtaaaaaaaaaaaaaaaaactttcaacaacaacaggcaggaccaatagcatctcgaaaagccgggaaagggggccgagcaaagggcgaaagagagtggagaaaggagaaagcgggcaggctcggagcgcgcggggccggggctcggcgagccggaggagcgttgctaatgtttttgtttgtttgcttttccatgcatgcataatgagggggcaccgcggcaccacgcgggggctcccggcccacttttgtatttaaagcctcgctgctaacgagtctgcagccgggctcagcggatccgctccccgggctcttggtcacccgagaagctgccgccgagtgaagccagggagccgctctccggcagcgccgactttcttgttctccccgcgcttcccggaaagagctccccggagctctgcggaggccggggttgccgcgggcggagggggaggggacgcggggcggccgggccgcgggaaggcgggcagcgcgcggacgccgggccaggaagcggcgcgatgcgagagaccgcggcggcggtggcggcggcgaggcactgagcccaggaggaaggagccgccgcggccgcagcgcgagcagccggcacggggacagccggccgcacaacggatctgcaggcgcggagcaaaatgcacccgccgcgccgcgcggtcctgcagccccgccacggccccgcggcccgcacccccccggggcgacagtgagcctctcccgccaccaccgggggccgagcggagggctctcgggtgggagagcgggaccagatctcgacag

SEQ ID NO: 42149 - DNA, 2300 bp, Homo sapien
tgctcctgtgttgggtgcatatatatttagtatagttagctcttcttgttgaattgatccctttaccattatgtaatggccttctttgtctcttttgatctttgttggtttaaagtctgttttatcagagactaggattgcaacccctgcctttttttgttttccatttgcttggtagattttcctccacccttttattttgagcctatgtgtgtctctgcacgtgagatgggtttcctgaatacagcacactgatgggttttgactctttatccaatttgccagtctgtgtcttttaattggagcatttagtccatttacatttaaagttaatattgttatgtgtgaatttgattctgtcattatgatgttagctggttattttgctcgttagttgatgcagtttcttcctagtctcgatggtctttacattttggcatgattttgcagcagctggtaccggttgttcctttccatgtttagcgcttccttcaggagctcttttagggcaggcctggtggtgacaaaatctctcagcatttgcttgtctgtaaagtattttatttctccttctcttatgaagcttagtttggctggatatgaaattctgggttgaaaattgttttctttaagaatgttgaatatcggcccccactctcttctggcttgtagggtttctggcgaaagatccgctgttagtctgatgggcttccctttgagggtaacccgacctttctctctggctgcccttaacattttttccttcatttcaactttggtgaatctgacaattatgtgtcttggagttgctcttctagaggagtatctttgtggcgttctctgtatttcctgaatctgaacgttggcctgccttgctagattggggaagttctcctggataatatcctgcagagtgttttccaacttggttccattctccccatcactttcaggtacaccaatcagacgtagatttggtcttttcacatagtcccatatttcttggaggctttgctcatttcttttcattcttttttctctaaacttcccttcttgcttcatttcattcatttcatctcccatcgctgataccctttcttccagttgatcgtatcggctcctgaggcttctgcattcttcacgtagttctcgagccttggttttcagctccatcagctcctttaagcacttctctgtattggttattctagttatacattcttctaaatttttttcaaagttttcaacttctttgcctttggtttgaatgtcctcccgtagctcagagtaatttgatcgtctgaagccttcttctctcagctcgtcaaagtcattctccgtccagctttgttccattgctggtgaggaactgcgttcctttggaggaggagaggtgctctgctttttagagtttccagtttttctgttctgttttttccccatctttgtggttttatctacttttggtctttgatgatggtgatgtacagatgggtttttggtgtggatgtcttttctgtttgttagttttccttctaacagacagtaccctcagctgcgggtctgtgggagtaccctgccatgtgaggtgtcagtgtgcccctgttggggggtgcctcccagttaggctgctcgggggtcaggggtcaggcacccacttgaggaggcagtctgccccttctcagatctccagctgcgtgctgggaggaccactgctctcttcaaagctgtcagacagggacatttaagtctgcagaggttactgctgtctttttgtttgtctgtgccctgcccccagaggtggagcctacagaggcaggcaggcctccttgagctgtggtgggctccacccagttcgagcttcccggctgctttgtttacctaagcaagcctgggcaatggcgggcgcccctcccccagcctcgctgctgtcttgcagtttgatctcagactgctgtgctagcaatcagcgagactccgtggttgtaggaccctccgagccaggtgccggatataatctcgtggtgcgccgttttttaagccagtcggaaaagcgcagtattcgggtgggagtggcctgattttccaggtgttgtctgtcacccctttctctgactaggaaagggaactccctgaccccttgctcttcccgagtgaggcaatgcctcgccctgcttcagctcgcgcacggtgcgcgcacccactgacctgcgcccactgtctggcactccctagtgagatgaacccggtacctcagatggaaatgcagaaatcacccgtcttctgcgtcgctcacgctg

SEQ ID NO: 42150 - DNA, 2300 bp, Homo sapien
tttactgagttttctacaatgagaatataactattatagttagggaaaatattatttttgaaaacaactagtaatattcatactgattctaaaacataagcaagctatttcctaataagtttataatttattttctaattttaaatattctcctttaataaaagaatgtttttaaaataattttaaaattttgtattgttaattctacacacacacacacacacacacaagcttcatccatattttaaaatctctgtctatagtaatcactacctttgggtttgcagaattcttagctaaattattcacttacctgaccacccccccccaacaagcccccaaataaagtgaatttccaacatggtgtttgcattgctaattgatgtctacctgcaagattttccaagtggaaggtacaaagggagacggcaggtctccaaaaacagatcagggctccctagcctttgtgtgtcacctgtttctaaacagcacaattagagcaataaatgctgcagccccgtgtttggcctgacgggatgatgaccctgcggctcagcaaggccacgtatgacagactaactacttgaaaaaggactctcttgagggttacttaacacagtcacctgttgatttatgaacacgcacactcacacataccttgtctcacccttttaatcatatcaatttgctgcatctcagcaaaagaaaaaaaaaccgaaaccactaattactcacaaataagtcaatggcaaagctccacatctgctcaatctggatggatgaagtttgtaaaccactaacacttcattttcccctattttgtaatgaatttttaattacataagaaataagtgaattcattctcttctgaaatattaggacatttactcaaaagtgccttttgaccacattctccaatttctatccctctgaaccctccccttggatagtttggggtttggggatttagccttgcagtccttttatatatggtctatagtagcctatagtgcagcacagagagcggtatttcttcatgagggtttttcttgtttttcttttcttctttctctctccctcgccctcattcttttcttacataaatggtttcatactgcagtttcattctgcaaattgctcattttttttttgagccttatcccaggctagttcaactagatcacttttatttattttaactgctgtatacaattccatcatataaatacagcacacacacactttacttattccctgtttgattccctgttgataaacaatccaatttttcaccatcacaagcaatgccaccacgtacatagtcatatctgacaatccatgtccacatgttcctcccacccaggcacaccaggtccattgccaccacactgaaatgtcaggcagcttgacaatcaagtcacgtggtgcctgggtctcagttctccgcgttctggaactcggtggagcagggctcttagggtcttgtggccacctcaccgggtcagactctccccgaggtgggaggacaagctaataggagaaacagggccatttcttcacccaaccactcaggctgccagactcattttcagattcaaatgcaaaatttcattatttcccctcaaacctaaaaccccacctaaaggcggttgagtatttggcattccctctacattgatcctggctgaggagggcccgggggactcaggtctgaggaggacacgttttccaaggcggccctccttccagtgctgccaggagagggaaaaggcactcagggagtttttgctggagataagagcaatttttgaaaaaaaggtagtaaggcaggaggtggagtctgccacgggtctctttcaaacttgctactttccatcccgttaatacaatcccggccctgtttcccggccccgcggccattgcagagtcatgaagtcatcgcagctgcgcctgcagccaggcgggaacgggaacgggaactggctggccgcggtcccttctgtcccccgccagccggaaatgtccgcgcgctgaaaagcagacgctgcctgcccggggaacggcgagagagagcgagaaaaaaaaaagcctgaaggcggcgcggcagccagcgagaggggagaaacagattcacacccaggggcctccgggcagggcccacgggactcaggccgtgtcccgcttggaatgtggagcaggcgcggcctcggcgtcagcagagctcccctgcatctcctcctgggggtgtgggggccgagtgggagaactggcggacagaggaaaggggcctcgctcgcaag

SEQ ID NO: 42151 - DNA, 2300 bp, Homo sapien
gtagggatacagagaaacatgggcacaaaactcagtttcatccccacggctctgttccactggctctatcacgctgcttcttgtgggcctggaaaatgttccccactttccgaagagctgtgtctttgctcaacatccacatcccagcaaacgggatccatttcaaaagaggcttttgattactcattgtcatttttgaacctcttgttgctgtcagtcatcagtaaacagtgctcttaggaaagccctaagtaggagaggttgaagacgatgctgtgggctggcacagctttttgttttgcacatgcggaaattgagactgggagtggaatgtgagcagttcagagttaaacaactaattcgaagtgagttgagaactggagtccagtcctctgggcttctgttccagtgttcatgagacagaacaaaactgctgctctgtaatgataagggtcatggggttacaggcaccagtggttgatgtgaaactgtatcacagaaagaaaaagaatttatttttgctttttgaccttgagaggtaaagaagttttccccacctcttgtagatctaacctcatcaaatcatacaaaaatcaatttttgtttacttgcatggagattatcttttcgtactcatgtatcagtcagcataggctgagttacattgtggtaacaaatgacccccaaagcttagtgattttcaaacacaaagttggatttttcactcctgctatatgtgtgttggaagttgctgagtttctgctgcttatctctttactctaggactgaggtggacagaactctctcaatttcagggttgggaaattgtgagctgtggcagaatctggcctgctattgtctttgttaatcaggttttattgaaagatagacatggttatttgtttatgtaccgttttcacaccaccacaacaggattaagttgtcataatagaggcagtatggcccacaatgaagataatctttactttctgaccttttacagagcaaattggctgatccctggtgtatctgaaacatggtgatctgtggcagaaggaaacgagacagagcaaactgtaggctggttctcaaaacttctgcccagaagtgacacatggtcatttctactcccatttcttgcactaaagcaagacatgtgacatgtggcccctcttgatgccaacaaaaaaggggcaggaaatcagctgattccaacataatttgtattttatttgtatctgtgtctgtattcttggttgcaaacaacagaagtgtactgtgtttaatttaaagagaaggaatattaatgtaaaggttatcagggaatcatgcacttgagaggaaggctgaagaaggggcctctgtggggtgcaaggacacagagccacagtcccactggagggacggcctccgtaagcttgccctctggcattgccagcagtggcccttctccacagcactgcttgtatctctgaggccactgtgagtaactttaattgaactttagcctggatgttactccttcaagattcaaagtgctgggtgggtactgtttgtcgaccacctttaaagcatgtggccatgtcctagctgctgggagggttggggagatgaatagcaagactttttcatcttggtaggaggaaggggccctgctttccctagagacttatgagtggaggaatctcatcaacataagaggccacgctaagaagcctgggaagcctaggaagccctgtcgttgttcacgcgaatggtcaattgcttgcagttggaagctgagtgggaagtctggcaaacgtcggtattgcttgtgcttcaacttcttaagtgacattttcctacaggacgccttcagcagggagcctggaaggatcagaagaagatgggagaacttccttcctgctggtcacttaggagccagaatgacctttgttacctggacttttccttttctcctcctcatcattgttccatccccactaagaccttcattattttggaaatattaagttagaaatctagtcatggccagcatgagagagggacagggatgcatacaggaatcaaactgaatacattttgtgttttcattccccgtaggtacttctgctggtgtcaatcattgggactggattatgtctaagcatcttcaacctcacaggggtaatttgaaaagttgaggaggggtttgcttttgaagagataagctcatataatgcagaatccagcctttatggggatcagggggtcactccaaccatggccttcacaaacggccttcaactgtaccccttggg

SEQ ID NO: 42152 - DNA, 2300 bp, Homo sapien
gggagggagggaaagagagagagagagagagagagagaaagagaagcaagcaggcagaagctctaatgccttatgacctaaccttggaaataaattacactgtgccactgccactaccttttcttagaagcaagcagatagggttggtgaatatttattgagaggggaattagactccacctcttgattgggggagtgtcaaagaatttgtgaatatgtttttaaatgaccacatttcccctttctaaaatgcttgtctaaattggtgtacacaaaaagctcgggggttagtgactcatccaaggttattaagctgttaaatggttccaccaatactagatctaattttgtgactccaaatttcatgctctttttcactactccagataatctccggtgaacatcattgtccattagggtagttaagacattctagctgccaaatagattcagtccttttaattgcctcggacaatatattttttattttgcagaaaataaatattacccatatggcagtcatccataaacaccttccaagtttatcccaaacatctgtgttttaaattttttctcccaacagatgtattcatttgcattttcccagatgaatcactctttttttgttgttgttgttatttttgactgtatttctcacctctcaagacccttttgtattatcaagcccactgcttaagctaataccatctcccaatttggggacttccccttgattcctgtgtgcccttcctgtgggtcattaatgcaatgttatttaagactaggatttggctgggcgcagtggctcacgcctgtaatcccagcactgtgggaggccgagccgggaggatcacctgaggtcaggagttcaagaccagcctgaccaacatggtgaaaccacgtctctactaaaaatacaaaattagccgggcatagtcacatgcctgtaatcccagctactgggtagcctgaggcaggagaatcgcttgaacccgggaggcggaggcggagtttgcagtgagccaagatttcacaactgcactccagtctgggccacaagagcgaaaacccgtctcaaaaaaaaaaaaaagactaggatttgacataaggcctgaggggtattcttttgttttgttttgccttgttttcaagaggccaaaatcttcacagttgaaaatttctgttgaaccacagagatttgaaccaactcagtttagaaagcctggggatttgaacaacggtatggatcggaaatctcttcatctgtcagttttcatcattctaggcagtaaaatagatttccctttaggagcttttcaccgtttggggttctccagcagtgggatgtggggaatcaacccttcttcgtctccacccaaacattaggtgggagcaaggggtgggaagtagagaaagtggatagaggtctccagtggatatgggatctttgtgtagaccagcacagtcctcagaaatctcatgcaagcaacataggtactgttatattttctagtggccaccttttaaaaagtaaacaggtgaggccgggcgcggtggctcacgcctgtaatcccagcactttgggaggcccaggcgggcggatcacgaggtcaagagatggagaccatcctggtcgacacggtgaaaccccgtctctactaaaaatacaaaaattagctgggcatggtgacgcgcgactgtagtcctagctactggggaggccgaggcaggagaatcacttgaaccctggaggtggaggttgccacgctccactacactccagcctggcgacagagtgagactccgtctcaaaaaaaagaaagtaaacaggtgaaattaattttaataatatattttgtttaacccaacgtatccaaaatactatcatttgaaagtgtaatgaatataaaaatattcatgagatatttttcattctcatatccatactgtcttggactctaatgtgtattttacacttacagcacaattaatttgggactagctacatttcagctcaacaatagccaatagcatatgggatagcgcaaataaactctgcgtctctgttgcttctttgggtctcggagacctcaaccctttcttcagattgcaaaccttcttgccttcaagcctcggctccaacaccagtccggcagaggaacccagtctaatgaggtacgctcccttcctgccattctctattccattaacctgtttcgtggtaaacgtaggactgatcctccaaaattaccttattaattagcttacatatttattatctatctgtcccaccagaatgc

SEQ ID NO: 42153 - DNA, 2300 bp, Homo sapien
gcagtcatccataaacaccttccaagtttatcccaaacatctgtgttttaaattttttctcccaacagatgtattcatttgcattttcccagatgaatcactctttttttgttgttgttgttatttttgactgtatttctcacctctcaagacccttttgtattatcaagcccactgcttaagctaataccatctcccaatttggggacttccccttgattcctgtgtgcccttcctgtgggtcattaatgcaatgttatttaagactaggatttggctgggcgcagtggctcacgcctgtaatcccagcactgtgggaggccgagccgggaggatcacctgaggtcaggagttcaagaccagcctgaccaacatggtgaaaccacgtctctactaaaaatacaaaattagccgggcatagtcacatgcctgtaatcccagctactgggtagcctgaggcaggagaatcgcttgaacccgggaggcggaggcggagtttgcagtgagccaagatttcacaactgcactccagtctgggccacaagagcgaaaacccgtctcaaaaaaaaaaaaaagactaggatttgacataaggcctgaggggtattcttttgttttgttttgccttgttttcaagaggccaaaatcttcacagttgaaaatttctgttgaaccacagagatttgaaccaactcagtttagaaagcctggggatttgaacaacggtatggatcggaaatctcttcatctgtcagttttcatcattctaggcagtaaaatagatttccctttaggagcttttcaccgtttggggttctccagcagtgggatgtggggaatcaacccttcttcgtctccacccaaacattaggtgggagcaaggggtgggaagtagagaaagtggatagaggtctccagtggatatgggatctttgtgtagaccagcacagtcctcagaaatctcatgcaagcaacataggtactgttatattttctagtggccaccttttaaaaagtaaacaggtgaggccgggcgcggtggctcacgcctgtaatcccagcactttgggaggcccaggcgggcggatcacgaggtcaagagatggagaccatcctggtcgacacggtgaaaccccgtctctactaaaaatacaaaaattagctgggcatggtgacgcgcgactgtagtcctagctactggggaggccgaggcaggagaatcacttgaaccctggaggtggaggttgccacgctccactacactccagcctggcgacagagtgagactccgtctcaaaaaaaagaaagtaaacaggtgaaattaattttaataatatattttgtttaacccaacgtatccaaaatactatcatttgaaagtgtaatgaatataaaaatattcatgagatatttttcattctcatatccatactgtcttggactctaatgtgtattttacacttacagcacaattaatttgggactagctacatttcagctcaacaatagccaatagcatatgggatagcgcaaataaactctgcgtctctgttgcttctttgggtctcggagacctcaaccctttcttcagattgcaaaccttcttgccttcaagcctcggctccaacaccagtccggcagaggaacccagtctaatgaggtacgctcccttcctgccattctctattccattaacctgtttcgtggtaaacgtaggactgatcctccaaaattaccttattaattagcttacatatttattatctatctgtcccaccagaatgcaggtttccggaaggcagggatttaaaaaaatctgttttgttctatgtgattttcccataccaagcaccgtgcccggcacaagctgggatcccagtacacatctcgggacggaagaaccgtgtttccctagaacccagtcagagggcagcttagcaatgtgtcacaggtggggcgcccgcgttccgggcggacgcactggctccccggccggcgtgggtgtggggcgagtgggtgtgtgcggggtgtgcgcggtagagcgcgccagcgagcccggagcgcggagctgggaggagcagcgagcgccgcgcagaacccgcagcgccggcctggcagggcagctcggaggtgggtgggccgcgccgccagcccgcttgcagggtccccattggccgcctgccggccgccctccgcccaaaaggcggcaaggagccgagaggctgcttcggagtgtgaggaggacagccggaccgagccaacgccggggactttgttccctccgcggaggggactcggca

SEQ ID NO: 42154 - DNA, 2300 bp, Homo sapien
ctcacctctcaagacccttttgtattatcaagcccactgcttaagctaataccatctcccaatttggggacttccccttgattcctgtgtgcccttcctgtgggtcattaatgcaatgttatttaagactaggatttggctgggcgcagtggctcacgcctgtaatcccagcactgtgggaggccgagccgggaggatcacctgaggtcaggagttcaagaccagcctgaccaacatggtgaaaccacgtctctactaaaaatacaaaattagccgggcatagtcacatgcctgtaatcccagctactgggtagcctgaggcaggagaatcgcttgaacccgggaggcggaggcggagtttgcagtgagccaagatttcacaactgcactccagtctgggccacaagagcgaaaacccgtctcaaaaaaaaaaaaaagactaggatttgacataaggcctgaggggtattcttttgttttgttttgccttgttttcaagaggccaaaatcttcacagttgaaaatttctgttgaaccacagagatttgaaccaactcagtttagaaagcctggggatttgaacaacggtatggatcggaaatctcttcatctgtcagttttcatcattctaggcagtaaaatagatttccctttaggagcttttcaccgtttggggttctccagcagtgggatgtggggaatcaacccttcttcgtctccacccaaacattaggtgggagcaaggggtgggaagtagagaaagtggatagaggtctccagtggatatgggatctttgtgtagaccagcacagtcctcagaaatctcatgcaagcaacataggtactgttatattttctagtggccaccttttaaaaagtaaacaggtgaggccgggcgcggtggctcacgcctgtaatcccagcactttgggaggcccaggcgggcggatcacgaggtcaagagatggagaccatcctggtcgacacggtgaaaccccgtctctactaaaaatacaaaaattagctgggcatggtgacgcgcgactgtagtcctagctactggggaggccgaggcaggagaatcacttgaaccctggaggtggaggttgccacgctccactacactccagcctggcgacagagtgagactccgtctcaaaaaaaagaaagtaaacaggtgaaattaattttaataatatattttgtttaacccaacgtatccaaaatactatcatttgaaagtgtaatgaatataaaaatattcatgagatatttttcattctcatatccatactgtcttggactctaatgtgtattttacacttacagcacaattaatttgggactagctacatttcagctcaacaatagccaatagcatatgggatagcgcaaataaactctgcgtctctgttgcttctttgggtctcggagacctcaaccctttcttcagattgcaaaccttcttgccttcaagcctcggctccaacaccagtccggcagaggaacccagtctaatgaggtacgctcccttcctgccattctctattccattaacctgtttcgtggtaaacgtaggactgatcctccaaaattaccttattaattagcttacatatttattatctatctgtcccaccagaatgcaggtttccggaaggcagggatttaaaaaaatctgttttgttctatgtgattttcccataccaagcaccgtgcccggcacaagctgggatcccagtacacatctcgggacggaagaaccgtgtttccctagaacccagtcagagggcagcttagcaatgtgtcacaggtggggcgcccgcgttccgggcggacgcactggctccccggccggcgtgggtgtggggcgagtgggtgtgtgcggggtgtgcgcggtagagcgcgccagcgagcccggagcgcggagctgggaggagcagcgagcgccgcgcagaacccgcagcgccggcctggcagggcagctcggaggtgggtgggccgcgccgccagcccgcttgcagggtccccattggccgcctgccggccgccctccgcccaaaaggcggcaaggagccgagaggctgcttcggagtgtgaggaggacagccggaccgagccaacgccggggactttgttccctccgcggaggggactcggcaactcgcagcggcagggtctggggccggcgcctgggagggatctgcgccccccactcactccctagctgtgttcccgccgccgccccggctagtctccggcgctggcgcctatggtcggcctccgacagcgctccggag

SEQ ID NO: 42155 - DNA, 2300 bp, Homo sapien
tacatgtgtcacagtgaaaagtttagggtaggagagggaccaagggtcttgtaggagctccaggtggaaagataccctcccagaggtcagattcccttatttccatattctaatcatggggatgagtcataacaatctgctttattccttctgttttccccatttctcttgacttgcactttcatgtaaacgcctcttagtcattgacttcaattgtgatagaaaagcattcttaaacatgcattttatacaaatattactaaaacccacatgaaaagtgtttggattcagatctatagagaagagaaagcagatggagagaaatgctttctccattctcccccacaagcagagattcagcctctgtagattaacttttccagatttgaaattccagtggtcataattctgtgtttataagttcagaaattttgtttaggatttttctagctaattccttagttttaatgtgaattttgaaagagtggcaaagatttttccagtttttgttcactactcttccagttatttttcctttgtaattagaaatgcatcagttttctgatttctagcctttattttctttatttagagcctattgttttaatttttatttttctgttttttataattgggaccagctttcagagatttttgccgtgttattctatacctagcaatggaagaaattcaagtgatcagaaaacaattctgtaattggaaaaattgcaaattgagaatatcttattcaaaggtatcatttctttgctgcaataggcttttctttttccttatccaggaagagagtctgtgttatacctaaaaattttcacagtggttttaggaactatgttttgacagattcttaagataaacacaaagggttacttatcatcattatttgaaatctggatcttggacattgtgtctctgggctatactgcaggtgatattaaagcccagataaagagtagatagtgcttgtttgcaacatggaaggggcaaaaattccttcctaggtccctccatgactgtatggatttggggagtaaatggcttactttcctctgaatgcccctgttaacaagtgagcacaggtttcttttatgttggtaagaaaagcatggctagcaatgtaactctgtttccatcttggctgtctctctcaaggatgaggaagactcctttgtgatgaaagccatcatccatgccatcaacgatgacaatgtcccaggcctgcagcaccttctgggctcattatccaactatgatgttaaccaacccaacaaggtctggttctgttctgccgcatactggaggggtgggtcacagcgaccttgcccttccatatccaaggaaagaccccatctgcttctccattctcccttccaattggaagctccatactgtggggaaaatcacttctgtttagaaagtgatttgagttacaaataaggtctttgtgcattgagggccttccttcattcacgtattgtatctctacccatgaaattttagatcttctcatcctgctaatgaaaatgtccctgatgatgagaatccaaaaggggaaggaaaggttttatacccttccacctgtcttctcttcctgccacgcagtggtagctctatgtctgttgagacaggggaaggtgtgtggtaacagcaatcatcgtttgggcttttcctttcctaccaaacctgaaaattagtaatttttttcttgcctattctagcacgggacacctccattactcattgctgctggctgtgggaatattcaaatactacagttgctcattaaaagaggctcgagaatcgatgtccaggataaggtcataattgttttattgaaatgaattgaattttaaagtattttcaagtgtctcttaatcataggggtaacagaggaaaaaaatttatgtcctaacttgtttctcagtttcctgtaaaggaagatgagctgcttttaaacagcttggtacagcctgacacatgggttaaagaggcaaacatttatcatttatcctccccttggcgctgctgcttgacatcagcatttctttgtacactacccagattttacttcttaccgatcacatttactcaacaatgttagatgtcacacatgaaaaagttttgttatctaattattctcatcagaaatttgtttgcctgcttctgcagacgtcagcagagctgtaagtggagtagatctggccctctgcagtaagggaatcctaaccagagaggggagatgagggtttacaaacataaaataattgtttataagcaattgt

SEQ ID NO: 42156 - DNA, 2300 bp, Homo sapien
gtgagctctaagcccccggtagaaacattcagctgttccaatgaacttcttgtgatcctgaaatctgcaaagttagaaccaaggcagacgtaggtactccagttacctaacaccacagaaatattgtttttatttcataaaataataaatttaaatactgctatggtttccttgtttgccccctccaaaactcttgttggaacttatctccaatgtggcagcattaaaatgtggggcctttaagaggtgattaggacatatgagctcttccctaatgaatacattaatctattcatggaataatgggttcatagaccaacaggttatcttgggaatgggactgatggctttttttttttttttttttttttttgagatggagtctcgctctgtcacccaggttggagtgcagtggcgtgatctcggctcggctcattgcaacctccacctcccaggttcaagtgattctcccgcctcagcctcccaagtacctgggattacaggtgtgcaccaccacgcctggctaatttttgtattttagtagagacaggatttcaccctgttggccaagctggtctcaaactcctgacctcaagtgatctgactgcctcggcctcccaaagtgctgggattacaggtgtgggccactgcgcccaggcaggactgatggctttaaaagaagaggaagagacctgagctaggacactcagccctctcgccctgtgatgccctacaccaccttgggcctctgcaaagaatccccacaagcaagaaggccctcacaagatacacttcctggacctcagacttcccagcctcgaaaactgtaagaaataaatgttgttctcataaattacacagttccaggtattctgttattagcaacagaaaagagactaggacagatatcacagttagattgtattctacacattgtgactggttctccagagaagcaatgcataaaaagaggaataatcggccgggcacggtggctcacacctgtaattccagcactctgggaggccaaggcaggcgaatcacgaggtcaggagttcaagaccagtctggtcaatatggtgaaaccccatctctactaaaaatacaaaaattagccaggcgtggtggtgcgcgcctgtagtcccagctcctctggaggctgaggcagaggaatcacttgaacccaggaggcagacattgcagtgagctgcgattgcgccactgcactccagcctgaacaacagagccagactccgtctcaaaaaaaaaaaaagaggaataatctccaaaatagtaaacaaattcctgcagacaggaaatataatggtagatacctgagctaggagagggggaatggggaactattattcaatggatacagtttcagtttaggaagataaacaagctctgggaataaacagtagtaatggttacacaatgtgaaggtacttaatgctactgaactcaaagttggttaaaatggtacttgctatgtgaggtatattttaccacttaaaaaactataggtgattgtgcttctaaaagagttatcagtttaatcttcaatagaaatcaatggactttgttcatttttaacaaagtcaaaatatgcatacgaaaaggttatggggtaaaggcagaggtaattatttttttccccgaaaggtattttctacaatgaatgtttttatgtaataaaaaatgaaatgacaaaagtttagaatgtttgtgggttttgttccttaaatccttaattacataaattaatatctacattatacagattaagatacatatttttcctctatctacaacatttctccattctctgtatcttaaatcctgacattaaatgtcattaaatttcttaaatctcaagagaacgacttggttaccaaggaagatataatccatagcctagagagtgggcgaataaaagcagcttctaatgttctcaactgcttttctcctgtcaaccaaatgtttctgtaaataactcatttctgttggttttgggtaagacgtgggagaaggaagaatccctgaatggaggagtctggaaaggatgcttgacaaaacgcccgcgctctctggagacgcagccagtctcctccctcctagggtctggtcttgacgatagcatctcgtgttttggggatgcctttccttaccagattcttctaaagcccagctgcacccacccttaagtgggagataaggcttctgcccgcgggctctgcgttcgtccacccggccccacgtttgctgtggactaaacaggagccactggactagagtac

SEQ ID NO: 42157 - DNA, 2300 bp, Homo sapien
acaggatttcaccctgttggccaagctggtctcaaactcctgacctcaagtgatctgactgcctcggcctcccaaagtgctgggattacaggtgtgggccactgcgcccaggcaggactgatggctttaaaagaagaggaagagacctgagctaggacactcagccctctcgccctgtgatgccctacaccaccttgggcctctgcaaagaatccccacaagcaagaaggccctcacaagatacacttcctggacctcagacttcccagcctcgaaaactgtaagaaataaatgttgttctcataaattacacagttccaggtattctgttattagcaacagaaaagagactaggacagatatcacagttagattgtattctacacattgtgactggttctccagagaagcaatgcataaaaagaggaataatcggccgggcacggtggctcacacctgtaattccagcactctgggaggccaaggcaggcgaatcacgaggtcaggagttcaagaccagtctggtcaatatggtgaaaccccatctctactaaaaatacaaaaattagccaggcgtggtggtgcgcgcctgtagtcccagctcctctggaggctgaggcagaggaatcacttgaacccaggaggcagacattgcagtgagctgcgattgcgccactgcactccagcctgaacaacagagccagactccgtctcaaaaaaaaaaaaagaggaataatctccaaaatagtaaacaaattcctgcagacaggaaatataatggtagatacctgagctaggagagggggaatggggaactattattcaatggatacagtttcagtttaggaagataaacaagctctgggaataaacagtagtaatggttacacaatgtgaaggtacttaatgctactgaactcaaagttggttaaaatggtacttgctatgtgaggtatattttaccacttaaaaaactataggtgattgtgcttctaaaagagttatcagtttaatcttcaatagaaatcaatggactttgttcatttttaacaaagtcaaaatatgcatacgaaaaggttatggggtaaaggcagaggtaattatttttttccccgaaaggtattttctacaatgaatgtttttatgtaataaaaaatgaaatgacaaaagtttagaatgtttgtgggttttgttccttaaatccttaattacataaattaatatctacattatacagattaagatacatatttttcctctatctacaacatttctccattctctgtatcttaaatcctgacattaaatgtcattaaatttcttaaatctcaagagaacgacttggttaccaaggaagatataatccatagcctagagagtgggcgaataaaagcagcttctaatgttctcaactgcttttctcctgtcaaccaaatgtttctgtaaataactcatttctgttggttttgggtaagacgtgggagaaggaagaatccctgaatggaggagtctggaaaggatgcttgacaaaacgcccgcgctctctggagacgcagccagtctcctccctcctagggtctggtcttgacgatagcatctcgtgttttggggatgcctttccttaccagattcttctaaagcccagctgcacccacccttaagtgggagataaggcttctgcccgcgggctctgcgttcgtccacccggccccacgtttgctgtggactaaacaggagccactggactagagtacacttgactctcggctctgcggaccaaaaattccaggactaaggaatagcaaggttaggctgaaacagtccacacagggcttgcggtaaacgtcttttcaggagccactcgcccagtgcagtaagtcgtgtacttagttgactcgagcgctccagggagacgcccgaccctactctgcgccgccccggggcaccagctctgcttcctccaggtccactgaggcaggcacgcccagctctgggacagtcagtaaacaagccacgaaccgcgccagggatcagagcacccagagtccccgcccagctgccggcacagccaatcgcagcgcagccaggcggcggggcggtgccggccgaacccagacccgaggttttagaagcagagtcaggcgaagctgggccagaaccgcgacctccgcaaccttgagcggcatccgtggagtgcgcctgcgcagctacgaccgcagcaggaaagcgccgccggccaggcccagctgtggccggacagggactggaagagaggacgcggtcgagtaggtgtgcaccag

SEQ ID NO: 42158 - DNA, 2300 bp, Homo sapien
tatgtaataaaaaatgaaatgacaaaagtttagaatgtttgtgggttttgttccttaaatccttaattacataaattaatatctacattatacagattaagatacatatttttcctctatctacaacatttctccattctctgtatcttaaatcctgacattaaatgtcattaaatttcttaaatctcaagagaacgacttggttaccaaggaagatataatccatagcctagagagtgggcgaataaaagcagcttctaatgttctcaactgcttttctcctgtcaaccaaatgtttctgtaaataactcatttctgttggttttgggtaagacgtgggagaaggaagaatccctgaatggaggagtctggaaaggatgcttgacaaaacgcccgcgctctctggagacgcagccagtctcctccctcctagggtctggtcttgacgatagcatctcgtgttttggggatgcctttccttaccagattcttctaaagcccagctgcacccacccttaagtgggagataaggcttctgcccgcgggctctgcgttcgtccacccggccccacgtttgctgtggactaaacaggagccactggactagagtacacttgactctcggctctgcggaccaaaaattccaggactaaggaatagcaaggttaggctgaaacagtccacacagggcttgcggtaaacgtcttttcaggagccactcgcccagtgcagtaagtcgtgtacttagttgactcgagcgctccagggagacgcccgaccctactctgcgccgccccggggcaccagctctgcttcctccaggtccactgaggcaggcacgcccagctctgggacagtcagtaaacaagccacgaaccgcgccagggatcagagcacccagagtccccgcccagctgccggcacagccaatcgcagcgcagccaggcggcggggcggtgccggccgaacccagacccgaggttttagaagcagagtcaggcgaagctgggccagaaccgcgacctccgcaaccttgagcggcatccgtggagtgcgcctgcgcagctacgaccgcagcaggaaagcgccgccggccaggcccagctgtggccggacagggactggaagagaggacgcggtcgagtaggtgtgcaccagccctggcaacgagagcgtctaccccgaactctgctggccttgaggtggggaagccggggagggcagttgaggaccccgcggaggcgcgtgactggttgagcgggcaggccagcctccgagccgggtggacacaggtaccgcagccaggccgcgccgcgccgactcagggcctggcccggccagacagggaagctcagtccccgcacgccagacagcggtactcctgctggcgtcaccgcaaacatcctctgaccgctacagccagtgtgtggcgcaggcgtcatgtccccggccctgccacgcctggagccctggaagctggctgcagggcgctggcttcccgcgtgcggccatatgaccccgtccctgatttaggggagcagtttggggtgtcggcagcacaggcccaagtgaatgaaggagggagcagtgcgtgctctccttcccagtttttcctgggaaagcatttcagaaaggtttcatttaaggagaggttggggcggcgcggtggctcactcctgtaatcccagcactttgggaggctgaggtgggcggatcacctgaggtcagtagttcgagaccagcctggccaacatggtgaaaccccgtctctactgaaaatacaaaattagacgggcgaggcggcgcacgcctgtagttccagctattcaagaggctgaggaagaatggcttgaacccgggaggcagaggttgctgtgagccgatatcgcgccgttgaactccagcctgggccacagagcaagactccatctcaaaaaataaataaataaataaataaataaataaataaataaataggagagattggaaaacttatctcagcttttggtgtttgttagtcaggaagatgtgtgaaggcctcctaactcttggggatctctttgtccctacttgggaatcccaccttatcattagtgaggttttgcctgggcacgaaacctggattttttgcgattggtacaaaacctggatcaaccgtttcccggtttcctagttgttgccttaagcttctcacacacaaggtagtttcataccgttctcataacctaaattgtcatcgcataaactgtttcagctcctacagctctggacaggctgcttttcattttggtgagtccatc

SEQ ID NO: 42159 - DNA, 2300 bp, Homo sapien
ttacttaatgaaagacttgaaggaaggaagaatccccgaatggaggagactggaaaggacgcacgacaaacgcccgcggtctctggagaccgagccagtcccctccctccccagggtctggtcttgaccattgcatgcgtgttttgggggtgcctttctctaccagattctactaaagctcagctgcacacacccttaaatgggagagaaggcttctgctcgcgggccctgcattcttccacccggccccacctttctgtggactaaacaggaaccactggactatagtaaatctcagccctgcaggagattttagtaaagaactaggactaaagaaaagcagggttgggctgataatgcacacagggctagctttaaatttcttttcatgaatcactctcccagcgcattaagtcgggtgctttgttgatccagaccctagagggagacttccgaccctccactcggcagcccctggatggcgcagctccacctccccgcccccaactcctgcctcgggtcctctaggcaggcgcgccgggtcctgcgacaggttgggactgagctgcatggtgctgcgtcccagtgccctgaggctacgcccagaggcggctcagccaatcacagtgcgggcaggcggtggggacagagccgcctgggtggcatcctggtgggggactttagaggtcaaactggcaaccttgaggcggccgcagaggactgaagacccctggaccctgcacttgccgactgtgcctgtacagacgggacgggggccaccccggtgcccggcgagtacctccgctctgtgagtgggggcatttctggggtgctgagctatggtattcctagggctggttgggcaggacagggaagctcgacccctgcaagtcaggtggagatgtcccttgctccttgcaccaccgcacatgccccgtggccacagtgagcctgagcagagggtgggggcaagcagcatgggacctggcctgggagctcagccaggagccctggttttggagaggcagatgaggtgttggcagtactggcgacatgtagggctgcgggagcagtgtgtgctctccttcccactgtctcctgggaaggcattccagaaaggtttcctgcaagaaggggagactggaaaacatagctcacctcctgctgtgtactagccaaaaacaaggtgtgaagtgacctcccaattattggggatccctttgtccctacttgggattagaagtctccattggtgaggttttgcctggatggcctcagtacaatttgtacaaaacctagatcagttagtttcctagctgttgccttaaccttctcacacacgaggtaccttcatatttttcataacctaaattatcatcgcataaactgtttcagctcctacagctctggacaggctgcttttcattttggtgagtccatccaatacctccacttgccctgttttcctccaaccagatccttggcctctttcaccgtccttaggtaaatgcatgggaaaataatttaaatatttttattctactatggtggccaaagtttctcaggtagcagtaagatggctttttaggattggtctaatcagatcctcatttcttttcccttcctaggttttgaaacatgaatccttcactcctccttgctgtcttttgcctgagattagcctcagctagtctaacacttgatcacagtttagatcagtggaaggcaaagcacaagagattatatggcatggttggtggcacctgaaaccatccagagggattcctgggagaatggtccttggtgtttggagattatagccaaagagtagctactagaggccagctcttaccaataacctaatgcaataacctaatggcaccaattatgagtacgatgtgggcataggctcctgttgtttcttgacttggagaacatctcccagaggcgtcaagccttctctggccatggtttctttttcacttttgtctgcagattcactcggtgagcatgggttgggttttagttagaaataaagagcatcaattacatatttgcctctagaatgaagaaggatggaggagagcagtgtggcagaacatgaagatgattgagcagcacaatcaggaatacagggaagggaaacacagcttcacaatggccatgaacgcctttggagaaatggtgagtgtgctgtggactgccgagctctgtgcttcctctcctcggttctttattaaagtaatctcttgcttttcaacattttatttccttttccttgaagaccagtgaagaattca

SEQ ID NO: 42160 - DNA, 2300 bp, Homo sapien
taaggcagtccccaactgtaccaagcaaaggacaatatgtacaaagtcagagcttcattaactcttgatgattgattcattcacttacttaatgcaagacttcaggggaagaagaatcgctgagtggaggagactggaaacaatgcattatgaagcgcccatggtctctggatacccacccagccagtccccaccctcctagggtctggtcttgaccatctcatcatgtgttttgagggtgcgttttcctaccagttgtattttgtttgctgttttttgttttgttttgtttttgagacagggtctcctctcgcccaggctggagtgcagtggtgcgatctcggctcactatagcctcgatcttccgggttcaagggatgctcgtgcctcagcctcccgactagctgggaccacaggcgcaggccaccgcactcggctaatttttgtatttttagtagagacggggtttcgccagggtgcccacgctggtctcgaactactgggctcaagtgatctgcctgcctcagcctcccaaagtgctaggattacaggcatgagccaccagcaacatgcccagattcttctatacccttaattgggagataaggcttctgcctgcgggctgtgagttcttccaaccggccccttctttgctgtggactaaacaggaaccactgggctagagtcctctggctctcggccctgcaggagattttaataaacaattctaggcctaaaggaaaagcagggttaggctgaaaatgcacacagggctcctgtaaacttcttttcatgaaccaccggcccagggcattaaataaggtacttagttgatccgaaccctccagggagacctccgacccttctcttcgtagcccccagctcccctccccccggttccactgaggcaagtggactgagccgctccacaggctaggagtcagcccgccggaaggtcccgcccagccttaagaagtcaattagctgctttcgggcggccttaggcgacgggagactcctggactcggcacctgcccactgtgcctgtccacctgtggctactgcagctgagaccccagtgggctgagattggacaggggccaccagggacccagcaagtccttcagctcggtgagtgagggattttcaggagtgccaggccgcagtattcccagggctggtggggtgggacagggaggctcgacccgggcaaatcaggcagaggcgccgcttgctccctgcaccaccacccacctcctggggccacagtgagcatgagcggggggtggaagcaagaggcaggggacctggcctgggtccccagcccaaagcctgggaagctgcctacccctgtgtgggcgcggacactggggactctggcttctggcggttcggccacctgattgggtttatgctctatgaggggagttggagtgttggcaggactggcccctgcaggactgcaggactgcgggagcggcggtagataggtgctctccttcccagtttctcctgggaagacattcaagaactgtttccgttacaaggggtgtttggaaaacatacttcaccttctgctatgcattagccaagaacaaagtgtgaagtgacttcccaattattggggatccctttgtcccttcttgaaattagatgtcttcattagtgaggttttgcctggatgacctcagcacaattggtacaaaacctgggccaacggtttcctagtttcctggttgttgcctttaacttctcgcccataaggtaccttcctatccttttcatagcctaaattatcatcccataaaactgtttcagctcctacagctctggacaggctgcttttcattttggtgagtccatccaatacttccacttgccttgtttttctccaaccagatccttggcctcttccacagtccttaggtaaatgcatgggagaataatttaaatatttttattctatcatggtggccctagtttctcagggggcagtaagatgactttttcggattagtctaatcagatcctcatttcttttcccttcccagatttttgaaacatgaacccttcactcttcctggctgcctattgcctcagctgctgtaacacgtgaccacagtttagatgaacaatggaccaagtggaaggcaaagcacaagagattatatggcatggttggtggcatctgaaactgtccaggggaaccccagagagatggaccttgctattgggatcatacggccagaaagtagcttctagatgccagctcttaccaataacctaatgcaataacttaa

SEQ ID NO: 42161 - DNA, 2300 bp, Homo sapien
cagcttgacaagaaatgcttaagggaatgcttcaatcacaagtgaaagaacaataactactagtgcaaaaacacaggacactatcaaccagttaaaagtaaattcacattcaaatggagaattctacgttactgaaatgatagttcttaataaatacccaatacagaacaatataaattgagacaaaaaagtgcaaattttgtgcattgacaggggatgtggggggagtacagcatgtttgtgtgtgatcaaaactttttatcagctttaaatagtctatcataactacaaattttttaatgtgagctacagtgtaacccaagagaaaaaaattacaccagatgtgtcaatgaaataaaggaatcaaagcttatcagtacagaaactcaccaaaccataaaggaaacaataagagaagaaacaaaagatctacaaaacaaccagaaaacaattaacaaaatgacagaagtaacttcttgccttttaataatatatttgaatatagatggtttcaattctccaataaaaagatgtagagtggccgaatggtttttcatacctgtttccctagtccagacacccaagagtatgtcctcctcttgggcataagcaaatctagagttatatttagggtatcataaagtgtggtgaagagtggaccgagctggcatgctcacaacaaccaaattacgttggtcatattttaatccagtacattgatccactattaacttgtaaataatgtacttgctttctagaccattctaggaagaccagagaaacagacttttatctatatggtataatccactggcgaatttcttttaggatagaccagagctgatctagaacataatcgttacatatttggacgagtcgagagagaacccaccagacgagaaagaacatctgggctgaaaggctccattagaagagcaatgtggaatgatgctgtgctggcaactggtagtccctgccctacatctttgcagaggactggagcccagagtgggccatggtcaacttatatgttgaagtgaagacctccttctaggtgtgcatgtgcttattacagatatgccaccatgctaagtacccccgggctacaggaaaaaataagaatacacgctgtatccatgatcaggaggcacacaggccagagcaccagctgtggaatcgcacaacctgggttcaaagcctggctggaccatgaccacctggatgacctaaggaacggtctcaggcaaatttgtaagaagaagtggagaccctgcctgccaggaagggatgtggtaaggggcagcatccagtcaggtcagggtaccgcgtcctctccttggaagcctgcacagcgagcctcgtggcccttaaggccacggcagccatggagaaagtgggcctggctccaggtggcatagaggcactggagaggcccccggggagcctggcgggatctggctggtcctgcgctctgcttccaggttctggccctgtaacccaggggagagggctggccaagacagggccactgggtgtcagccagcacctgggccagatgccaggcgggaagggctctggcagatcagccccacaccctccacagcatcacaggggggccatccagggccacacacctgcccccaggagtgggacgtccctgaggctagagagtccagctggaccggtggaggggccttgccttttgccctttgactcctcttgtaggcaccctcgctgggctcccgctcactcctccacaccctggctctgtcaccagccccaaggtgatgttataaattcccaggtgcccagtggacacctggccacggagaagtgggtgacttaggagtatcctctccacttctgacccttggtttcgtctgtgcacaactcgctcgaaatgggcaactcactaagcatattttgttcctggttccgccgcaggtctcaaccacgccatcggcaacctgctcttctaagcgtatgttgttactgcttccaccgcatgacccagcaacaccaccggcaatgttctcgtctaagcatatgttgtccctgcttccgcagcaggtcccggccacaccatcggcgacattctcttctaagcgtatttcgtccccggttccgccgcaggtgccggctatgccatcggcgacttactcttctaagcgtattttgttcctggttccgccgcaggttccggccacgcgattggcaacgtgctcttctaagcgtattttgttcctggttccaccacaggtccccgccataccatcagcaacctgctcgtcttgtccgtg

SEQ ID NO: 42162 - DNA, 2300 bp, Homo sapien
gtctccacaaggggcatccagggaccaactttgagaacctgcccttgttcccctggcttttggggaaacatcctccagccatcccggaggatagggcaggatgaagtgccagcagcagcagagaagagactgcattaggagtaactgctcccccaccaccaggttagagcaaaagcgggcccagcttcaaagccaggatctaaggggaggaggatggctacagatagggtactgcctgatgatgagggggttgatagggtaactatggggaccagccagaggaagtgctttccctgacaagggcaggtgcaagtcccctggcagtggcacagaatgctcttatgaagtcctggctgagcccctactatcaggggctcctggcagcccagtgcccaacacaggtgtttttcttgcccttctactccatccccccaccctcctactgctggacttgtagggatcagaagccaaggtcggtgggtgtggctggttagaagagatccaggccccaggtgttaatcggggaggcttcagtgacaggtctctgggagagatcccatatgaggtctctgtgtgttctgaggtgagttctgtggggaactctctggaagtctgtagagctctgggccaggcttctgtgaggaggtctatgggtctgtgctcaggtggtggtgtgggaggtcactgtgtgagcacctggtgaccatgtgtggtccctgtgggaggtcactgcctggtgtctctgtgcaaggtgtctggggaggtctctgtgcaagttctgtgagggaggtctctcgtgtgaggactccctgtgtggtctctgagggagtctgtgaggtttctggagggtccaggaggctgcgtgatgtcttcctaagagagctctgggagatgcctgggtggtgctgagagacgcgctctccgtgggaggtctctgcatgaaagaccttgtgctcatctccaggtctcctggaagtccttggggagctctcagtgctaagtctccgagttccctcttggtttgagtctcagtcagaggtctctcgatgtgagtctctgtggaggcctctctcacaggtctctgtgtaggtctctcagggtctctttgggattctctgtggaggtggctgcatgggtctctgggagatctctgtgggggtctctataagtccctaagggtctctctcaagtctctgtagcacctctctcaaaagtctctacaggtctctgggagtcactgtgtggatttctgtgggggaatctctgtatgggtctctgggggttctccatgtggatctctgtggagatctgtgtgggggtcactagtggatctctgtgtgagtttctgggcatctctgtgtgggtctctcccgaaggtctctgtgtgaatttctgtggggtctctgtggaggtttttgtgtgggtctccatggggatctctgtggaggtctctgtgggtctctggggctccctgtgtgggtctctgggtatctctttggggtctctgtgtaggtctttggagggattgctgtgggggtctctgttgtgggtctctctcaaaggtctccaaccctaatagggccttgcctggaaaagaaaatgcctaggttcacagaaactcaaggttctttgatgctgcttgaacctgaacagacgttttatccaaaatagctcctgctctccagagatctgccatatcataaaagagttagacataacagtagatgactctgccaccaagcccatgccactaagtgatttaacagaagttacaaagggaaatggaatgatgcacttgtggaaatttactctagggttctctgaaattctccacaaggacgtttttagggaactaaactttgaatcaaggtgctgaatgtatgtgttcctcctaaattgttgtattgaaatcctaacccccaaggtgatggtattagaagatgcggcctttgggaagtgattagggcatgagggtggagtccacacgaacgggattagtgcccttctgaaagaagcccaagggagctcagttgtttcttcttcaacacaaggacacagagaaaagtcagtcatgtatgaaccagaaagcagacccccaccagacaccaaatctgctggtgtctccatcctggacctctcggtctccacatgtgagaaatacatttctgttgtttataagtcaccctgttgaatccatccctacaaacgttataaaattaattagggaggaggggagagggagaaatgaaaataagctaagcttgcagcacgttcagcgtaaaccatgagggcagctgctc

SEQ ID NO: 42163 - DNA, 2300 bp, Homo sapien
caaaagcccccagggttctgttgtgggcaccacagtgtctggaagtgtgtgtggttggcggggcggggggggggtttgtcaaggaagggccttgaggctcatttcccctgcagcagcaggagcaaggggctggcactgggaagcctcgccctcgttgcagcaggcaggtgggtggatggttggatgaacagcataaccctgcagtgaagtctgtggagggaacagaggtgcatggatggagacatgcacacagcccaccagagactgggaacccccacacccacatggtcctctcatttatccagaaaggcgaacatcaggtttgaggaggaatggaacctaaaacaaatcttttccctaaatgtggagctgatgcgaccagttgtctctgctctccagttcctgtttctcacacagagcgcacctactgacctggcagtggcttgttgggaggcgattccttgcatgcccaagcccaattgcataggtcaagatgagacccacttctcaggcttcagttccctgcaaatgaagtagaacttaggacccccatacttcccagtgatcctagcaggcgtcactggggtctccactcttgccagttaacccagttgaccacattagggactgtcatgcctccccagtgacaatctcataaaggaggaagagactgtagacagataaaagcagcagtagatgaagcagatatgctcttgaagatgcatgttcatgagaacagacccaaatagactcagatggtctcactcccattgaggctatatagaacgcatgacaaagatatacatgattttcaaggccacttttcaagtattaaataaatgtatcacatagtgattaaaaagtgcaatctctaatcctgagtttctgctgcccaaaagatgtctaatagtataatgagaacatttcctccagggctcaaagtatgctccctatcaggtacaggccagacatgaggccccagtggtctggagcaggcaggaggtgaaaaacaggacacactgtggagcagagaatacaaatgggaggccgaggcgggcggatcacaagctcaggagttcaggaccagcctggccactatggtgaaacctggtctctactaaagatacaaaaattagctgggcatggtggcacacttctgtagtcccagctacttgggaggctgaggcaggagaatcgcttgaacccaggaggcagaggttgcagtgagccgagatcatgccactgcactccagcctgggcaacagagtgagactccgtttcaaaaaaaaaaaaaaaaagaatatgtacggaggacacgagtgatctcagaagagtctgctgaacactggacttgagcctggcacggaatgcccagtcccgctctccacccaaaggagctggacctcagatcaccccaaaccactcctggctcatggtggagcacacatgttccaaaacttaggaaagtgaggactgtatttggggcagagaaagaaaaaatggatcaggacaacatatgaaagatctaaagaaaataagtaaaggcttaattattgttttgaaaataatttgtcaaagtgtttgaggtttttttacagcaagctccataattcggtaactcaaaattatgttcctaatataaaaatgtcatttggaggtttaattatttgtaatttttatactttttagttttgtaaatttaagagttctattctgggttgatgaaagtagaaaatgtaaggtgtgggaaaattacaaaaacagaggagattctgaaataatccttaagaaaccacctaaattcctaggagaatttcacagtttcaaaggctatgaaatgggtgggctcaggcctagatctccaaggtacaaggagagccaggtgacacctgtgttccaggggaagagaatagaaaatggactgaggactgtctctgacagggtgagcagctggagtgggaaggagcgatttgggggacccaggagggtggagggactgggggctgggagctgagggcggggctgtgcttcagcctcctcctcccactgcccctcccccacccccaggagccctttgtgaggaggaggccccagctgtgtgatacaagcctgggccccagtccctagtcccaaaggggatgcccagagctcagttgcttgaaggcgatgggaaatctcgtcatccctctagggaagggcagggcaggcagggttgagagtgggcagaggattccacccccagctcccagaccatctgtggagtgcacaggagacgacattgcacttcagatggagaaaat

SEQ ID NO: 42164 - DNA, 2300 bp, Homo sapien
agtgcaatatcaattcaatagtacagtggttctggagcagttagatatcatagacaaaacaataacctcaatctaacctcatgtctttattaaaaaaaaaaaggatcagccgggcgtggtggctcatgcctgtaatcccagcactttgggaggctgaggcgggaggatcacgaggtcaggagatcgagaccaccctggctaacaaggtgaaaccccgtctctgctaaaaatacaaaaaaattaaccgggcatggtggcaggtgcctgtagtcccagctactcgggaggctgaggcaggagaatggcgtgaacccgggaggcggagcttgcagtgagccgagatggcaccactgcacttccagcctgggcgacagagcgagactccatctcaaaaaaaaaaaaaaatcacatatctcaatgtaaaaatatgaaatttaatgagaaattcttcaggtcctaggacttgatgaataattattagacatgacaccagaaaagcacaatcaattctaagaatttattaattggatgttatcaaaatttaaaacttttgccctgcataagagcctgttaataaaaagacagggtaaaaactggaagaaaagtgcaaaccacacctgataaaccatatctgacaaggagctcatatctagaatattgtttaaagttttcaaaagtcaacaacgacaacaagaaaaaacaagccaattagaaaatgggctaaaggcacgaaccgatatttcactgaacaggatagattgatggaaaatgagaaaataaaaaaacttttatcagaggaatgccagtccttttaaattatcaagcccagagagacattaaaataagacagcaggcccggcacggtggctcacgcctgtaatcccagcactttgggaggccaaggcgggcggatcacaaggtcaggagatcgagaccatcctggccaacacggtgaaacccagtctctaccaaaaatacaaaaaattagccgggcgtggtagcacatgcctgtagtcccagctactcgggaggctgaggcaggagaatggcatgaacccaggaggcacaggttgccgtgagccaagagcgtgccactgcactccagcctgggcaacagagtgagactccatctcaaaaagaaaggaaaactgcaggtcctgcacatgtaccccggaacttaaaataaaattacataagtacataaatagaattttaaaaaaatcttaattgtatgtgggtaggtccctttgattcaaagtgagatagaaggatgggcgcagtggctcatgcctgtaatcccagcactttgggaggcagaggcgggcagatcacaaggtcaggagatcgaggccatcctggctaacacggtgaaaccccgtctctactaaaaatacaaaaagaaattagtagggcgtggtggtggtgggcgcctgtagtcccagctactcaggaggctgagacaggagaatggctggaacccgggaggcggagcttgcagtgagccaagatcacgccactgcactccagcctgggcgacagagagggactccgtctcaaaaaaataaaaaaaataaaaaaaaaggaaagtgagatagaaataattttttaaaacttactattcaaaatttgcaaaactaaataagagtaaaagaaatttacattttgtccctggattcacagaagacaaaaacattgtgtgggaaagctggagttgaggacgaacgagattctgaaaataaaaatccctggtacataagccaaaatttcagagtcaactacagattttcaaaggctatgaaataggtaacctcaagccaccgactccaatagataaaaggaaccaggtaatatctgtgttccagggagaaagaatagaaaactggctgagttctatcactgacaaaacttagtgcgaaggagggatctggaaggcgggagggtgaagggatccccggcttggagggtggggaggggctgtgcttcggcctccccctcctactgcccctccccaacaaaggagccctttgtgatgtgaagccccagctctgtgatgcgggcctgggccccagtccctagtctccacgaggatgcccagagctcagttgctagaaagcaatgcgcctattcacatggagaatcttccctttcctctaaaattacttagtgcctcatcactaaacacccccagctccacaccatgggtgttggatatcttcctcaccttggtgtttgccctggggctcttcttcctattactcccctacttctcttacctccgttgtgacaacccaccctcacca

SEQ ID NO: 42165 - DNA, 2300 bp, Homo sapien
actgctcctcactcaccgtacctgcctcatttgtctttattcttcatgttggagctaaagtataactttcttaggtgactttctccatggaacctactattataactcactgtccttgttaaactccacataacaccctgtttttcctttatagaacctactgcatattgtgattatatgtatatttgtgattactaatttgtttctttctccttccttaccacaaatcttaagacaaaaattagccttttaaggccaggcataatggttcatgcccgtaatcccagcactttgggaggctgaggcgtgccgattatgaggccaggagatcgagaccatcctggctaacgcggtgaaaccccgtctctactaaaaatacaaaaacattggccgggtgtggtggcaggcacctgtagtcccagctactcaggaggccgaggcaggaaaatggcgtgaacccaggaggcagagcttccagtgagtcgagaccgtgccactgcactccaacctgggcgacagagcgagagtccgtctaaaaaaaattaaattaaattaaaattttttaaaaatgaagaaacaaccagagaatggaagcaagtatttgcaaactatgcatcagacaacggattcatccacaaaatatataaagaattcaaactactcaaaagaaaaaatacaaacgatcttattaaaaaaatctacccaaaacctttgtcccccaccattatttccctacaccttcttttcccgaccacctttgaccccctccctctggccaccctttttcttcctccatctgcccccaaacttcttcaccatttttctccaccatcatttcacaaagccttctctactctcctgctcaacacccttttccccatccaccgacccaaaccctttccccactgtttcttcccaccgtcttttcctcttatccctggccaccctctttttacccctcccgcatcacactcttttgctccttcatctaagcaaaaacattttcccccgccttttcccaaaaccttctccccactcctgctgctcaccaccgtcttttcccccttcatccacccaaaaactgtgttcttcatcgtctttccccccgttcctccttgccatttctctttcccttctccatctacccaaaaacatttcccccatcttttcacaaagccttctccccactgctgctcatcttcctctttcccccctccatccaccccccaaaactttccccaccatcttttcaaagtctcccccctttaccactcgtgctcttctttccccaatcctgcttgccatcctcttttttgtcctgtatctaccccaaactattttcccgtcgttttcccaaccctctaatccctgctccctctccccaccctctttcctcctcctcgtcactctctcccccctccatctatcgaaacactttttacccaccggctttctgcaaaaccttccctccctcccgctccccaccctgtttttccgcctccatgtacccaaaaacttttttccccaccatcttttcgccgccatctttttgcaaccccttctcctgctaagctatcctttttttccctttggcattaactaccctctttacccccctacaactatcccaaaactgttttccttcttctacctctccagccgcgccatctccatcgctgccaacaaccgcagcgacgcaagccacgctcccgcgtctccagcctccagcatatggccagtgactcccgattcctagtcctctacgccgggatgcgaccacctcgacacgtcagtacgggaacctgaaaagaccagatttcttttcagcatcatttatatactgccgttatgcccacggaggatcctggactgcatgtattgattggatgagaaaaaaacctccaggcttactctgattggacttcatgatcatgttctgattggatgagagcaagtcttaacaaccaaccacagcatgaaaataaagtccaatcaaagtaggcctagaggttttttctctcatccaatcagaacgtgtagtccaggaaccgcttttgcataacttcagtagataaagcatgctgaggtcatgtcaggtcatttcaagctcttctgtgtcgagctaaggagctgctctgtgcccggcttacagaactggaaggggtagccaccttccgcctgatggaggctggagaacggatggaacctggatccctggagcctgggacactacctcgctgcggttggtggtggccacagaccagtaggagggcggctggcagcgggagcttcttctgccg

SEQ ID NO: 42166 - DNA, 2300 bp, Homo sapien
tatcttttgatgaatagatattcttagcattgatgaaggccaatttctcatttttgtttttcttttagtgtattctgtaacctaaggatcttgaattaatccaaagccattaagatataattttcttctaaaagcttcattatttaccttttatatttagattgcagtccatctggaatcaattttgtgaatggtgtgagactggggtcaatatacattattttccccttatgacttctcaaatgacccagcactatttgtgaagaccatcctttccctactgtatctttttttttttgtttgttttttttgagaccaagttttgctctgtcgcccagggtggagtgccttggcacaatctcggctcactgcaacctccgcctcctccattcaaacgattctcccgcgtcggcctcctgagtagctgggactacaggccgagtgccaccatgcccggctaatttttgtatttttcgtacaggcagggagtttcgccatgttggccaggctggtctcaaactcctgatctcaagtgatccgtaggactcggcctcccaaagtgctgggattacaggcctgagccaccatgcccagcctatcttcgccagttttaatgctaaaaactattccattctatggcactcccttaacttaacttagccatttttccatctgggtatttgggttgttttcagatctctgctatcatcaaacaggaggaatactttgtatggacatcaagtcattcttctgcaattattaacccagaagtgaaatttctaagctagaaaatatttgcttttttggaaaattaataaattatattcaaaactcaaataatgtaaagagacccagtgaaaagtctgcctcctattctgtccccctgtcctcccagtccctcttccaccaggtaaccacactcaggaaatcttgtgtatctttccagatatcttgtaatggatgtacaagcattatttatattcttttctccttttgtttacacagccagtggtactctatgcattctgtcctgcatcttgcctttttcatttaacaacctattttagaaatcttcccattgctgtacataaaaagatttaatacctcatttgaaggaggcaccacaatgatggacatctgtgttgtttccaatagtttgccgttgaaacaacgttgcaatggaataactttgtacatgtcatttcacatgtgtaaaaggtgtctattggggaaattgctagaagtggctttgctgagtctgagggtctgtgcatttgtgatttgatcaacatcgtcaaattatactgccaccagcaatgtatgaaagtgcttgttttcccgtagcttggtcaatgaactattagacctgagatctttagccatccaatatgtgaaaaactgtaactttagtttgcatttgtttattgtatgtgaagttgagcatcctttcagaagtttaaggcctactctgtcctgtctgggtcagagtatgcccttttattttatttttagttttagtttttgagacagagtctcgctctgtcacccaggctggagtacggtggcgcaatctcggctcactgtaacctctgcctcccgggttcaagcgattcttctgcctcagcctcctgagtagctgggattacaggagcacgccaccacgcccggctaattttttttgtattttcaatagagacggggtttcaccatgttggtcaggctggtctcgaactcctgacctgatgatccgcccgcctcagcctcccaaagcgctgggattacaggcgtgagccaccgtgcccggccctcagagtatgcccttttaaaaatctgtgggtacacgtagccaactgacattttaagacaagaggacccacagaccctctttccacaacgcagcccgggacctgtctgtctgcatcaatagtgcctggctttcggagctagaaaacagcacctgcgcgtggtcgaagcctgaacctctacttacaggtgcggagcttccggcttgccaggggaaggagcccgcccctcccggctgcgtgcaccagcgcagctagtcacgtgacgccgggggcgggggcagataggaggtgcctgctgtcatcgttccgtgggccctgctgcgggcacgctctcggcgcatgcgttttttatgcgggattaagcttgctgctgcgtgacagcggagggctaggaaaaggcgcagtggggcccggagctgtcacccctgactcgacgcagcttccgttctcctggtgacgtcgcctacaggaaccgccccagtggtcagctgccgc

SEQ ID NO: 42167 - DNA, 2300 bp, Homo sapien
acaagaacagcaccaagaaggaaatccgcccccatgatccaatcacctcccagcaggtcccacctccaacattggtgtttacaattctacatgatatttgggtggggacacagatccaaaccatatcaggaacccagtggtttggtggttagggaagaatacttggtgatggcagctcactgcatttggctctggcatcattctggttagcttcagatttttggttttttttttttttgtgaggtagagtttcactcttattgcccaggctggagtgcaatggtgtgatcttggctcactgcaacctctgcctcccggattcaagcgattctcctgcctcagccttccgagtagctgggattacagttgcccaccaccatgcccggctaatttttttgtacttttagtagagacaaggtttcaccatgttggccaggctggtcttgaactcctgacctcaggtgatccacccacttcagcctcccaaagtgctgggattacaggtgtgagccactgcacctggccataactttagatcttagagtaagctgggacttgacaaactagagctccaatttgattatttggaaaagttttgttagtccccttatcttgcatggcttgccaggcagttgctgatgagttataaccctgtcctctttcttcttacaaacagtcttcatcggggaattctgatccttggtcttctattaagctactggtagttcttactctcctttctagatggaggagctgggttgttattcctctctccaccacctatcttcagctgctttgtcacctttctgtctgcttttcagattgcaggatttccactacctgtcctcttccttggtgtcaagcccaggacaataggtgttgctttctgacagatcctttgctttgtctcaatataggatttttcatgggccgatctgctgaattcagcctaggagctgagaccaacatctgagtctcttcagcacacaagtttgaaagaagtcctagcaacttcaagctcagaactacgggtggcagcagctccctcttgacgtcgaagcctcccattccagagagagtcaaggcctggatcaaacaaagcccacaagcaccgatgactgagctgctgactacccccagcatctccaactcaacctcctctttctgcctctacccaaattttaaaactttcaaacatgggtttaaaaatggtaatgagtaaagttgcatccaagtgtatcaaataaaactaaatatccataaatgctgtaataattcctgctttgatgctgaactaaagaattttctgccaggcgtggtggctaacacctgtaatcccagcactttgggaggccaaggcaggtggatcacgaggtcaggagttcaagacctgcctggccaacgtggtgaaaccccatctctactaaaaatacaaaaattagctgggcatggtggcaggcatctgtagtcccagctactcaggaggctgaggcaggagaatcacttgaacccgggagacagaggttgtagtgagccaagatggcaccactgcactccatcctgggcaacaagcgagattccatctcaaaagaaaaaaaaaaaagaattttctgtttatattacatatagtctcacttcatatttcatttctctcacctctgatacctggagtcctttgctagtactgaaattgagtaaagtcattctcatgagttttagtaaactcaaaactcaaaactcatgaagttggcaaaactcaaagaatgctttggtctagtttgacattggccagtatgtttttcatatccagtcattccttttttcctggctgacatcctcacttcctgcctgtggaggaaaagttaaatattaaatttgaactcaattgaatgtggacacaaacaatggtcaccaagtccgggaacaggttgtgtgagtcccttgaggcatttatcctgccctgtttcggagaaatctctatttcaaactattcctatgtgttacttactgaaaaacaacagacaatcgcaaaaacaagttgacctttttgtgttccttgagcccagtcacaaagggccctcatgactgggcctcatgccaaacaacttgttacaaaaagagctagggtcccagaccgcaccaaagacccatgagacctctcctcgtctgtgcacagactggtggccgactctggagcccaggctgttgcttcctggtctggtgatgaatcctccatagtctggtgagtgtaaatatatatatacatatatatcttttcccgtctccccttcccattgcaa

SEQ ID NO: 42168 - DNA, 2300 bp, Homo sapien
acgctgcaatcaccagggctctttaaaacatcctgatcccctgctttccctccaatcccaggggtctgaggacattggtttggacatcgggggttttcaaagctcccccagttaaataaatgggaacaatagcctgagaacctgttgacacaactgtaatcatggtagcaaaggtattgatggctgaaggggaaactgcacctgtctgcgtgggaacagtcactgtgggagcagagggtcccacccactgccaatggccccatctgcctggcacctctcactacaagcatcagtttaactttgttcctaccatgtttttcagttgtattttaaaaatcttgattctaagttcttcccagggtttaaaaccattgttcagggtttgttttttaatgaaatatcatgaaatgctttcatgatgttccaaagtcataaaaaagggaactgtgtgttagatacgtacagatccttgttaatagaaaaagaacaaaagatctattgccttcatcttcctaaaaatagtaagcagttaaggctttggaaatgcagatggaaatgagaaagaaaacatgtggctaatgaacacaggtgctttgaatcactttaattttggaacagaattgaacagaggaaggggatgcaaaaaagaatcaggatcttgacaagctgtgtgatttatccactttcatgtttttagctaataaagcaaacaatttagaaaactgtcacattcttggagtcttataacttggacattcttttaaattggatgtctagtgagaaggtctagcatggcggatgctgcggctactggtccaggaagcacattttgagaaccactcagctagaagattattgcattcatccaggtgagagaagatgaatctgaaataaggcaatggtgaaagaggcaggacaaatctgagaaatatttaggagtattattacaattctccaaagaaacagaacaaatagaatgtgtgtgtgtgtgtgtgtgtgtgtgtagagatttattatgaggaattggctcacaggattatggaggctgagaagactcatggtctactgcctgcaagctggagactcaggaaagttgatggtgtacttcaaaggcctgagggcgtgaaagccagtgatgtagattcgtagattccagtctaagtttgagggcctgagaacctggagcactgaaggcaggaaaaaatcaatggcccagcttcaacagccaggcagagtgaattcaaccctcttccaccttttttgttctatttaggccttcaacagattggacgctgcccacccacatcggggagggccacctgcttttctcagtccacgaattcaaatgctgctgtcttccagaaacaccttcacagacacatccattatatattaaatacaatgtgttgctaaatatctgggcatcctgtggcccaatcaagttgacacacagaattcaccactacaggagtcagggttaaaatgattggatgattatcttgagatcagcgggtcagctcccaggttttgaaattgagtgacacggtaggaaatgcccaaaccaggtatctcaggaaacacaggataagtttgatgaagagaagacagagcttctgctttgggcacataaagttaagatgcaaatcgtggtttgggtttttattgtagaaacccaggcagcagtttggaagattggtctggagtactaaagagagatttatctagagagagacttgacagtcattggcatttgggctgggtgaatccacagatcctttaaggagaacgatgtgagagactgggagaaggagagaaatctgaacattcaagtcactgagaacgaagtggcagtggagagaagagcagcaatcacagaaatggagcaatgaggaaggaaggaggggatggcatctgtgccaaaagtcagcgggagggcatgcaggagaaggatgggaagtgtctacaactctcatgattctgggtaaaactggagtcctgtgttctagtagtctcaatagagggaagaaggtggaagctagattttaaatggggttgagccagaagggaagttaggagggaaatgaaactatttttagaaatttggctatgaagaagacttgaggtggatagctctctatcttttaaggtgaaaatcatgcaattttgtttatatctcgagagaaagaggctgtgagtgttgctggagggctcgggaaggtctctggatgccagtgagaccccagccccagccggttttccaggttcttgacagcatcacaagaacgaattcaggggggagt

SEQ ID NO: 42169 - DNA, 2300 bp, Homo sapien
cttgctatgttgcccaggctggtctcaaactcctgggctcaagccatcctccagcctcagcctcccaaagtgttgggattacaggtgtaaaccacagtcctgtgtattctcaatagctcccaatgagatcatcaccagtggcaaattttaaatcaggggttggggatggagatgaaggtggggccacatatttgactttgaagacgttttccgtgaattttggaggagtgtgtgtgctactggcatctagtgggtggaggccagggatgctgtcaaacatcctacaaagcatggaacagaccccacatgaaaggattatcccatcccaaaagccaacactgctgaggtggagaaacccagggatctcgccaatgagatgaaatcttccaaccagcagacttcttggcacctaccttcttcccatccctctttgtttcggagatgaccccactgcaagacattaaacaggccaggcgcggtggctcacgcctgtaatcctagcacttcaggaggccgaggccagcggattgctggaggccaggagtttgagaccggcctggccaacatggcgaaaccccgtctctactaaaaatatttttaaaaattagctggacatggtggtgcgcgcctgtaatcccagctactcgggaggctgaaatgtgaggattgcttgaacccaggaagcggaggttgcagtgggccgagatcatgccactgcactgcagcctggggaacagagtgagactccgtctaaaaaaacaaaaaagacattaaacacacaaatgaaagtgagtaatttctcaacacttggtaacttgtaagtacagcgatacacttttatatctcagttttgaaattagctctctagttggcctgtgaacgtcccatgcctgccaagtgtgtcatctgagacaagcacttcaatttgtttgagcaggcatctatcaatcttatttgttagaaaaggtgccagtgaaaccccaaagagtattgctaactaataactgtgctgcagtttagagtgttcaaggtgctttccagtaacatgttctggaatttgatctgacaacgctttgggaggcggtttattacgatgaggctgcgctgtcgcactcgaggaaccaggtcagtgacctgctccaggacacgggactggcggggaggggagagcgcctggactcagcctccaagtctcgcactcgactctgcaggagtaaaaactattcttgatcctacctctctcccttctgcaaacaagcaacaaaatgctgaaaaggcatcttaactgaaacggaagtcaaatgaattcgcgtgcgatcatgggaatttttggctcctaaccttgcgagtagagctgggtgagttccatttgtggtgggggagtggaaacaggtttctgggcttgcagaagccacatcccgtccccacacaacctaggacaggccaggtacttgtaggtgaggctccggggctccagctaacctgagctacctgggctgggctttgtgcggggaggcagcaagcggggtgagccggcgacgacgccggcctctacgcagtgcggtggtgaagacgtctcttccagggagtcacaggaagcaaatccatccttttaaagggctcgcgtcccgcggccctgaaccggcgcgctggagcagtaatgcgacgttctccgaggttcaaggctcacggcccagccctgtgatccagtttcctcagtcttcgcggtgtgcaccactcaggacgacttgcggcttacgtccaggacaaagggggcttgtcctttcttcaacgtcctactgcgcaaaaacgaagcccttctcaggctgcctgccttccaggaaaagctgcgccccctcaggaacctgtgccccgcgcgcctgccgccgcccattcccggcgcgcacctggcagtcccgggctcgagccccgccctgccgccagccaggtgagaggggccaggccccgccctcgccggccccgccccgccccactgcgcctgcgcagtcggccgtcggcgccaggcgccggggcggcgcggccgtcgcagttcggcgggcgcagtgcgcgtgcgccctgactgttggggggcgggcggcgtccgcggcgagggagcgggggcggggaggcgccgtctggctcaggctggggccggcgggagcgcgaacgagcgacggcggaacccgtgggcctgtggactgcagcctcggcggtcagcaggtgaggcccgcgcagggcgggcgtgggtcgtgagggagtgcgggctgcgggcgggccagcggtgcggcggtctgcccggg

SEQ ID NO: 42170 - DNA, 2300 bp, Homo sapien
tgtgcccgttagaacataagctccaggcaggcacaggagcaggactcaggggtcggtgaacgtgacgggagtccaaagtcagtgggggatccatcttgtcttaggagagcaaagaccttctctctgtcctccccagttccatagctggctctatgaaattaactgccaacgggcagatgaacggggggaacgggaatacacatttattaatctttaatatcacctgcatgggggcattgcaggaaactaggtgaaaaccccccaaaccagtgagctttgagagcttctaaaattggggaactggaagctggtgtaggccacttaggggagagtaactgatttttaggaaagatgcataagtctttatgagtttgtgacaaagtttgtctaggtgtggtgtggacttctgctgtgataagagtccatcctcccgggagggaatttacgacaatcagtttcttttggaggttccgtctttagacaggtaaggggagaacgtctctctgcatttgctatttttcaagtgcctctcgctcaaaataatcaatataccaaagcggcatattttaggatggcatattttggtttcattcactgtctttaagtttttgatattttgttcattataaactttttttgcattcattttgactttttaagatattgtattaaaacattatttaccttgactactgagtttttttgtcgcgcccttaaattttgcccctatgcgagtgcctcgctcgcttgcctccttctagcccgggtctggcagggagttgaaattatttttctcactgctgaattcccagggcctacaacagtgctcgccaaaaaattaatactcttggttcttcaaataaaacattctgtaaggactgctcccaatttcttcctgaacttcacgaaccctcccagccaggccacaggatgtcaggggcaaacaccctgaaccaacggagctcaggttccctaccaccccgcccaagcccgctccaagcccaattacccttccccttcctcgtcgtcccatcctccctgatgcctcttccagggtgctgggccgcgcggcaagagctccaaggcaagattcaaatgccctggggagacggctgcgggacacctgcggcggggcccggcagggagcgcgagactggaagagaggccaggagggaaggagagcgacgcggggttttgggggaggggctgcgtggggcgctgaaggggagcgcgaggagtgggaggaagtgaaggaggaggaagagcacggtgtgggggaagcgcaggaggcaataggtggggcgggacggagggcagggcgctgcgtcgggagaaagtgtagaagcgctggggagagtgcccacgacgggagagcccaggggcgcgagggcgcgggagtgtgggcggggcgcagtggggatgggggcgggggcgcgggatgtggtagggggcgtagtggggagagagtgcaggagtgtgggcagggcgcagtgtggggagggtgcgggagtgtgagcggggcgcagtggagggagtgcaggatgtgggctggacaaccagtgggagagggcgcgggaggtgggcggggcgcagtcgggatgggggcgggggcgcgggatgtcggcgggccgcagtgagggggagggcgcgggagtgtgggcggggcgcagtgggggagggagcgggagtgtgcgcggggcgcagtgaggggaaactgtggaatgtgggcgaggcgcagttggagaagagtgcggggatgtgggcggggcgcagtgaggggaaactgtggaatgtgggcgaggcgcagttggaggagagtgcggggatgtgggcggggtgcggtgggggagggtgcggagatgtgggcggggcgcagtgggtggagagtgtagggatgtgggcccagcgcagtgggggacagtgtggggatgcgggcgaggcgcagtgggggcgggggcggggatgtgggcggggcgcagtgggtggagagtgcgggatgtgggcggggcgcagtgggtggagagtgcggaatgtgggcggggcgcagttggggagcttgcggggaatgtgggcggggcgcagtggtgggagggcgcaggagtgtgggcggggcgcagttgggggagggtgcagagacctgagggcttgaggttgcctggctggccccgctcccagaggcgggtgccgcgctgtcgcccaggtatctggggtctctggtgtctgagtgtctcattgtcggcgcgaacacaattgctccagccacaggcgaggcctggccaaggtgtgggcgcatctggggc

SEQ ID NO: 42171 - DNA, 2300 bp, Homo sapien
tctaccccactgcaatgaaaacacaaggacataagcatttactgcagtattgttcccagtggcaaaaagctggaactcaaataaacgcctaatgacagaggaatgatgaaagaaattctggctcatacacaccacaacctattacacagccactgaaaagaatgaattagagccacattgatgactctgggagatttccatgagcaattacagagtaaatgaaaccaaatgcagaaaaaaaaagtctgttttattatcccatttctaacaaaaatgaagaaaagcactctctaacatctgtgcacatacatgcaggtaagcgcgagtgagctgaaaattataggccacatactgttatcatgagttacctgtgcagaaggcagagagaaagtttgggaaaggaaagagaagaagaagagcaaagaacaaaaagaaaatttttgaaaagaaatgttataatatgatccattaatgtattaacttaaagatatatgtgtgttcatatgcacgaagagaaaactttatatgttgtctcttcttttctgtctcttaaatcaggcttgcaagactttggcaatttcccacttgttttgaatcctcagaaaatatcgtatctccagaaagtaaacaaaaattgaccagatagcattcccttaatgcagttccagtgactgttctggataagaaaacaacacttctacattcaaacccccaattgccatttgaatctcatcaaatgaaattttagtttttctttctagcttatgtttttccctggagaaacaagtctataaatgtttaaaactggcactacttctcatagtgaataaaatattgttgtgtagaaaactggctccaggaaattaaaaatcaatatactttgagaactaaaataggatggaaaagttgctttgtccagattgcaatggccaggcaatgcaaaacaaaagaattgctattataaaatgagaattacaagagagcatttttcagctttgtatgagaaatgcaattgaccgagtgaaaaaaattaaccctgtttgtgtttcattcaagtggccatctctgcaacttactgctaatttgccttctttgaatttaccattcctggtggcaaaatcatttgctcagaattgttctagtattgcccagtcatacttttctaattaagattccttgctgaatgttctaactttgacctcatttcaaagttactttcattttaaagcttgactcaagatcttcaattcttatatcttaaaaatcttaaatgttttctgtttctgttattaactatactaggttagggatatttaaaataacagctgataatatggtttttaaaaattgtgagaatgattgctaatgtctggctctcactttattaagaggacatgggagcctttgaaagatggcttgcctgtctacctagggctgacccccaggtccagatttgagagtctgggctggctgactgctgggtggctttggtagaagctggcttgtcttctggttccatttttctctccaccccagtatcttgggttactctggaaaactatgcgatgcccatgtgcgcacccagttaaagggcattcgagtctttgcccgtagaaatttcataaatagaatatgtaatgagccatgcatgtcttatcgctaaggaatccaggggaatctgaaacttggatgacaaagtctcttatgggtctttccttctcacaccacttgatacagcacgactatcttgaagtcagccagcggcctgcagaggcggtctttccatctgtttcagaaaacccggtggcttgtgcaacctgggaaacttgcccacagccatcccacgtggtgagtcagctctctggctccattatctactgtctcttcccagatgtgactccctgtttaggagcaagcaaagttatggggacccaggggagaagcagacactcacctaatgcacaatcctgctgagaatttacccaaacccaaggaggtggagatggagtagagcttgagtcctttccacgactgttaactgaagatttctgttgtgacatcacatagaattttgactagcattcaccaaggatgaactgaaagcaggatctgtctcaccatacactgagaactgtagaatatgcaaggcacatggaacttattttcttacgtataaaagcgtgtatatgctccttatacatctgtcctaatgctttccaacagtcctcactctaagcctcaccaagacccagatgaggaaacaaaggcacagaggggtgagtcacttgaccaagtcacag

SEQ ID NO: 42172 - DNA, 2300 bp, Homo sapien
atttgtacttattgttatacttcttcttttcagctgttcttataccagaagaatccttcacccctttttcttgacattgattttttttggaagagctcaggactgcagaatgcccacactctggtagtccagtttttcccatggtgtcatttaactcatggctcaaactcttccatttcctgtaaacttgcagtaaagtctagaggctttgcaattgattcaattgaagcatctttggcaagcacacagcaacaatgatgttgtgtgtttcttttgcatcacataatgccaggttgagccagtattagtgacactgagtttgatcttcctgtaaggtacagccagatgtctccataaaaaaatggaaaatggaaaacctttttcttttttttttccaattagcacccgttcgcctgcacactttcacctaagggtttgacacccactagtgcacactgcctgatttaattatttcattaagggttacagaatggggatttcctcattctcgcatttctacgtttatgagctggcattcttctgttaaactgctttcacttgtgaaacaggatgcagaggaggagacttattcaacagaattgtagggagggctgtttctctcaaaaggagtggtgagagaagatggtctctaccggggcatggagggctccttgtcagagtctagtgtctgagctttaaggcccaggaagagggcagcagatgggggtggggcagtgggtgagtgagaggcccgtgtgtggggagacccactgaggacagggatctttaggcaaacggagcctcactgaaagaggaatttcagtgatgccatgggtcagatcctgggtctctcttagggaaacctgccataaagcatgagagccacattactcctcagggcttctgggctccgattccgcagactagttttggaggcatcaccacgcctcaaggttgctctgttatatcagggtaactgactttctctaggaacggagacttgggtgccccttaaaacaaccctcagccagtatcctagcagtaaatttttcatcacgggaagcaactaattgaacagaggtgtgatgaacctactgaccactttggtaatatagacacagtggccacagtatgctgtattgttatcctggttgtgaccaatgccaaaggagcatgtttccttcttttcttgacttgatgctgtaggagtccaacaaagggaagcacattcaggcccacatgaaacttgggacagaagtggcttctcagagccgtgcaccaggcactttgaacaagttggaaggctacagtgccggaagactccacagtagcacaggcgaagtggcttaggcgaaaacgctgggaagtaccccagctcccgggggccagagcctctagggctggcagcctcagcaggcagagtcacttgcctccttcagctcaattgctgagggcttgcgtttctctgcagggaacaggagtgccgccgacttccactcttggtgcccttcaccgctcaaactgcaccccaaataagcgtatgcaccctgctccaagagaaggatgcgctgggctgatcctctggaggcaagagggcaaaagacagaaagtaacgagcggcctttgcacaaactcaactctctgcagcggcccctgcggcccaatcctgccggcccaggaatgcacggtcggataacaggcctctccttgctttttcgtcttcttcctcccgcttctctcctctctccttttcctcctcctcctttttctttaattttctcctttctccccaagcttctacagttgtttctgtgttcgctcaatcatggcctttggcattgattgaaaatttggcagttccttctctcggaattctgtttgaagccttcatatggatttattattattattattatttttgccacacaaaaggggcaaatccgcgtgaggaagggggtcgcatgggggtcggctgagatctgctggctgccggtctaggaggggcgctgctctgtgccggagtgggctctggtgcaccagcagaggctgggggagagtgctgcccccgcctggagcccaagtctctgcgtgcctgggggtagagcgcggagagggaccaggcaggcgccggaggggacccgcgcggaaaaggaagaagcccaaacaaaaacgctgtccggcgccaggcgcccacctgcaagcccaagccggtgctcggccagttacaaaagaaatggtcaggatctggacaacgataatgatagtattaatcctcctattaagaatcggcccaaacaaac

SEQ ID NO: 42173 - DNA, 2300 bp, Homo sapien
acttattcaacagaattgtagggagggctgtttctctcaaaaggagtggtgagagaagatggtctctaccggggcatggagggctccttgtcagagtctagtgtctgagctttaaggcccaggaagagggcagcagatgggggtggggcagtgggtgagtgagaggcccgtgtgtggggagacccactgaggacagggatctttaggcaaacggagcctcactgaaagaggaatttcagtgatgccatgggtcagatcctgggtctctcttagggaaacctgccataaagcatgagagccacattactcctcagggcttctgggctccgattccgcagactagttttggaggcatcaccacgcctcaaggttgctctgttatatcagggtaactgactttctctaggaacggagacttgggtgccccttaaaacaaccctcagccagtatcctagcagtaaatttttcatcacgggaagcaactaattgaacagaggtgtgatgaacctactgaccactttggtaatatagacacagtggccacagtatgctgtattgttatcctggttgtgaccaatgccaaaggagcatgtttccttcttttcttgacttgatgctgtaggagtccaacaaagggaagcacattcaggcccacatgaaacttgggacagaagtggcttctcagagccgtgcaccaggcactttgaacaagttggaaggctacagtgccggaagactccacagtagcacaggcgaagtggcttaggcgaaaacgctgggaagtaccccagctcccgggggccagagcctctagggctggcagcctcagcaggcagagtcacttgcctccttcagctcaattgctgagggcttgcgtttctctgcagggaacaggagtgccgccgacttccactcttggtgcccttcaccgctcaaactgcaccccaaataagcgtatgcaccctgctccaagagaaggatgcgctgggctgatcctctggaggcaagagggcaaaagacagaaagtaacgagcggcctttgcacaaactcaactctctgcagcggcccctgcggcccaatcctgccggcccaggaatgcacggtcggataacaggcctctccttgctttttcgtcttcttcctcccgcttctctcctctctccttttcctcctcctcctttttctttaattttctcctttctccccaagcttctacagttgtttctgtgttcgctcaatcatggcctttggcattgattgaaaatttggcagttccttctctcggaattctgtttgaagccttcatatggatttattattattattattatttttgccacacaaaaggggcaaatccgcgtgaggaagggggtcgcatgggggtcggctgagatctgctggctgccggtctaggaggggcgctgctctgtgccggagtgggctctggtgcaccagcagaggctgggggagagtgctgcccccgcctggagcccaagtctctgcgtgcctgggggtagagcgcggagagggaccaggcaggcgccggaggggacccgcgcggaaaaggaagaagcccaaacaaaaacgctgtccggcgccaggcgcccacctgcaagcccaagccggtgctcggccagttacaaaagaaatggtcaggatctggacaacgataatgatagtattaatcctcctattaagaatcggcccaaacaaaccctcgctgtcagggcgacaggcgcccgcccaagcccagacctcggacctggttccaagcctgttcccgctgggtctctgggcgcccggtttctgcacctggagctcgcccgatgaggacaaggtctggaggccggcctgggaacaggggccgaagggcgagccggaccctaggggattggtagggtcggggagaaggggtccaggctaggggcgggcggggcgcacggagaccaggcggcttgagcgggaggtggggagctggaggagtgccgggttcgcgggcgggggacggggagaggggggcggggagaggggcgggagtcgggggcggcgaggggaggggcggagcgcgggtcccgccccggcgggccgctggaaaagtttagtctctgactcgctcgggcagaggccgaggaagccggttccggggacgggcaacagggactcagggaccagaaggcggctgcaggacgcgaccgagcaggaccccaggcccgggaacgacgtcgcgagcgctgagactgccgggcctcccagcccatctggcattcgagcgcaggaccgggcgccccggcaccgccgc

SEQ ID NO: 42174 - DNA, 2300 bp, Homo sapien
ctgtgtgacagcaagagcaggcacccatcccagagctcagtcccgaagactcaggtattgaggcttctggggctgcatgtgccagaaacccaggagtcactggaatccatttgaggtactgcctctggcatgagggatgggggaaaggcctgctgtcccaacaacaaggtttctccgttgctgcagggaagagcatgtgcctgcccccactctttgtcttgactccctttcttccaggtaaaatactgtcatttcctgaggagtcatttggtgttagaaagctggcaatgtttatacctttcaaatactatctgggctgagattgccctgtgattttcacagatgccctttaaagaatagatggatccatttgcttgctggcagcgtggctcttgttctggtgagaccccacagggtacagcaccctgtagggtatgggtcagcagaacagaaagacacactaaacacgcttagagttggatagtgataaatctgatcctgtaaggagagttatgaggagactgaaaaatctggcagataataatactgctaagttctaatgccaatggtatgagccccatttctgccttggggtgtgcgtgtggccagatggaaggacaggttagagctaaccagtgaggatgagtcagggcaggccccagccttcatacatggccttctagggagtctttgcctttgagggtccagtgaatttgagatgacagtgaagtcagtgttctagaatgttctgcagtggattgaaactctggagagtctgacactactgtagactgcactgctgttttctgaaatggttttggcttcaggcatcatgtggatactctgcttagtgatccagaagcagacggctccacggggttgctggcagcagctgcatcaggctcctgccccaagacagcatagacttgggtgctctgagagctgccctgcacatctgtcctctgggaggctgggagccctggagagacacacacagctctgacccacctgtgcatgaatgtgcaccacatagaaaaatgtgcgaaatgaccttctttctacattcatgcattccccacttgtgaaaggtcaaaatgctattataacattcagggacaatagcaaagtaggaaatgcaagttaggagctgtgaatgctgtaacatttgatttactttatttttctcttggggggacttgaatggtaacctgcagctttagtagctcttgctgtgaagtcagtgtctagttcgatggtgatagaaaatatatatattttttgcatgagaatcaatttagaaaatttaaagtattggagtcgaattttttctttttaatattaattcaaaatatacatttttaagctcagattatatattggttacactagaatagtgccagtgaagtgagcaggcttcagacatagcagatggcagcgattttctaatctttgttccctcccatttgtaaagtgggttagagcacacattagttatcccaactcttccctccagcactgtgtggtgggccattcctgtgagcctcacagacacatggggaaagtgaggctggggctggtgccacaccttcctggaggccatgttgtcatctggctgcagagctcttctgctcactcagcatttcgtgagccctgctgtgtgccagcctgtgctttgagctcaggattccaaggcaaaagcaatggaggctcctccctgtctagcctgggcccctcttccccacactttctcaggccacatctctgcctgggcagggcagggaagctgaacaatgaacgcagcgggaatggcattaggccttgcgttccagggcctcaggcttccagggcacagtcgctgctgctgtgctgggccaccctggtcctgcagagtgcacctgggccctgctgtccctccaatgggcacccccaacacttaaccccaaactctatgtcttctgggagtacaaggtgggggccagcagtcctaaaacggcccctctgcccttaccgagtggccctagagacccccacccacctcccctaaccccacgaatgaatcagctgtgcttcaaatgacatctctgtcccacggaggccggctgggcctctcatgggggtgctcattgtggtttaagtcagctttgattcttgacctccaaggctgcctctgagtagctaaccggagaatcgggtggggaggtgaaaaacaccgcagtcaaatgactcaatctttaatcctgtgcttaagacaccactgttgctgttttttatatttgaagcacccaaagactgggcgtccg

SEQ ID NO: 42175 - DNA, 2300 bp, Homo sapien
ctacatgccttttacaaaaaaagaatcaagggctaggaacctaggttttgaacgtgcattcaatgtacattcataataaaagctgaacgactggcacattcatggttgctccttgatgtaaatgaacggctgaatgaaagtttaggggcacagctcacctccaagagagaccctcttcacacttagacctgaccaagggatcttgaattcccttgtaaaactagcttttcctctccatagcagctggcctcttcctcccggtatctttgtaatccggctgggtgtttttttttctttttctttttttttttcccacactgccgttggataaaagatcccgcctttgattgaaatggaatcttccactattgagcaagcctttgttgaatgagtcatcggggcggccgctcattggctgaggccgctggagcccaggggattgcctggcaccggctgcaaggccctgcttcattcacagaaacgctggctcgctcgctagccttttcattcacacaaacagcatttcattcacattttgcggtttttgtctgcatctaatgaagatctcgctttgggaatgatagggctgtttcgctacagatctggggaggactctgataaccatcaaaatcatctatggggtgtgcaattgctgttgctatgcaagctagggaaagggaacaaatgagtgccgtgtagctgttctgctagggctgcggcacaggaggcgagccgtggggacgcgtttcctgtaccggggacgccgcggctcctctgcgctcttgcgtcctaggggttggcctcacccgctcgcccgccatgagtggcgctcattaaactctgctccatagagcagggttcaagactcaggacctcacgtgccccacatgttcggtcatgggagtgagaggactcagggtgacctgagagtgtgctagagctgaatttattcgcttgctcagaagttgcgggaaaactttgatagtgagtgtttcactgtggagcaggtgatcctaatgcatgaggaagcctggcagagcccactgaggtcaagagtcagagggcttcagtctcgggcagacctctggggacagcgaaagccttgctctcctaactgagaggaagaaggcctgtgcattttacttgcaagcccgagcctgactcctgaaaagaaggcatattttcctccttgtggatttgatgtgcaataagaacagctgcattttttccttcctgactgcagggttgcaagcagcaactgaaggaacattgaaatgtatttgtagcatttcttaggcgtttttccagagcttaaacacattcagtaggattaaagcttcaaatgcagccccttttttggaatggatttctggagcctgttgccactcgtgaaagaagcactcttcttttttggaagtggatattcaacttaaccctggctgagaaagactgctgtaaatgagcagggaagaccccttgattggcactgtgcagaagttcatatgcagatttttttttttttttttttttgaggaactgcattgccacaaagacacttgtcatcgctgctctgttaatttgaaaagaaaaagcaaaacccaggaaattggtattttacagtcacctgggggtgaatatcctttttgtttttttctatttaaaaattcctgctgccttccaagtcaagattcatcaggattcgctgaagatctgattcttaaaaagccttcgtcacattttaacgcatcgctgttagacacttttacaggctcacacagatgggctgagcagggacgagcaaaacctaacagaataatgggtttcagaaagttcatttgacgatttgaaggaactggattggatttacctttggcacaaatgcagattgcgggggatgggaaggtgaaaaatcaaaggttggaaggaaatatctgggaaggtagaaaaaggaaatttgagaattgattggctatagtgtgctgtcagcgggtggatgtcgtttttttcttctttttttccttttttttcttctgctacaggaagtgatttgcagtgctcaccgagcctttgttgagaagggtctcctctcagagtgagtcatgcttttgctgtgagcagccccaagcagctgggcgctccatcagaggcaactatgacttttgcaaagcaaacgtgcaaccccaagcagcggtctcccgggccggggctgcgcggccgccgctgtgctggcttttaacggtgggagggcaccatcctcttgctctgctctcgttctccagaaggctgtcccggggccccca

SEQ ID NO: 42176 - DNA, 2300 bp, Homo sapien
tgcctcccctttttagaccatgtagggtaacttcctgatgttgccatggcatttctaaactgtcatggcactggtgggagtgtaacagtgaggaccaaagtcactctcttcgccattttggttttggtgggttttggctggctcctttgctgcaacctgtttcatcaacaaggtctttatgacctgtattttgtgctgacctcccatttcatcctgtgacttagaatgccttaactgtctgggaatgcagcccagtaggttttaggctcatcttacccagctcctgtttaagatgaaggtgctctggttcacttgcctctgacgatcccagcactttgcgaggccaaggcgggcagttcacttgaggtcaggagttcgagaccagcctggccaaaatgatgaaaacccgtttctactaaaaatacaaaaactagctgggcctgtaatcccagctgctctggaggctgaggcagaatggcttgaacctgggagggggaggtcgcagtgagccaagatcacaccactgcactccagcctgagcagcagagtgagactgtctccaaaaaaaaaaaagggcggggggtggaattccaaacaccctcttcccccaagaagtgattgtattaggaagttaggaggtggggccttcgggaggtaatcaagattagatggtcatgagggtggggccctcacccatggagattataaatgtccttagccggcctgtctcacttgttcagaaaccggaaaagtccgtggtctgcagtgtggaaaagggcacccggacctcttacttccagcctctagtctggaaactttgtctaaggtaccccatctacattacttagtcacagccaccctgaacccactagcctgtactgcgctggagcatttcgcataaaatgaaattaacataaaaatgacacgtgctcgttgtggaaaaaataccaaaaagatcacttttaattctgtcatctaaaaataaccaccagttacatttataaatttcttccagtaacttttttatatgaacatgtttttaaacttgggtcaatattaaaagaccagaagttgttaaacatcattttaaatccccttatccaggaattagcattgttattcttggccgcagcagaatattattttattccctcaagctttccatggcttgggtctgccctggttttgaacattaggttaggctacagaaagcattctgggtctctggcccatttgtttctttctttgtggagacggggtctggctctgttgctcaggcctgtctggaactcctgggctcaagcgacactccacctcggcctcccgagtggctgggaccactggcgcccgccgccaccgcgccggctccgggcctctctctacgcgtggctccgcaggctccattctccacacagtcgtctaggggggcgccaggagccccgcgacgggccaggccggaagctcagcaagtgcaccaggcggcgaaacggccggctgcgcagggcagccccggacacagccacgccgcggccgcccggcgctcccccgacccagccgaccacgaagccgccctccccctcacaccgcagaacctttctgccttttactacttttcaaagtggacctaggctcctggctcgagcctgaggggatacaagggatcacgaggagcgccatcaccgtgcaaggtcgacagcttccgctcaaagccctgtggcccacgcttccggcctcgaccgactacgtcatcaccaaaccccgtgatacctcactccaccttcaggtcctccgtcccaacggttccgtgtcctggaactttccacgttcctgcgcacgcgctctgcggcccttaacgtcccgacttcgccctcctctggccacgcccctgcccgttaagggccctgccacccccgtgacgtacctatcttccctcgggcaacctcgcaacagatctctgattggctgacccaggaagcggactttgcgaggcggcggcgacgataggctggcagccggccgacttccgcagaaggtgattggtcggcgctgctgtccaatcggcggcgggctgtcggattcaaatccggatcgttgggactgcggtcgttagtctccggcgagttgttgcctgggctggacgtggttttgtctgctgcgcccgctcttcgcgctctcgtttcattttctgcagcgcgccagcaggatggcccacaagcagatctactactcggacaagtacttcgacgaacactacgagtaccggtgggcgcctttcttagaccccgagccggctccctcag

SEQ ID NO: 42177 - DNA, 2300 bp, Homo sapien
caaaagatcaacaaaaatgaagtttatctggggatcgtcaaatctttttcaaatttaatgtatatgtgtatataaggtagtattcagtgaatacttgagaaatgtacaaatctttcatccatacctgtgcatgagctgtattcttcacagcaacagagctcagttaaatgcaactgcaagtaggttactgtaagatgtttaagataaaagttcttccagtcagtttttctcttaagtgcctgtttgagtttactgaaacagtttacttttgttcaataaagtttgtatgttgcatttatcactgtttcaagtttttgaggtatattttcttaatttgtgactattgaaatttgtgactattgaaattgatttcagtgttatagttttagctctgaggaagttaacttaccttaaagatgatgttaaatgagtttaaaatagtgcggtatgatctggataccatttaattcacttaatgaagaaattaattaccagggatatgtttaaactaaagccaaagtagattttacctcttgaattcctggagaattgtctagaacaggaaagcccaaattaatactatctgggctacttcactggccactggtggtcttgggagaaacctcttttttatcctcttctacatttccaaagtagggataatgtttcctataaagtatcaccacatttttaaaagttcaaaaacactgtaaaacacctttgcctttttagctgctaggaaagtgttttggagttattctaattaattgctatgctatagaaacatcttaaatgagcagccagcatacatcaggtccattggttaagaaagggtgtctttacacatgagggcaataaattttgaaggttgtgattagcagcatcctaaaatctactgccactaccataggttgtgtccagggtaaccaacagaaacatgacaaaatcaagtaaacttcattacacttccgggtagacccaatagtgctgaaaggaaggcgacagctacccctaaacttccagcataaattcctgccagaccagaccctaaggatcacttctgctagaggctgtgtagtgaactgagacccaccaggacagaaatctgaaaaaactggagctgcacctgccttacttgcttgaaatacttcgtattcaatggtagagttaacgtctgtgcaagggacagaggaaacctacaatttgcctcaacctaatccccattcctcaaatagcctgttttgctgacattttctgttccttaaatccacttgcactttcctccaagcctttgagtgagaggaaagttcctcctccatctattgaaatccactctgcattcttccctgtacttttggtcaacctcctatccctgccgcactttatacatttctctcaatatttaacgaatttgctctgtgtagaactttttttttctcgtgaaaattatactattccatctcttgaccatatcttagcactttttttaatttttgaaagaaaccgagcgatttttaaattattttctgtggctacttccaaacttaaggtttctggaaatttaggataccatcaagagtcttgtaggctttccaggtttgtaggacctacagggtatgcaattcctgtaagtcaccaatcttggggaaattttagggaaatgcagtggcgggggtgagagtaatctcggcctcctcagtttccttattagtaaatctttctcttcaggtgactgctcaaaggtcacctcagcgagaggcctttccagactaccccatcccgtcctaacgctagactcgtgaggcccaggggagaaaagtaaatcacggcctaactcttgtttatagtcgctactgccttggtggagactatctccgatatcccagcactaaaaggcagatccaagactcccgcaagctacggtgggtccccagcccagaggactcctgggggtccccattttccgcaagcgccccactgcctccacgtgctgcccgcgcaggtccagtgccgccgccgcgtacttccggccggaagaaagggcgggctctgtcgctttgctgtgacgcacttcctggcgtcgcctgcgggggcggaaacgctttgtctgtccggcaagccgacggcccgctgctggcctccgtgacgcggcctcctccgcgcctcgcggcatggcgtcggaggggccgcgggagcccgaaagcgaggtaagggccgacgggggctctctcggcagcctcagtccgtccgcctgcctcgcactgggggctcggccgggcggtgacggggctggtccagcg

SEQ ID NO: 42178 - DNA, 2300 bp, Homo sapien
gctgaccgccaccccaaggcggacccgaggcggggcgcgaagatcgcggccacccggtagggcgctcccgtgccgtcaccagcatccgacccacgcccgctggaccagccccgtcaccgcccggccgagcccccagtgcgaggcaggcggacggactgaggctgccgagagagcccccgtcggcccttacctcgctttcgggctcccgcggcccctccgacgccatgccgcgaggcgcggaggaggccgcgtcacggaggccagcagcgggccgtcggcttgccggacagacaaagcgtttccgcccccgcaggcgacgccaggaagtgcgtcacagcaaagcgacagagcccgccctttcttccggccggaagtacgcggcggcggcactggacctgcgcgggcagcacgtggaggcagtggggcgcttgcggaaaatggggacccccaggagtcctctgggctggggacccaccgtagcttgcgggagtcttggatctgccttttagtgctgggatatcggagatagtctccaccaaggcagtagcgactataaacaagagttaggccgtgatttacttttctcccctgggcctcacgagtctagcgttaggacgggatggggtagtctggaaaggcctctcgctgaggtgacctttgagcagtcacctgaagagaaagatttactaataaggaaactgaggaggccgagattactctcacccccgccactgcatttccctaaaatttccccaagattggtgacttacaggaattgcataccctgtaggtcctacaaacctggaaagcctacaagactcttgatggtatcctaaatttccagaaaccttaagtttggaagtagccacagaaaataatttaaaaatcgctcggtttctttcaaaaattaaaaaaagtgctaagatatggtcaagagatggaatagtataattttcacgagaaaaaaaaagttctacacagagcaaattcgttaaatattgagagaaatgtataaagtgcggcagggataggaggttgaccaaaagtacagggaagaatgcagagtggatttcaatagatggaggaggaactttcctctcactcaaaggcttggaggaaagtgcaagtggatttaaggaacagaaaatgtcagcaaaacaggctatttgaggaatggggattaggttgaggcaaattgtaggtttcctctgtcccttgcacagacgttaactctaccattgaatacgaagtatttcaagcaagtaaggcaggtgcagctccagttttttcagatttctgtcctggtgggtctcagttcactacacagcctctagcagaagtgatccttagggtctggtctggcaggaatttatgctggaagtttaggggtagctgtcgccttcctttcagcactattgggtctacccggaagtgtaatgaagtttacttgattttgtcatgtttctgttggttaccctggacacaacctatggtagtggcagtagattttaggatgctgctaatcacaaccttcaaaatttattgccctcatgtgtaaagacaccctttcttaaccaatggacctgatgtatgctggctgctcatttaagatgtttctatagcatagcaattaattagaataactccaaaacactttcctagcagctaaaaaggcaaaggtgttttacagtgtttttgaacttttaaaaatgtggtgatactttataggaaacattatccctactttggaaatgtagaagaggataaaaaagaggtttctcccaagaccaccagtggccagtgaagtagcccagatagtattaatttgggctttcctgttctagacaattctccaggaattcaagaggtaaaatctactttggctttagtttaaacatatccctggtaattaatttcttcattaagtgaattaaatggtatccagatcataccgcactattttaaactcatttaacatcatctttaaggtaagttaacttcctcagagctaaaactataacactgaaatcaatttcaatagtcacaaatttcaatagtcacaaattaagaaaatatacctcaaaaacttgaaacagtgataaatgcaacatacaaactttattgaacaaaagtaaactgtttcagtaaactcaaacaggcacttaagagaaaaactgactggaagaacttttatcttaaacatcttacagtaacctacttgcagttgcatttaactgagctctgttgctgtgaagaatacagctcatgcacaggtatggatgaaagatttgtacatttct

SEQ ID NO: 42179 - DNA, 2300 bp, Homo sapien
gcttccaagttgtggcagttatgagtaaagctgctataaacatccatgtgcaggtttttgtgtggacataagttttcacctcctttggataattaccaaggagtgcagtggctaaatcatatggtaagagtatggttagttttgtaaggaattgctaaactattaaatatctcccaaagtggctgtaacgtttttcattcttaccagcaatggataaggatttctgttgtcaaagtgttctggattttgatatgtagtgttatctccttgttttaatttgcatttctctgatgacatctaatgtgtttgctttttagggtgaaatagtggtgaaaaataacccaaatgaatctgtaactgctaatgccgctaccaattctccttcatgtacaagaggtaaaagtggctgcaaaaatgttaatttttaaaatgtcatagattttttaagttcatttttaactccagtgcagttgaaatgatttttgttgtaaagacttaagacagctaatgaattgtgggtaacctaacatcagtgttagtttagaaagttaagtagatgagatcccacatccacacacaaagagtataaaataagagacaagaattctaaatgaagtacacatccaattcagtgagaaattttatgaactcagcagtaactacttcctttagtattgcctattctcaaaagtttttgagacctttaaagattgagaaccccaaagagctcttgtttatttgggtgatacctgtcaacatttgccctattcaaagttcaaacaaatttgcttaaaaataacaataaattaagcgtattgcattttaagatagcatatttttaggaaaaccgtttttcaaaattaaaaagctgtagtgcagagagcagccttgctttccacttgtgcagctctgccatctggctctgtagatctgccatggcattcacctgcctcacggtcctgcctcatacagcatttggaagactcccaggtgttctcgtgagagagggagagtagggaaggcaactgatgtgtttgtactccagaacggttttaactccatagacacctgcaagggtcatgggagcctcctgccacactgtaaggactgctcatctgtcctgtcctggccaagaagtaatattttcagagagagttccatgtaccctgctttgatatttttacagtagcttgtcctaacagagacatttttacaaaatgattccaaatttattcatagggtgttttcttttgtgttctcatgttcgatatgtatgtggttgagtaatggtctgtacttcacaggctgctctgaggatgtgtagttctctagtgaggggaacagtctgttttacccttgggggtagccacaggctgctgacaggtgttcacctgcctgtgtcctgatagatgtctttgttttgtctgtatatagagtttcatgggcacctaaaggagtagtgttgctgtacttatgcctctgttctaaaagaaataaattaccagttattgtgatagctgaagtctagtgatctttgacttctgatgttaaaggtacacttcaaggttagtagggccaaaatttgatctttagttcgttaattctgtgtgcttgccacgtggacatttattgtggattgttgttttttaactaaaactactgtttgtctacccacctccaacccccaggttaaaaaaccagtttccaggaaaattaaccttacaagttaaaagggaaaaaaatgcagcatgcatgccccaagaagaaaaacaagtttagtgactactatagtttccaagaggatgttttaaatgatagcctacatttaatgatgctctgagcagttacctcatgtaatgcatgtttgagtaactaaggaatttctattttactgttgagattgttcaacaattttggttatctttgagcagagttatcttggacaccaatgggttatgttgttcgacagacattatctacagaactgtcagcagcccctaaaaatgttacttctatgataaacttaaagaccattgcttcatcagcagatcctaaaaatgttagtataccatcttctgaagctttatcttcggatccttcctacaacaaagaaaaacacattattcatcctacccaaaaggtacgtgtcactagagacagaaagtaggatggtggttgccaggggctcagtagagtggggaatgagaagttatttattaatgggtagagagtttcagttttgctaggggaaatgagtttctgaagatggatggtgatgatggttgcacaacagtgagtgt

SEQ ID NO: 42180 - DNA, 2300 bp, Homo sapien
atattatgttagcttgaaatgtggccttgtttagcgtaatggtttcctgtctttttgagtatgaggatactttttgatttccaaaaatgtaattagcccattccacataaatggtagctatgtatttatagtggtgacaattactgtgaaggtagacgtgtgcttgttcctcattgctctgtgcatgtatttgagagagagcagtatgtgtaagggagagacccttccttttgtgcacacactgaacttgactctcggtgaagcctcctgcctgtctctggggctcctctgggtggccaggcgcaggctggacaacagcccactgtctaattctttttttttttttttttttttttgagatggagtcttgctctgtcgcccaggttggagtgcaatggcgtgatctcggctcactgcaacctccgcctcctgggttcaagcaattctcctgccttagtctcccaagtagctgggattacaggtgcccgccaccatgcctggctaatttttgtattgttttagtagagacggggtttcaccatgttggtcagggtggtctcgaactcctgacctcaggtgatccatctgcctcggcctccccaaatgctgggattacaggcctatgccgctgcacctggccccccactgtctaattctttgttgcagctgccaagtcactctcagagccggttttcctaatatgcagttagcattctaagagttaacagattttgttttattttcccaagatcttttttaaaaattttcttaattataggtctaagaaaagcttattttagaaaaattctaaaagatgagaagaaaatcagcatctcctgttatcttctaacccaaatagctttgcattttacatagctggagtgatagtgatcagaatggtttttttagaaactttctgtattgtgaaattttattacagaaatgataagtgtaacacttcagtgatctacttatggaaaaggtcatctctcccatacttttgatgcctaccttcagagaaaccttcattagcaatctggcatatgtcctgcctcagactcatgaaaatatgaacaaagagagaggggtttctctgtttttttgttttgttttgttttttgttttcttaaaatgcgatcattttatacacattacccttcaacctgtctttttcacttagaaaaacatcatggacagctcctgtgggtcagtagataagcatattctttttaatagctgctgagacttttacttctgaagtgtaaattcgcactgggtataaagcagggcctaaaacaaaaagttccctgcccttttagagcctccccattctgatggagggaggccgacaacacgcagacagatgtaggacatgtcagagagtgatcagtgctctgaagagaaaaccatgggcagtccaagggtagaaagcaacgggtagatggagatgaggagcagccccagcttagccaaattctagtgaaggggcttcagtgcaaaggccctgtggccaaagcacatctgacctggatgaggagaggcccagggggttaggggcctgtaggaatgatgaggtcacatttagcagtcctgggatggtcccaggtgtttgtctgaaggttccaggggtgattctgctctgcagacaggtgtgatgtgcagatgaggaacgactgggtcgtgctgatggaaatggcctgcctggaattatatggagaggttaggctgggatcaggaaggtcacgaacaccatgatctcctcaagctgaaaactaggttctgtccaaatccaccagttttcaaaaggaattgggcattacaactatttgaacaaacttttttttccttcagaactattctagtgaatgctggctttttaaaaaacaggggatgaggaacctaattctgaataaaattgtcatgtgattataggacttgatatcttaattttgttgatacatagtattaaacattctattgaccgccctaaaaacaggattttttgctttgattttctgttctagtctaaagcatcacaaggtagtgaccttgaacaaaatgaagcctcaagaaagaataagaaaaagaaagaaaaatctacatcaaaatatgaagtcctgacagttcaagagcctccaaggattgaagtacatttatattttttattcacatggtgtgatataataagtgggtctttcttaaaagaaacttgggttcatattggtttcctaagtgaaaatctccagggctttttaatgatcatttttgtagtgctaaagaaaacagtagccactcttctc

SEQ ID NO: 42181 - DNA, 2300 bp, Homo sapien
tgtgtgccttggtaactcgaaagcatatgctgtgccttcctccagagaccactgtgttccctcccagggtggtgtgagcatcctctccaggagtttttattagcagttttcttatgagggagggtcagcatcaggagcttggcattttctgtgaattgttcatatttgttgcccatttgcttttgggatgttgacctcttttagattgatttgtaccttttttataagttagccctttgggtaagagttccaagtatttcttctggtttgtcagtttctccaccaaaaaaaaaaattggccatgcagagactttaggtgttttatatattggtatttcattttttagttgcatctaggtattgtgttatttctcagccttcccactccagcgtttaaaaggtttgcttttaaaattctgtatatctcctggttccttcatttgtatatgtttaggtaggatttattgtggtctaagatggacaggatgggcccacccagtcctctaggatcttctccctaactaaaccaaaatgctgttcctcacatgctgtttccatcaaactccggttttttctggcgtccatcctgttaatctgcatcaccttgtttacactatggtatctttatagtaaactttaatacctgaccatgttagcctgacatctttttatattttttccatattttttatttcttagtgaaatcccgtctgtagtaacttacagtattttaaagcaggcgtccccaacccctgggctgcagaccagtattatctggggcctgttaggaactgggtggcacagcaggaggtgagcattactgcctgagctctgccttctgtcagaacagcagcagcgttggattcgcataggagcacaaactctgttgtaaactgcgcttgtgagggatctaggttgcctgctccttatgagaatctaactaatgcctgatgatctgaggtggaacagtttcatcccaaaaccatcttcccctgtccgtggaaaaattgtcttccacgaaaccagtccctggtgccaaaaagattggggaccgctgttttaaagtgttagattaatgtggagttgacatttcatcattttggatcattctatgcaggagcataggtgccttttcatttgttcagattttctgttgcggggatggtttaaaagacagggtctcactctgttgcccaggctggagtgcagtggcatgatcatggctcattgcagccttgaactcctgggctcaagttactgagcttgcctccgcttcctgagtagattgactacaggcacataccaccacactgggcaaattttttttcttcttttttttttttgtagagacgggatcttactatgttgcgtaggctggtattgcgttctttaacagcatgctgaagttgcctgtaaatcttttcatgtttcttgaaaaattcattcctaccaactatagtcttgtgctgctgttgtaaatggagtcatctctttgatatatgccaactggctgctgtgtgcttgtgccacaccccctcatgtatttctcatgctgttaggagtacttctcaggtgctgttgggttttccaggtgcatcacctgcacatggtactcatttcacctccatcctctctctggtgcaccagccttggctggtccctggcccagaagcagggtcagggagtagagggtggtgagccctcgggagccagacctgtgcctcgaccaggggtacaatgtgggataagaaacttaacctttctgtgcctctggttgtgcatctgtcagtgaggacacagcatctgtctgccttttgggatttgggggaggacacaggagctaataggtggtaagtttcagtaatactaatagttaacttttcctgttaagacaataccagctgtgtgttttctttccatttttccccatatttttggagagttgattctgcaacttgctttctccttgtattttcaggggcgtctgccttggatataaaatcatagatgggtgtgttgctaagaaaaagctctttgcaaccagtattaacaccacactccatgtgacatgtcttcctgtcatttttcattgtcctttgaccaggtgggctggatgacactttgcacacaattattgattatgcctgtgagcagaacattccctttgtgtttgctctcaaccgcaaagctctggggcgcagtttgaataaggcagttcctgtcagtgtggtggggatcttcagctatgatggggcccaggtgagtgcacagggcacaggcctcttcagtcactgcccgtg

SEQ ID NO: 42182 - DNA, 2300 bp, Homo sapien
ctcaaaaaaatctgtttcttaaaatgagattttacctggatgcccatcagctgggaaagggaatatctattccccagttgatgggcacctagatgtacatagagacatatgtttgtacatctatgtaatatgtacttatatttgtagatagatacatggaattatctgtggccagagtccaaaacattttgagtgggaaaaaacaaattatagagtgttaagttttgtttttttttaaattctgcacaaaaaccaaacctgttcacaagggcttgtccaccaggccagggccagatgggccgccaggcaaaacagttttggagcaccttctgaatttccttgagtttacagaatgtttccttcaaagtaacacttttataaaaaattattattataaaagcaatgcttgtttgttataagtttggaaactccagggaagtataaagaaaaaatttaaacaatcccaaatttaaccatccagaggtagttaccaccagcatcccagccatttttgggccatgactatctacgttcacacatgtatacatgggtgtgtacatatatgcacacattcctagatattgtttcacttatttttctgtgttgctgaatattcttcgatggcacttcgaatgagtgacttgtggcccccttcttggacatttcccaactcctcactgatagaaacagggcttcactgggcccatccttgcctcgggactcattcctaggactgcccagctaaagggtctgagcttggtcaagtccttgggaggagcattctctggtgatcctggacagtggggaattgttgaccaagagaccggacaaagatgagcagatgccacagtcagtaaagcagggaaaatgcattactaaagtcagcttcattaaactggcgatctcttcttttcaaaagtccagcatgtgccacagaaatggaaagctctctggccactactgtcctgcccagggaggggagcgtgggtccacccacaccatttaatacctgtaactggatgcacctctgcccctacacctgagaacaaggccagtttttgtgtgtgcaggtactttggactcttttggctctggaatttgttttacctgctcagtgttctgaactccttccttttcactactaagcattctccatgaagccacacttcattttgtcattgtgaggttgatggacatctagggcaaatctaacttctaaagaccaattcttacgaggtgtcatggtcaagcagaggccatggccggcactggtctaggtggcccatggcccatttgggggccttggtgggcctcgaggaagggcaggtgctggtcagggagccgggtcgctaggcagcaggtgggtgtcaccccagtccacgctgctggggtgcctggcctgatgcaggctgtgcctgagggagacagaagcagcagagtaggctggccggcctccccagccccaccacaagcaggagcttcagagacagaaggagcacctgcaccccctcacctgccctccagggcctggcctggccctcccagctcaactccagggtctgtacgctctggggctggagcttagtgggactgtggcccccctcagccctttctgcatttgagtggaagccagtgtgcgaagcagatcaaaatggatgtgcttgtttttccttcagtaagaacagggagttgagcctgtcccaacatggccagcagcccctggagggccaacagacttcacgagcaaggaaggccgggaggtgacctgctgaccagaacttacttgtgcccctcccccccgcccaaaacccccaacattctggttttcacagccccaccccagccacctggaacaaatagtgtctaggagtagccctcagggttggccgcgcagacttcttgccctgggatgaggctggcctccccaggcgaggcagcctgggccacaggggaacgtctctgcctcgcccaccctcctgatctctccatcagacaagctgaggccagccaggctccaccctggcaggttgcaacagatggtctgagtgtgtgtgaagtaactggcctctctactttcttcaataagtaattaagatcaaaagcccagagaaaaacaacagaggtttgcggcagaagtggccaatgtcgggcccagagtccatgctcaaggctggaagcccatcctggatgtgctgcactcggcagtcctagtgtaattctgcagggcctggcccctgccagggtctgagctctccagcctgtggcatctactcccctccaagcccaccccagtgtctcaa

SEQ ID NO: 42183 - DNA, 2300 bp, Homo sapien
gtcttctcacgacagtcctagctgtaggagaaagatcattacctacggcatctgccacagcagttaatttgccttcaacttaagctagttgcagtgacaggaagggccagggggaaatatctgtcctcaggacctctaccctagatccttgtaagccacaacaacttcccttctttgagggcgcgaccagtgtcacctggctcgccactgggaagagccaaggcacatccaggttggtggctgctgagccccacagcatcagaccagcctcttgtccccaccccacagaggccaagggggtgatctgggagtagcaccccagcctggccgctctcttgaggtaacagggttggatggttagggagcttggagcactggcccaagcaagaaaacagtggtgttttcaggaggccctgctgggagatggaagacagctccccactgggggcctaggattccaggagctccccagcagtcctccgtgggacatacgtgggtttgcacctgctgccctgtcccgctgagggtgcggtgctgatggggtggccctgcacactgatggtaactctcactttccctctctctcatgcattcagaaagagatggatagtttaaaaacgaatacatggaacgtaagtacttctttaacatctttaatgtcttatgatgatcaagcatgtatttaaatagtatttactgatgcctgttagcagtggtaagcacgtgtctgtttctgctcacaccccaagagtgtagagctttgagggttttgcagtcagtggtcccatgatggggcgttgggtgattaatccaatccagcttaggccacccagattcttagtctcaagggcttggtcatgagaaccttccagaggctcctgtgactcagtgactccagtcccctgggtggttcttggtgcaggtcacatgagggaggagaccgggcttttatagaactcacttcactgtctgttcaaagaaaagtgttacttgatcataacagctcaaaaaaatctgtttcttaaaatgagattttacctggatgcccatcagctgggaaagggaatatctattccccagttgatgggcacctagatgtacatagagacatatgtttgtacatctatgtaatatgtacttatatttgtagatagatacatggaattatctgtggccagagtccaaaacattttgagtgggaaaaaacaaattatagagtgttaagttttgtttttttttaaattctgcacaaaaaccaaacctgttcacaagggcttgtccaccaggccagggccagatgggccgccaggcaaaacagttttggagcaccttctgaatttccttgagtttacagaatgtttccttcaaagtaacacttttataaaaaattattattataaaagcaatgcttgtttgttataagtttggaaactccagggaagtataaagaaaaaatttaaacaatcccaaatttaaccatccagaggtagttaccaccagcatcccagccatttttgggccatgactatctacgttcacacatgtatacatgggtgtgtacatatatgcacacattcctagatattgtttcacttatttttctgtgttgctgaatattcttcgatggcacttcgaatgagtgacttgtggcccccttcttggacatttcccaactcctcactgatagaaacagggcttcactgggcccatccttgcctcgggactcattcctaggactgcccagctaaagggtctgagcttggtcaagtccttgggaggagcattctctggtgatcctggacagtggggaattgttgaccaagagaccggacaaagatgagcagatgccacagtcagtaaagcagggaaaatgcattactaaagtcagcttcattaaactggcgatctcttcttttcaaaagtccagcatgtgccacagaaatggaaagctctctggccactactgtcctgcccagggaggggagcgtgggtccacccacaccatttaatacctgtaactggatgcacctctgcccctacacctgagaacaaggccagtttttgtgtgtgcaggtactttggactcttttggctctggaatttgttttacctgctcagtgttctgaactccttccttttcactactaagcattctccatgaagccacacttcattttgtcattgtgaggttgatggacatctagggcaaatctaacttctaaagaccaattcttacgaggtgtcatggtcaagcagaggccatggccggcactggtctaggtggcccatggcccatttgg

SEQ ID NO: 42184 - DNA, 2300 bp, Homo sapien
cacccgacacacaccacaccccagacacacaccacaccccagacacacacccccccccacacaccacaccccaaacacacccccacacacacaccacaccccagacacacacacactacaccccagacacatcccacacacatcacaccccacacacacaccccagacacacaccacaccccacacacacaccccagacacacaccacaccccagacacacaccacaccccagacacacatgccacaccccagacacacacaccccaacacacaccacactccagacacacaccaaccccacacacaccacaccccagacacacacaccgtcacacaccacaccccacacacatgccacagcccaccccacatacgcaccctaccccagacacacaccacaccccacacaccacaccccagatacacaccacaccccccccacacacaccttatacaccccagacataacacacaccccacaccccagacatacacaccacacccccccacacacaccttatacaccccagacataacacacaccccacaccccagacatacacatacccctgacacacaccacaccccaccccagataccacacaccccacaccccgacatacccctgacacagctcaccccagatacacaccctaccccagatacacaccataccccagacacacaacacccccccaacacacaccatcccagtcacatgccacacatcccagacacacaccccacacgccacatcccacacacacacgcccgacacaccgcaccccagacacacaccacacccacacacatgccacaccccacacatacaccccaccccacacacacatcacacccctcacaaccacaccccacacacacaccacaccccacaaactacatagactatgctagccacataccacacaccagacacacacaccacacatgagcatgacgtataccgcacacatgccatgcactgtacccccccacacacatcccagacacacataccacacacactacacagaccacacagcagacataccacacaccagcaccacaccccctcacaccacatgccacacacaccacatgccagcatcacacacacaccatacctccttcatacacaccacacacacaaaccagacacacacctacataccacacaccacacaccagccacacaccacaaacacaccacacacaccacacgccacgcatatatcagatacaccacatacgtacagatacaccacaatatacaccacacgacacatgtaccacaacacacacacacgacataacacgcacacacatcacaaacacaatcatgtccaccacacaacacacacaccatgtgcatgcacacaataaatgcacagcacaaaacatcacatacaccaaatcacacacaccacacacacatcaaacaccatacacacagaccatgcatactcactgcacatgtgcacacataccaacacacaccacacacacacactgtacacacacctaaaaccacccccatacacaccataccaaacacaaccactcacacatgcaccacacacagcacagcatacaacacacatcacacacacaccaatcataccactgttacacacacaccaccacacatactgcacacaccaaagcacatacacaccacatagacacatgcacgctacccacaccacaccaatcacatccacacatacacaaccatacacacacacacacacattgttgacttaggatcgtttcaactcacagtgggtttattgggatgcagccccgtggcaagtggagcagcatgtgtattgacaaggggaggaaagccgtctggagctggtgaagtaaagttagcatgcagccgagctctgctcgtctgaactgatgaacccaagttcctcatggatcactcagaatacagatgggtgaaaaaataaccccaccacccgtgtgccagcacatagcgcatctggcatacaaacgtaaggatcaatagcgatgaatggcgatgggttgtgtctacatgcagatacaaatcatgcacttgtacattagtgtgcacacacagaaacagatcgatataattttttaaccaaagtgcagtctttaccctgtcagggccctgccttcacctctgccaggactatcttccatgtcaagtttagacccgtgtcattttcaaagctaataatggttcccccatactttaggcagcatttagatatttggatttgggatggccttttatgttttaactacagtgttagaaatcagagcc

SEQ ID NO: 42185 - DNA, 2300 bp, Homo sapien
agtggtcgccaagcacgtcctggaagtgaaggtggttccaaagcccgtagtggcccccaccttgtcagttgttcagacagaaggtagtaggattgccaccaaagtgttggtggcatccacccaagggtcttctcccccaaccccagccgtgcaggccacctcctccggggccatcacccttcctcccaagcctgcgcccaccggcacatcctgcgaaccaaagatcgtcatcaacacggtcccccagctccactcggagaaaaccatgtatcttaagtccagcgacaaccgcctcctcatgtccctcttcctcttcttctttgttctcttcctctgcctctttttctacaactgctataagggatacctgcccagacagtgcttgaaattccgctcggccctactaattgggaagaagaagcccaagtcagatttctgtgaccgtgagcagagcctgaaggagacgttagtagagccagggagcttctcccagcagaatggggagcaccccaagccagccctggacaccggctatgagaccgagcaagacaccatcaccagcaaagtccccacggatagggaggactcacagaggatcgacgacctttctgccagggacaagccctttgacgtcaagtgtgagctgaagttcgctgactcagacgcagatggagactgaggccggctgtgcatccccgctggtgcctcggctgcgacgtgtccaggcgtggagagttttgtgtttctcctgttcagtatccgagtctcgtgcagtgctgcgtaggttagcccgcatcgtgcagacaacctcagtcctcttgtctattttctcttgggttgagcctgtgacttggtttctctttgtccttttggaaaaatgacaagcattgcatcccagtcttgtgttccgaagtcagtcggagtacttgaagaaggcccacgggcggcacggagttcctgagccctttctgtagtgggggaaaggtggctggacctctgttggctgagaagagcatcccttcagcttcccctccccgtagcagccactaaaagattatttaattccagattggaaatgacattttagtttatcagattggtaacttatcgcctgttgtccagattggcacgaaccttttcttccacttaattatttttttaggattttgctttgattgtgtttatgtcatgggtcatttttttttagttacagaagcagttgtgttaatatttagaagaagatgtatatcttccagattttgttatatatttggcataaaatacggcttacgttgcttaagattctcagggataaacttccttttgctaaatgcattctttctgcttttagaaatgtagacataaacactccccggagcccactcaccttttttctttttctttttttttttttaactttattccttgagggaagcattgtttttggagagattttctttctgtacttcgttttacttttctttttttttaacttttactctctcgaagaagaggaccttcccacatccacgaggtgggttttgagcaagggaaggtagcctggatgagctgagtggagccaggctggcccagagctgagatgggagtgcggtacaatctggagcccacagctgtcggtcagaacctcctgtgagacagatggaaccttcacaagggcgcctttggttctctgaacatctcctttctcttcttgcttcaattgcttacccactgcctgcccagactttctatccagcctcactgagctgcccactactggaagggaactgggcctcggtggccggggccgcgagctgtgaccacagcaccctcaagcatacggcgctgttcctgccactgtcctgaagatgtgaatgggtggtacgatttcaacactggttaatttcacactccatctccccgctttgtaaatacccatcgggaagagactttttttccatggtgaagagcaataaactctggatgtttgtgcgcgtgtgtggacagtcttatcttccagcatgataggatttgaccattttggtgtaaacatttgtgttttataagatttaccttgtttttatttttctactttgaattgtatacatttggaaagtacccaaataaatgagaagcttctatccttgatttggggaagacattccttagcggaggctgtgcagcctcccgcccctgcatggcccaggcgggacagctgggctcgctcttttctgtccgtttcctgctgtgttttgccctctctggcctgtgacgtgctcctggcgacttcttcctcagtg

SEQ ID NO: 42186 - DNA, 2300 bp, Homo sapien
cctgctcaccactccccagctgatcacagcgcaggttaatcttggctggcttgagtctgtgtgccttgggttctgcagcacatcctcgtgcgtgtcactcagcatccgtctgtgacatttggcttgagctcacccagggtcttcttctcttgccttgccaccacgtattccggtgtgtgtgtctgccacaatttaggcacatttatatccgccacgggtgtctgctgccctctcggcttccagtttgaggctgttaggaatgatattttgaacatccttgcacacaggctgtgttttagccttttattgtcctttcaggacaccaagggccctccagttcttatggctccacttcctggggcaggtcttgtctccgtggtggcacctgtggtttaattttgtctcagacctcccacgtggcaccctgtttccagtcctgctgtgaaccctctcctctgagaaggggcccctgaaccagctcctgttgcttgctgatgggccccgcctccctcgctggaccctcgggggtctctccagctgtcccctctgtgcatcccaccccaccgccacctgctcaccaaggccaggtgggcacgtccctgtcattcctaacatggtgtttttcagcttcacagtttctgtctctggctgcacagggtccactcaatctgctgccatctacccctcggagagcatgcagtgcctgcctagtgtgtcccaggttctgggatggcagtgagaggttgggggttggaggagaatggacaagacgtgttacttttagcgggagaaggatgtgtgtatgtactgatagtgagaggtgacagcgtgctagcagtcctcagagccctcgcttgctctcggcacctcccctgcctgggctcccactttggcggcatttgaggagcacttcagtcccccactgcactgtgggagcccctttctgggctggccaaggccggagcccactcccccagtttgtagggaggtgtggagggagaggcaggagcgggaacaggggctgtgtgcggcacttgcgggccagctggagttccgggtgggcgtgggcttggtgggccccgcactcggagcagccagccagcccttctggccccgggcaatgggggacttagcacccgggccagtggctgcggagggtgtactgagtcccccagcagtgctggcccaccggcgctgtgctcgatttctcaccgggccttgactgccttcccacggggcagggctcgggacctgcagcccgccatgcctgagcctcccacccactccatgggctcctgtgcggcccgagcctccccgacgagagccaccccctgctccacggcgcccagtcccatcgaccacccaagggctgaggaatgcgagcgcacggcacaggactggcaggcagctccacctgcagccccggtgcgggatccactaggtgaaaccagctgggctcctgagtctggtggggacgtggagagtctttatatctagctcagggattgtaaatacaccaatcagcaccctgtgtttagctcaaggtttgtgagtgcaccaatcgacactctgtatctagctgctctggtgaggacgtggagaacctttatatctagctcagggattgtaaatacaccaatcagcaccctgtgtttagctcaaggtttgtgagtgcaccaatcgacactctgtatctagctgctctggtggggccttggagaacctgtgtgtggaaactctgtatctaactaatctgatggggacgtggagaacctttctatctagctcagggattgtaaacgcaccaatcagcgccctgacaaaacaggccactcggctctaccaatcagcaggatgtgggtggggccagataagagaataaaagcaggctgcccgagccagcattggcaacccgctcgggtccccttccacactgtggaagctttgttctttcgctcttgctactgctagctctttgggtccacgctgcttttatgagctgtaacactcaccgcgaagatctgcagcttcactcctgagcccagcgagaccacgagcccaccgggaggaacgaacaactccagacgcgctgccttaagagctgtaacactcaccgtgaaggtctgcagcttcactcccgagccagcgagaccacgaacccaccagaaggaagaaactctgaacacatctgaacatcagaagggacagactccagacgcgccaccgtaagagctgtaacactcaccgcgagggtccacggcttcattcttgaagtcagtgagaccaagaacccaccaatt

SEQ ID NO: 42187 - DNA, 2300 bp, Homo sapien
cgataggcaggaatccactttctcatctaatttccacccatctgtcctcattctgcccttcataacaccacagagtaatccttcttcccgggacagttttgcacatattggggttcttctgtcttgtgctccacacattgattttctaggctgaagactcccggtgggtcaactcccctcccacgggatactgctggctgccttagacaccaagcaagggcatggtattctagatgtgtctgactagtgaggaataaaagagagtccccccaccccaccccaatcagtgcaatgcttgcatgtgtagatcctaagcgtgcatccctccttgggtatagaatgctgttaaaccagttctgtcctaatccgttcccattatgtttcaatccaaatgggatgtggaacatggattcatggacccctacaattggaaaagagcttggaaaagacttctctagtttttcctgtaatagtcaccagcactgaacccgagcacacggtgcagtgggctttacctgccattctctctccgtgctccccaaaccctccaggacgaccacactgtcctcatgttgcagggtacagaggtttgctgaggcctgaggttatttggaaactgcagagctgtgagtcaagggagtctatcagattccaggtctggattcttcagcaagagggtggtggctgccatgccgtagagggaggagggggtgcgtgctccaccccaccctgcttgacaccagctttgccatcttagcctttgctgggccgaagccctattctcagagctccggcactgaaccacagaaaccacaggaggccctagaacggaactctgagactgttgggcctttaactctgtgactgttgggcctgggactggcttcatttgtaaactctggctctcagagccagtgctcagcaggaaaacagcctcagggcccctgcccctcaacagcagtctgtagtccagggaggtatcacctggcctggagaggggctccccaactcctcacatttaggggaaatcttagctggttccgtaagaaactgtgtccccttctcaggactgtgttcctcaataggcctcccagcctggccagtcactgtgcgagccctgtcacctctcctgggggcagagggaagaggtctggatggagcagcaccatctctgagggcccccagatccccaaacccatgggctagtcacaaacaagtctcaccagcagcctcacaggaggaccatttgccatacagagtggaaaatgatgaacgtttggcaaaaggctagcacgggggttcagggaaaccaagactccaggtggtgccagcccctcccctggggaatgggagcagcctggtgtgaaatattcttgcccaaagtcagcagccaagtgttctgggtgccacgtgcctcacgcacactgcaggtcaggttctcagaagagctggcccagggtctgggggtgaaaaaaaactgggggatttgggggaggcctggaaagggtggggttcatccaggaccccagaaggggcaagcttgtctattgagagctggtgaggaagagggtgacagggcacctcttggtcctgggaacgggtgcttgactcagcagagaccaacccagggctgagggacaaccctctgggcctggcggggaggcaagagagatgggaggtgaggaggaaggagtggggagcaaaagtggggagaaggggagagaggtggaagagtgttgcgaaggtgaagaaagaggaggaaaaagagaagggaggaaaagaaaggttgggggagggaaaggagggaggtgagcaggggcgaggaggagggaggaggaaggaggaagaaaggggcggggccataggagggaagagaagaagggggagaggaaggggaagggaaaggggaggaggcgggaagggagggggagcggaggaggggcctgcgcgcccgccccgcgcactccgtccccgcgccggcctcagcgctctcgcgcgccgcagcatcccagccgccgctgccgccgccgggcctccccgccaccccctccccggcccggccgcctcccgccgctgccgccgccgccgccgccgccattcctggcgcccgaactcgcccggccgggagccgccgcgggcaggacgcgcgctgcaggtaagcggccgggctggcgcgggagggagggcgcgcggggccgggcaggtgcgctgggggcggcctggaccctccgcggagcccccactccacacccctaggctcctcaccggaccctcggggccctccccgaacccctgcagga

SEQ ID NO: 42188 - DNA, 2300 bp, Homo sapien
atacctatattccaatcacttaaaattaacatattttatccaatcaaggcatatcatcattttatacatcaagaaagaaaagaaactagcgaacaaacggggcataatgccgcctggctccgcttccccctcccctctccccccgtccttaggagacacctctggagttcagaaatgctaggagagcaagctcttcattcttagaatccaggaagggccgggcttttgcagctctcctctgccaggaagccgctggggggcgcaagacgccagcttctcaccttggcagaagtgcctgcctgcaagcgcagaatggaaacttccccataacaaattcagaagtaccttgtacattcaccacccacctgaagaaagcctgaatgaaaggaacaaagccacggcgttgtttactttcccattatcgccccagtcttgcggcagggcccgggtttccatccaatccacccggcccgccactgtcctggccagtctccaaggcttcacccaaaaaaaggaagcaatgaggtgtcccccagcgcgccttttcacgtagcacagaaggtgctcagtgggtgaatcctctgaaagtgccagcgtgtatggtcaaacggcagcaacctctagcctattaaactctcccaagatctcttccagacttattccattgccggaaaaaaggctttttacatatgcgcatttaagtaattaagatatttcaacatggtataagacgtaggggctcttactccatcagtactggatgggaatttccttttgccctctactccccagggtaactgcagtcccacctgaatgcgttttgcagcccttactcgggttctatttatgcgcagcttggacagggctcactgggcccggccgggcagctccgtggccgtccctctccaccgcccttcccccgcgccaggccaatgcaagggtgtgtgtgttggggggaggggaggacaaaaggggttcaggatctttttaacctgcctgcagatggcgccccgggaaagattccgagctgcattacctaagctccaggggctgcagccgcggggtcccggccacagggcgtccagccgcgaagactgcacagcagctctccgtccttcccaactcgcgcggctgttcggcacccgtgcgaggaacggatggaagggaattacttgtagcagggccagtactgggggcgtgcactcagggaccacggagtggcactcagcctcgaccccacgcgccaggcagcccggcgacccccacgcgcggcggggtcctgcccaccccacccggcggcaggtggacagtgttgctatgaagagaaagcctcgattgtccctacagcaaaccgccacacgccagacctctgctattgtgcgccctccatagaaatgcaaacgagcggcgtgcgccggccgcaatctgctcgtccccgcccgcccccgtctcccgcgccccgccgcgctcggccaagggcggggaggtggggtgggatcttccagagacggctcaatgtacacattgagtatgcctggcaggcatcaccagcgcgctcgggacgctagtggtcagctgcagggggctgtgcccactgccttttgcaagcctctaactggcgctacctgtttttaccttaatttctggctccaatgcaacagtctcatagacttcaaattaaagaaaagaaacaaatagaaaggtagcaatacaaaatgcaaaaaaaaatccctttgcttctataaaggtgcttttcgcaaattgcagcatcatataagcaaacaaggtttttgtgggttgggttttttcttttttttttttttttactttttccttttaaggacttcaaaaaaaaaaaaaagccaggcgagatgaaatctgcaggctccagtctgcctggtaacaccccaacaaaagcggcagatttgaggcattgtcatcccccgcacccctccccacgtggccttctggcacgagccgctggctcgccgcctcatttacatcagaaagcgggtgccggccaataggcgcgcagcctcgcgccagctggcggcgccgcacccaccagcctatataagggcgcgcagcgtagtaggggcgcactcgctggtggtgggcgcgccgtgctgagctctggctgtcagtgtgttcgcccgcgtcccctccgcgctctccgcttgtggataactagctgctggttgatcgcactatgactctggaagaagtccgcggccaggacacagttccggaaagcacagccaggtgggtttcagggcgctgagaaagccgctggtcggtcg

SEQ ID NO: 42189 - DNA, 2300 bp, Homo sapien
gtcttctgctgggcccacagcttccagttttccaagcaccccacccctccctattgtccacataggcttcatgcctttgggcccagccagtgaaggtgttaggacgtgccatcctctaaatctgaactaggtgggcatcatgaatccaagtcagtccagaaccatggcccatggacgggcaggtaccaggggggctctggggtgtgggataagcagccttgtccatacaagcgtgtgcaccaggtggggcttccctttgtgtctcttcctgtgggctgtgcctcactggccgagctctgtgtgtggaaatccagcctcaggtgactcacccaccccctcagagggcctggagctctgtgatcaagacctgctcctctgctccgcttcccacctccctgtctgccactcagctccccaggacctctgggcagggtccccctgagacccggcatccactctggacaccactgggcttgctgactcttcacagccttgttccagactgcatctctgcaggacttacttctgtatggtgtcctggtgatccagcactccctgctctgctaaaatgcagactccaggggcaggctcttgttttgtcctggaagaattcttgcactgtaggagtgaattcaacacaagtcacagccagcttgctccatcttaaaggcgaggagccccagccccaagtcctgagctcttgccaacctgttcgagaccacacattgaccctggaagaggaggagcaggtaggctgggatgtgcccagggactttctgaagcctcaatcatcccagttatgacctccccctgcccctccttgcagcatccctcttcattcctcgtggagaagtgtgggctccatagaatgaactggcaagtgtgcactgtgtggatggctctgagcagctgccaccacctggggtagcatgggcaaggcagacgacacagagtctccagccagacccctattaccagctgcctggcctgggactagctatgtcacgtctccctgcctcagtttcttcatctgcacagcgaggataataacagtgcttacctcttaggattaccatgaggctcaaagaaggaaatgcagagaaagtgcttaggacagtgctggccttgtaggaaagactcacaaatattcattgtttcgttgatgagagcaagaagtgcgcttgttacatattcacccaatagtgtggggtggaggaatgaggtacaggtggataccctcttggaggacctgctagcgtcttacttcctctgtacatggatggcaacacagaggcagaagtctcaagttaacttctttttcgtttcaaagcatctcatgacatttaatacccctgcactcatactcgcccggaagtgtgagcttggttcatcactaatggatattttcagccctgctgaggaatctgggcctgctccttgcctccctcaccttcctctgcagcccatgtgaattagcctgcttgcctgctcagggactggtccccgcagtgtggctcctggggccccagcttcactccttcaagggccaggatgttgaagaagggggaaagggacccctacactagcctgccttgtgtggcccaaagacccttgccaagatcaggtgggggtcaaagtgcaggaaaagaaggatgtcgatttcagaagaaactgttgtgggaatggcaggatggctccagcgtcagcgtgccttcctgcagctaccccggggccgcacgccagcagctcttggcagcagtcacacggctctcgcatccaacctctgccacaggggagcaggcctcacttcccccagctttgcttctctgccctgcagggctcctttcctgtcccagggagctctactttccaagcagttccatggccaacagctggagtcttattttagggacgagctggcagcccagcatttgtactgaatgttccgggtcggcctggcccgcgcctggtgcaccagtgggaaccccataagtctgggcttgggggagtgaattacttctgaggtttgctgacattctgtttggctgcctgaaatgctttctcttcattcaaagagcagctgctggtctccgcccctctgtctttcctttctcctcccggtggcttccctgttcctgtccctggctttcctggctttttggatccccatcctggctctggggggaaggaggatgggtctggagcacctgtgagacccgagcctgggcccaccacagcagaggatgcagcctcccaaccccaagagtcccagattggagtccctgagagaagctggggta

SEQ ID NO: 42190 - DNA, 2300 bp, Homo sapien
gagtgaggggagcgctgccttctcagtccccacaggagccctcactgatggagcatcttcactcagctaagaccccctcagccctgtccagcagccttccccattctaagcactctgaccccagggactagaaggtgcttgagagcgggggccatgtgctccgcatcgtgtccttatcatcatctcagcacaggcagcttctgactctgctgcattgtcctcatgtgcctacataggctgagcctgcagagatgccttggacaaggctggccaggggctgttgacactggagcatgtgcacactgggggaaggattgcacactgggggaaggattgctcactgggggctgtgcgcaccatgtgtactggatgtacacactggggtgtaaatgctaagaaagggcacactaggaggatatgcacactaggcgtgtgtacactaggcatgcactctaggcgtgtgtacattgaggagatgtgcatactaggggatgtgcactaggagatgtgcagactgggggcatgaacactgggctaatgtgtacactggaggcatgtgtacacttgggggcatgcatactagaaggacatgcacactggaagaatgtgtatactaagagaatgtgtacactgcagggtgtgcacactgagggaacgtgtatcctgggggcatctgtacacttggggtgtgcatactgggggtcatgcacactggagggatgtgcacactaggaaggtgtgcacacagaggggatgtgcacactgggtagatgtatacactggggggatgtgtgcactggggggatgtgcacactaggaaggtgtgcacacagaggggatgtgcacactgggtagatgtatacactggggggatgtgtgcactggggggatgtacacactggggggatgtgtacactggggggatgtacacactggggggatgtgtgcactgggaggatgtatacactggggggatgtgcacactgggggaatgtgcacactgggggaggtacacactggggggatgtgcacactggggggatgtgtgcactggggggatgtgcactgaggggatgtgtacactggggggatgtgtacactggggggatgtgtacactggggggatgtgtgcactggggggatttgtgcactggggggatgtgtatactggggggatgtgtgcactggggggatgtgtacacactggggaaatgtgtacactgcggggatgtacacactggggggatgtgcacaccggggggatgtgtacactgggggaatgtgtacactggggggatgttcacactggggggatgtatacaccaggaggaatgtgctcactatggggatgtgcacactggagggatgtttacactggaggcatgtgcacactaagggaatgtgcacactgtggggctgttcacactggaggaaccaggagtatgtacatactggggacaggaacattcagttaatcacacttgggatgtgcacactggccaaggcacttgcactcactatgacacccacagagcaatggcattagcagacctcgatcaccctccatggaagggcacccttcaaatctgcatacctggaaagccaccgtcggttgtggagtggtgagattgctgaaccacagaggctggaatgccctgtcctcctcctcagcctgctttgaaatctctattacgtctttcctgctgcccctgctgccagatgatcccagcagaatcttgtgctttttaaaatttgagtgttttgttttgcacagttgagttttcattctgctgcagccccttcaggcaaaagtgaacccagcctggggcatgctctcagcaaggcctcaatgaccaaaatccatactggagtgcattttgcccctctgcttctgggcagtcagcactccagctgcggctgcctcaccatcttctatgttctccttgctagaaaagcagtatttcaagaaaactcctcggtgagctttcccattttaattcagcctgttgcttaacaagcagtcatatagaataaataccagtgctgaacacatgctgaggctcccataaaggatgcagagagaattgacattgttcttctaaagttaaaaaccacaattttattcaggggagatctttataagccattcatccagtagagcttgctattaggtgcatacagcgatacatccataaattttgcggggcagcttcttgacagaaatgcaatgctggcagcagcctttcttgcgtttcttgcagcagcctttctttcttgcaacagcctctcttgctggcagc

SEQ ID NO: 42191 - DNA, 2300 bp, Homo sapien
ggtgccctggactggatcctggaactaaaacaggacataatttaaaaaaaactgatgaaatccaataaaatccacagtttagttagtagtaatgtaacaatgtcaatgtcttagttttcacaaaagcacagtgatagcatctgatattaatgatgggggaaattcagtaaagggtatatgagaagtctctgtaatatctttgtaacttatctattaaatctaaaattattccaaaataaaatttattttaaaatattgaagccctaaaagtccacaatgatatcctttaatcaaatcaatgtttttcctcttcctgtgcttgcctgtaaatacggtgcatattcatttttatgtatgtgaagaaagatactgaatagatattataattggctgttttacttaacatttattaatattttatgtattgcttccttcttccctcatccttctaacacaaccatggaaccagtattgagggcctggcgtgtatgttacacaacttctgcacggccaggccctcagatacaaacatacacacacatacccgtggatcacaaatgtctccccttcttcatcgtgttatttatttattttcatgtttatgtttttctgagacagagtttcattcttgtcacccaggctagagtgcagaggcatgatctcggctcacagtaagctccgcctcctgggttcaagcaattctcctgcctcagcctcctaagtagctgggattacaggtacctgctaccacgcccagctaatttttgtatttttagtagagatgggatttcaccatattggccaggttggtctcgaactgctgacctcaagtgatctgcccgcctcagcctcccaaagtgctgggattacagacatgagccaccgcgcccagctcattgttatatttatatatctgtccaacttatttctttacttcatggcatgggcatccctataattcgatgaatgtggatctaactcaacatgcttaatatctgaacgatactctatattaggtgtgtagtcaacttatttaagcattttcctgttggtggacttgcaattttgtgctggaatatgtctcattgtacctatgatatgcgcaaatgacttcatttctgcagactagatgagcagaaatggaacagatggatgtgtgtgcatgtgtgtgtgcatatgtgtgtgtgtgtggatgggaaaatataataaacaacatataaaatgctctctcctttacctcctcaccaacgtggataatattaatatgatggtttttccaatatgataaaccaagatagatgtaattatttattttcatttactttttgatgcttccatatacgacttgatatttttaaaaatatgcttatcaaccatttgcattcacctgtctgtgaattgcctatgaataggattcactcatttttttctgtgttatttcacttttattataagtttgtaaaagttattgatatgttgtccatattaactcttgttatagctcaagtaatattttccccagtatccttgcctttgttttgtttggggtatcctttgttgtaattaaaaaaacaatcctatagtcaagcatgcataacttattgactaaatggaacttggagggcagaattatgaaatagactttttcccttacacagcacaagtcaaatgtttctcccttctcaggttccagaaggcatctcaggcactatcaggatcaaccattacggtcatctccggttatcattccccagtctgatgatcagatattgaatgtccagcctaatctaaacctcagtctcccactctcatctgaggaagggctcccccagccatggtgagaagtgaagccagctggacttcctgggtcgagtggggacttagggaactttcctgtcttacaagaggattgtaaaacgcaccaatcagtgctctgtaaaatgcaccaatcagcaggattataaaagtagccaatcctggggaggattgaaaaaagggcactctgataggacagaaaaggaacatgggaggggacaataagggaataaaagctggcaacccccagccagcagctggcaacctgctggggtccccttccacgctgtggaagctttgtccttgcagtcttcacagtaaaccttgctaccactcactctttgggtctgtgccatctttaagagctgtaacactcactgcgaaggtccacagctttattcttgaagtcagcgagaccatgaacccaccggcaggaactgactctggacacaatggcggctcctgaccagaccctcagaacctga

SEQ ID NO: 42192 - DNA, 2300 bp, Homo sapien
gcctcacagtcagctggcttcagcctgttggggtaattttctttctagagcacctggagtgctctttcaggggatgtggccaccatccatccttcctgggcccttttctcttggaagaggatcaccttctgaaaactacaagtgtctttctttgattacctggaccaggtattgggccatcttcttgtagcagttgtgagtcttgacacacgcagttcaagtacccgcgcaccttgggaagcctttgcttgaggtccaggcagtaggcgtcctcccactgaggccccatcatgcattctcagtgtagttcaggcagagcgggaagcctcagctgcagcttcaggagctccctccatggctgtgcccttgtcctgcagagaggcctgctctggtcagactttggtcttgtgttacgcgttctttactccttgttaattcttcccacaattgtacatctgctgttccaatctccccttcaggacatttgaaggatggacctaagtcaccattgtcatccatactcttcagagggacttgtggctgggacgctggggaaccagtatgttctgctttcctgttcccctccactgctaagtcctcatcctccacgtggtctctactgccctggagcagatgcaggatgctcatcggggtgtgggctggggaagtcagttacctcactgcaacatttgtggcctgtttgattcctgccttgccctgctctggcctttccgccttctccttctttgactgcaagcgttgcttcagtctcgctatttcttggttaagcagctctgcagtttgctgacagtcagtgtggtcattcatatcatttgttctttgctcctaaagatcttctccaccatgtggtgaagggtgtaggatgtgccttgcatcagttgctcatgggagttcaggaggcctgctttttcatgctcttttcagaagctctcctagatgggaagaccatcttattgggatgggaagacctgcttatttcctttacaaccctgaagcagagggtttggggtgatcaatgactggcttctagcctgggtgacatgaggccagcgccagcctggggtgctggctgcatcttggctctggtcttttcatggacctcgccctgggctgaatccctttgtgctagctcctcccttattctcactgagtgtcctctcctgaccacaaaggccaccacggcagtgcatacctggaccacccagggtatccacagggtcgctggcgctagtcccaggattctgtacatcactatcactgctgcccacagggtggccagcagcagctgaacaggcattgtgtggtgggcagcaggccctccgtggctcccaagggctctgcagcactgcctccacttgctagtggcctgtgggccacaacggaccacttggaaccctgcggagagttccgtgcctaacagaaacaagggcccaccaccaacagggtagatcgtccgttgggctgggggaaggggaggcatcccgtgtgttagaaaagtgtgtccctgatttcgctgtgcaaattgaaagtggcattacttttgcagggccttaggggagtgaaaagagctcctggcagcccttagctcagggcactccaggccccacccggccctacagcacagctgagggatcaaagtagcgccatgtctagccctaagtccacacacgatcctctcagggcagcgtggcggcccatccctggtggggctcattaccccaattttaagtttccttctgcagcagggaagcctggtcctgcctgcaaagagtttgtctcccttgctagatggagctccttgaagaaggggctgttttcttcatctactctgacttcggacttgtcactttcccctcttgacctccatattcagatccgtgaataggagtaagtgggtaaaggcccctctagctttaaaacccctccaatacagagagaactctgaaaccagaaccagaagctgaggcgcggtgaatggagcattttccctggcatgatggatgggacctacggatctggctgtgaaggcggtatcttgtcactggaatgcctctgcagactcggacccttgcaacacacagtttgcaaacccattgcaaacccatagtttgcaaatcagactcaagaatgatcttcagtattggtggttttgtgtgggttttgtttgttatttttatttgtttttgagacttcgttattggcacaacagcttctggaaatctgtttcacagagagtatgggggcttctttggccaaatggagtgggtacttatgagttc

SEQ ID NO: 42193 - DNA, 2300 bp, Homo sapien
ggcactaatcccattcatgagagctctgtgcagaggtcccacctcttcaagttggtaactagaatgtcagcatatgaatttttgggggacacgaacagcaacttcacataaacacgttgaaatatatggatgtttgcatcccatccacggaggtcctgtgccagttgtggcatgagctggactggaaattggaccttgttttaaaatgtatttatagctcccctgctgattctaatgtgcaggcagatgtcaggagcccctagcctagaagcaaatgggtcaggctcttagaaggatgtaagttaaggggaagttaaaagaggaatttgggagcaatctgctccttctggctgatgaaagtctagggattgtggggagtgccaaaggggccagagacatcatattaagtgagttgctccttgtttaaatgaggcctttgggcctctgcttcacattctcagaacaaataatgatggcatgtggcaaaaggcaggcttcttctgcattgtgggatattcagcatagaactggctctctttatcagctcctgatttgctctccctgcttccatactagcactggatttttgcttatttaatctttttaccctcctttgtttagttcttaaattccattttgtcatttaacctgataacctacattttggttgtcatggaaaacaacatcctgacttataaaactggaaggttgtttcaggacccagaaactgcatcaggcagtgctcagaatccactgtcatcatatttggagcctcctctgggatgggtttctgagtggccatatattcctttgcaatgaagaggagactgtggaggacagggtgaccactctgcttttagacatcattagtgtaggggcaggtttgttgaagtagccttaaatgactttagtaaaaagagtgtatttttatttttatattccaatggctgtaggatcaaggccagaattaggatgaactggggaataaaataagttttcttgactataagttgtaaaatgcgtagtttttaagtatgatttttaaaaagcatatttcctgtgaatagcagggcagaattttactatggaaatgaacttcaaaggttaacatgttttaattatttagaaagtgaagacgggattaaaacagataaataggattctacaacaaaaatcaaatgtaaagaactacagaatattaattttgctcaagtcttttagcatatttggtattacaaaagaatgagtaatataaccaagagaagaaatcttccttcagtctgtagtttaaacttaacatggatcaatgttatgctcaagcacttttaaaaatgcctgcacagaattgttagccattaatattttttcttgctgattcacctgttttttaatcaacgcgtctttgacaaaattgtttatcaatgtcaggaaataaacgtggtcatttgcttgaaatgctaatgtgaaaccactcagtgaaaaagcaattctaatccaagcttgccaatggcggtgttgtcataggatcctattaaattagaatatattaatctacactgtgtggttggctatggtatggggcagggcatttcgtctgcctttaaatgagtcggtttttaaaagttaaaatctggaaatggaaaaaaaaagtctatatggttagtagcgattatagttcgcaatgcgaacaaaagaatctggttccctttcaatggaattattttaattcattaaattatcagaaaattccagtcctcgccatctattccaagagcatgcagtaggtggcacctaaaagctctttggaggcgaacaggcgccatttaagcaggagcagcagcctctgcagcagttggcacatctgagaaggcagagattgaagagagtaggaggagcgtgcagcggcggtgacagtgccaggccggagcggctcaggccagcgcaggtgcaggggctgcgagcgggtggagcgcgagggcgctgggcgcagggagcacggccggtgggcggtgcagggcgcacggcgggcgagcagctgacagcatcgtcacggcggcgggagggagtgcgctgcgcctgcctccgggaggagccgcatccacacaccctgcgctgccctgtcctgcgcgagtggagctctgaagaagctctgagcggagttgtgttcttccccaggtaaccgatttcccccttctgccgtggcttcgctgcgtccgcattggggcacgggcggctttggcatgattgtttgccagcccctggaaagggattaccgctctcagggagggcgagtcagcgtg

SEQ ID NO: 42194 - DNA, 2300 bp, Homo sapien
ttgcattcacaacagcaatgaatgagtatttctattgcttcacatcctcactagtgttcactgcggtcagtgttccgaatttgggccatactgatatcttactgtcttcatttgcatttccctgatgatacataatgtgaaccatcttttaggctaggcatggtggctcacgcctgtaatcccagcattttgggaggccaaggcaggcagatcacgaggtcaggagatcgagaccatcctggcgaacacggtgaaaccccgtctctactaaaaatacaaaaaattagccgggcatggtggcgggcgcctatagtcccagctactcgggaggctgaggcaggagaatggcgtgagcccaggaggcagagcttgcggtgagctgagatgatcgggccactgtactccagcctgggcaacagagtgaggctccgtctcaaaaaaaaaaaaaattactacatgatactaagtaatgcggaaggtgactcaaagggggaaaggaacacagcagtgtaaaggaaggaggttgtagatggatctagaatttccccctcatttccatcaggtgaaagcctgagaaaactgcaatctttgtgcaggctgggtttgctttgtacacactggtcccctagtgttcatctccaataatgctgacaactctgaaaaccatctgtagacattctgcaggctccatctcaggaacaatggctattttttcgggtagttgaagcaaaattaagtccaatgataagcaaatataaccattatcaaaatcttccatttatgtttgttaaagcaacctaagtatgatctgagaaggactctgtattctatatttgagtccttgtggatgaactgtaacctagcttaataggcagacaagattgaaaacctaatttaggagtatgtgcctttaacaatagctgagtcttggccaatcccagtggccatacttcaaccattcatacactgctgagtgttcaaactgtgttcaaagaaggcaaaagccaacctgtaaccaatccagttgtttctctgccttacctccaatttctgtatgtcacttccctttttttgtctataaatatgttctgaccatgaggcatccctggagtctctgaatccgctgtgattctggaagctgccccattcgcaaatcattcattactcaattaaactgctttaaatttaattctgctgaagttttcttttaacaggtttagaaaaaataatggcaaaaatgaatgaaaatccaataaccctggaagcagaaaaggctgggggctccaataagtgtaaatagtcccatccctatattttctccatggcaattacaatccagcacattatatatatatttttttgcttctcgcattttggcttagggtaaagctttttaaaacaggcactgccaaccagtgttatcaagaaggtctggatgccgttttgtgggaacattttaaagaggaatgtccaaaaggaaaagggggatgggttgggagaagggtatcaggcgggtatctcaaaaccattcttagggctataggtttaatttatttggttgtggacgtcagagccgtcatggtaagaaggaagcaaagccttttgtaataattaaagccttcagaagcagcgtgccccattgcccactagtgcgccgtgaagtctggtgttcacctacagggtccctctcagcactgcccaggcctcccgagtgctccagcacagtagcttggagcttgttggtttggtgaccaagatacactccagggaatatgccatgcagtggagtctcttccccggcactgcatagcaaaaggaaagggccgctgggtgtctgtgggtcctgggcagtcacagaagccaccgcgctggcggggaggagggggaccgatgcggtccatgtcccgggcagccccaccttctctgcctgcgaagggcccttgtccggcgggaggagagaggcgcgccccacccgggctcctctacacctgccgccgcctgggccgattccgcgggcctcgcccggcgcttcagccgattcccgcccagctccgggctcatgggcgcggtcagcagggcgggccagggcggcggggcgcgacactgggaggaagtgcgggccgcctgcccgggcgcgttaaggaagttgcccaaaatgaggaagagccgcgggcccggcggctgaggccaccccggcggcggctggagagcgaggaggagcgggtggccccgcgctgcgcccgccctcgcctcacctggcgcaggtaggtgtggccgcgtcccctacccggccgggactt

SEQ ID NO: 42195 - DNA, 2300 bp, Homo sapien
acgaggtcaggagatcgagaccatcctggcgaacacggtgaaaccccgtctctactaaaaatacaaaaaattagccgggcatggtggcgggcgcctatagtcccagctactcgggaggctgaggcaggagaatggcgtgagcccaggaggcagagcttgcggtgagctgagatgatcgggccactgtactccagcctgggcaacagagtgaggctccgtctcaaaaaaaaaaaaaattactacatgatactaagtaatgcggaaggtgactcaaagggggaaaggaacacagcagtgtaaaggaaggaggttgtagatggatctagaatttccccctcatttccatcaggtgaaagcctgagaaaactgcaatctttgtgcaggctgggtttgctttgtacacactggtcccctagtgttcatctccaataatgctgacaactctgaaaaccatctgtagacattctgcaggctccatctcaggaacaatggctattttttcgggtagttgaagcaaaattaagtccaatgataagcaaatataaccattatcaaaatcttccatttatgtttgttaaagcaacctaagtatgatctgagaaggactctgtattctatatttgagtccttgtggatgaactgtaacctagcttaataggcagacaagattgaaaacctaatttaggagtatgtgcctttaacaatagctgagtcttggccaatcccagtggccatacttcaaccattcatacactgctgagtgttcaaactgtgttcaaagaaggcaaaagccaacctgtaaccaatccagttgtttctctgccttacctccaatttctgtatgtcacttccctttttttgtctataaatatgttctgaccatgaggcatccctggagtctctgaatccgctgtgattctggaagctgccccattcgcaaatcattcattactcaattaaactgctttaaatttaattctgctgaagttttcttttaacaggtttagaaaaaataatggcaaaaatgaatgaaaatccaataaccctggaagcagaaaaggctgggggctccaataagtgtaaatagtcccatccctatattttctccatggcaattacaatccagcacattatatatatatttttttgcttctcgcattttggcttagggtaaagctttttaaaacaggcactgccaaccagtgttatcaagaaggtctggatgccgttttgtgggaacattttaaagaggaatgtccaaaaggaaaagggggatgggttgggagaagggtatcaggcgggtatctcaaaaccattcttagggctataggtttaatttatttggttgtggacgtcagagccgtcatggtaagaaggaagcaaagccttttgtaataattaaagccttcagaagcagcgtgccccattgcccactagtgcgccgtgaagtctggtgttcacctacagggtccctctcagcactgcccaggcctcccgagtgctccagcacagtagcttggagcttgttggtttggtgaccaagatacactccagggaatatgccatgcagtggagtctcttccccggcactgcatagcaaaaggaaagggccgctgggtgtctgtgggtcctgggcagtcacagaagccaccgcgctggcggggaggagggggaccgatgcggtccatgtcccgggcagccccaccttctctgcctgcgaagggcccttgtccggcgggaggagagaggcgcgccccacccgggctcctctacacctgccgccgcctgggccgattccgcgggcctcgcccggcgcttcagccgattcccgcccagctccgggctcatgggcgcggtcagcagggcgggccagggcggcggggcgcgacactgggaggaagtgcgggccgcctgcccgggcgcgttaaggaagttgcccaaaatgaggaagagccgcgggcccggcggctgaggccaccccggcggcggctggagagcgaggaggagcgggtggccccgcgctgcgcccgccctcgcctcacctggcgcaggtaggtgtggccgcgtcccctacccggccgggactttctggtaaggagaggaggttacggggaacgacgcgctgctttcatgccctttcttgttctaccttcatcggccgaggtaaaagtgctgaaaccatgtgaataaaatacaggtgggttccgccagcttcgctcctgaacctacccgcgctcgggatccagaagctgcgccgggagagaggggctcaggcctgggcggaggggacggaggtcaga

SEQ ID NO: 42196 - DNA, 2300 bp, Homo sapien
tacttgggaaggtaaaagatctagaatacccaacacaatacccactaaaaaggacaaagttggaggactcacactactcaatttcaagtcttactagaaacagatacaatttctgcccttatgggacaaacagacattcatcaaaaattcacatgctagaaagtaaaggtaaattaagtcaaaacagtggtcagtggtacaaaaggaaagcatgttagttttgactgtggggacagggacatgtttatcctgagctcaaagggtagcctggacagtggaggatttttagcagagaaaagggccacagcttagaacatgtaggaagggagcaaggtgggggcactgacagccagagctactcaaaagagatgtggaggaaaaggatgttatgtggttttggagacaagtaggcatgtgtgggaggctgagacgtgagatgggagggattggcaaggggttgactttcagcagtgtagagaagggaatgatctaagagagcttggattttcatcttcataaatggatggagctcttgggccaaggttctcaaacttgagcctttaaaatacaaaacctagagcttcaccccagagtttctgatttggcaggtcagggtggaaccctaagaattttcatatcctccatgtttcctggtgatgctgacattgctggtccagagacgcacattgagaacccagctccagggaacaagaaggagctccaagttaggcaggaaagccccaagcttacatttggatgggttgactatgagggcctttgcactgccacctgaagatggtagctaagagaagaggcaggcttcaaatattggctccaccacatactgtgtgttcttcagcaagccagttgaccctcctgaggctcgatgaccaggtctgtgaattgaggataacaatagtatctaccattagggatgttgtgcacatcagttgataacctttgagtcaagtactcatggaatagctgttttgcattatcctcatcaccttcatcatcatggccattctggccagcactaaagatgtacagccaacctcttctgtggctgaagtttatcttctataaaatgagaacttgtttttcatgaagctgtcattttcacaagtttggggtgcaggtgcagattgcctactgttgtgtttctgaacacttccctcgcgaggctcctaaccccaccccagtaaactcatcaacatgactccttccagcttctacagctctggagagggttcctttttatcttgcgtttccagggatgtttcacggccttttgtggagtgggccctggctgagcttctggcccttcttgagtgtggaggatgtcacagactgcagtgggaaattaaaaagctgcttgcttcacagagtaagggaatgttagtagatgcttgaaaagtaccctgagggagctggtcagaggtgctctgtaaagttgcatctgttgctagcaccatgagcagctgtctgaccaggaggcctgggaacagggacagagagagctggcacccttctttcctctgccctacacattggcctttccgccattaagaccatctctgcttgactttttcagtctcctggctggcaattagcatcttgaggtctccattaagatcttttcaaggatgctcttcctatttggttcaatcttctggttgaatttgatacatgttatgatgtaggactttttaaaaaaacataaaacaatcaggaaaacctcgctatacccattccagcaattcaagaccaagttcatttttggtaaaaacacttgggaaagggcatttccaggctggctaagcactaaatggcacagccctgtccactgactccctcctcaactggtgtgtgttctggagggatccatgtctcagagcattacttcattttgaatgtgcaattaaaagaggccccgtgctgctggggatctcacacttctgctttctggtttgttttgcatgctgacactttgaggaaaagcccatttccctaattacagacatcgtccagcagcaggaagcactctggcttgttgatgcctgtcttgtgctttctctctgtttcagctgttttccttttaagatactcctctcagatttgtgtgcttcttcccttcccacattctatactgcccagcgcctgggattccagatctgcgtttgaatccaggaaagggaggtaggtcaaatttgtgggaatcaagcatatttagaaaccctaacctcaggctctgcgcatctgtgggtgtctgtaggagggatacttaggtttcatgcctg

SEQ ID NO: 42197 - DNA, 2300 bp, Homo sapien
ttgagctttcctaagaacccatatcaacagcccattttcagaaaatccagagccatcgattagagcgtggaaagggagaattaaagttatgttcgtatttcttctcttaacaagattatgagtcagatgttgactatatctgcagaacatttgccaagtattttcagacacctgttttgctaaaatcacagagtgacagcctcttcgtgttgcctgtggcacagaagcatattgtgtgccgcatatctgaacctggggctaaaacactcccagttctaatgcaaaaagtctcctactttagggtggacatgaatcaccgggaggtcttgttaaagtgcagatatgggttatttaggtctacagtaggccgacactatttttgacagccttgtggtcaccctggggtggggggcacagggaccacgctgtgagctgcaggccctagagttagccaccagggagcagcaccactggtactcagcctgcagaggccctgcttgtgatcagcaatttttcacaagcacattgacaaacaagaatgcatctcttccattccagtgtggaaaacaggcccggattcgcagcagtggaactgcggctgcgcaattactactatgacgtggtgaactaaccgctcccgcacctgtcggtggctgcctttgatcacaggagcaatcacaggaaaatgtatccagaggaattgattgtcagccacctccctctgccagtcgggagagccaggcttggatggaacatgcccacaacttgtcacccaaagcctgtcccaggactcaccctccacaaagcaaaggcagtcccgggagaaaagacggatggcaggatccaaggggctagctggatttgtttgttttcttgtctgtgtgattttcatacaggttatttttacgatctgtttccaaatccctttcatgtctttccacttctctgggtcccggggtgcatttgttactcatcgggcccagggacattgcagagtggcctagagcactctcaccccaagcggccttttccaaatgcccaaggatgccttagcatgtgactcctgaagggaaggcaaaggcagaggaatttggctgcttctacggccatgagactgatccctggccactgaaaagctttcctgacaataaaaatgttttgaggctttaaaaagaaaatcaagtttgaccagtgcagtttctaagcatgtagccagttaaggaaagaaagaaagaaaaaaaaaaaaggcctggatactgcttttgctgtctctgttatgagatggaagacttacatgtttgtgataaaaggggaccatgagaatgaattggcttggcttactttccccctgaaatcctctctcctgcagactgtcttgaagacctggtgactggtaaataaagccctgcatggaggctgcacagcaggggcaagaggcccatcccccagcatctcactgaggacagcttcaggctgccttcctctgaacgtggtccacaccttcctctcctccacagagagggtgccgccagaatcccctgtcgctttctgtgtctgcaatggggggcagcacagggatcaaagccatctaaagagtttccaaagaaagtattaattcagaacaagccaaagaccctgagcctcaccacaaacaggccttttggagtgtgaatttgagttgaagatacaagatcggagaatgattttctggtcttaactaatcctcatcttcatgtttgatctttaagaagtcatcacccattgatttcagttttgctgtacctcttgaaagttaaagagacatctcagcactttaggaggccgaggcgggtggatcacttgaggtaaggagtttgagactagcctggccaatatggtaaaaccccatctctactaaaaatacaaaaattagccgggcatggtggcatgtgtctgtagtcccagctactcgggaggctgaggcaggagaatcgcttgaacccaggaaacggaggtcgcagtgagccaagatcatgccactgcactccagcttgggcatcacagcgagactctgtcaaaacaaacaaacaaaaaaacaacttaaagaggtaatttagccatcattcttatgccagcagatataaataaacttggacccatctggtcttcagctaaacctgagacattttaaagtgcatggacagccatggacagcaggccctcctctaacaggggatgcaaggcatggagaaagacaatcagtacccaagctcagccacagaagacaggagtcactcatataacttgtgtttagaagtttt

SEQ ID NO: 42198 - DNA, 2300 bp, Homo sapien
agcaattgtgaatgggagttcactgatgatttggctctctgtttgtttgttattggtgtataggaatgcttgtgatttttgcacattgattttgtatcctgagactttgctgaagttgcttatcagcttaaggagattttgggctgagacgatggggttttctaaatatacaatcatgtcatctgcaaacaaggacaatttgacttcctcttttcctaactgaataccctttacttctttctcttgcctgattgccctgcccagaacttccaatactatgttgaataggagtggtgagaaagggcatccttgccctgtgccagttttcaaagggaatgcttccggtttttgcccattcagtatgatattggctgtgggtttgtcataaatagctcttattattttgagatacgttccatcaatacccagtttattgagagtttttagcgaagggctattgaattttgtcaaaggccttttcttcatctattgagataatcatgtgggtttttcattggttctgtttacgtgatggattacgtttattgatttgcatatgttgaaccagccttgcatcccagggatgaagccaacttgatcatggtggattagcttttcagtgtgctgctggatttggtttgccagtattttattgaggattttcgcatcaatgttcatcagggatattggcctgaaatattcttctattacaacacatgttgtgaagaatttgttcacatgctgcttcaattatgtagcatacacaaagcaccctgaaaatagtagctcaaaacaacaaaactgtgcattgtgcctcatggttctgtaagttgactggaatcagcaggatggtttttctgacccacatagtgtcacttgcagtcatctagaggctgactgggctgggacatttaagatggggcacacagcacttgccaaccacgtcagctagtagcttcactttgctgcagactggagaggctcagtttccctccaaatggcctttccatggtgcttgggcttctcccctcattatgtgggagttcaaagagacaacgttcccagtgtggaatagcttagcctcagaagttacagagcgtcacttccactgcattctatggctcaaagcaaatcacaggtcgagcccagatccaaagggaagggaaagaggctccacttttcaaagtgggcatggcaaggaatttacagccatctttaaccatcacaatacatgacacataaactggagaatctaatcaccaaatgaaaaacaaaacaaacaaacaaaaacagaaaaacagaaaagcccagccattttccatgaggggttagtttcatgctgctgcaacaccaggtggtgtgcatgagaaatgccactggctcaaagcagtctcctgctgaggtgctcccgcctgctaccaagctggcccatggtgagccctgcaagcgcacagagctggtctcctgagtgttagatgttcttgatagaagtatccattacagagtctcaaacataagcaatcatttgggttataagaatccgagtatgcatgtcaaagaaaagccttgaatattgaggagtagcttgatataataaaatatttggaaacacaaagatcacgtgatattgcaaaagcatcgcacctgtaggaatccacattgcacaacatcagggaagtggctttgagagcaacaacaaaatgaaatagtagagttatcagctgtctgaaatatggccaaaaattacttgcagtgggttgaagatgaaaactaccactgaatgcagcagaatttttattttaaaccagtgagaaggcaccaaaataggccaatgcccattcttgtatggaaatatttcattccataaatgacaggcctttccatccacccctatatggtttggctgtgtccccactcaaatatcatcttgaactgtagctcccacaattcccatgtgttgtgggaggaactcagtgggagataattgaatcatgggggtggttttccccatactgttctcgtggtagtgaataagtctcaggagatctggtggttttataaggggaaacctctttcacttggatctcattctgccttgcctgccaccatgtaagatgtcccttgctcttccaccatgattgtgaggcctctccagccatgtgaaactgtgagtccattaaacttctttcctttataaattactaagtcttgggtatatttttattagcagcatgaaaacagactaatacacaccccttctccaaaaccacatccaccctccaaactgcatgtgtttgtca

SEQ ID NO: 42199 - DNA, 2300 bp, Homo sapien
cctctcttgcccttccaccttctgccatggagtaatgcagcaagaaggcctcgccagatgctggtccctcgatcttggactttccagtctccagaaccacaagccaataaattcctgttgattataaaattactcagtctgtgatattctattagagcagcacaaagcagactaagacactatatcgtccctggctttgaaaggttgcagctgatgtggctttgctgacaaacacaaaggccctcttctgagttaactcatctcttgcagcatctgagcccactctttagtggactcctggataacacgccctcctgttttcctcctgctttggtctctccccacaaccccttctctctgtttcatccttacaggctgtggagccctgaggggcttaggtcttggcttctccagagactcctgtccagttccttgtccttaaatgtcatcttagtgccaatagctccaggtatgtgtctgcatactggcctctccttgagcaccaagcacatgactaactgccttcctttttttttttttttttctttagagacagggtctcactttgttacccaggctggagtgtagtggcatgatcacagctccctgcagccttgacctcgtggactccaggaatcctcccaagtagctgtgaccacaggcttacgccaccatgcctggctaattttaaaattttttgtagagatggagtctcactatgttgcccaggctggtctcaaactgctggacttaagtgatcttcctgccttggcctaccaatgcattaaaattacaggcatgagaccctgcacttggccccaactgccatcttgacactgctatttgaaaatccaatcaggatctcatatttaatgtggccaaaaagagacttaatttacccccaagcttccaaacttgctccttcctagacttttccatctcagtaaatgactcaagcccaacaggcagcccttgcccttgattctgctcttttccttgccttccacatacaataaaccctcacattgtcctgcagtcttcaccttctcatttcaaaatacattttgcatccatccaccaactcagtgagaggccactggaggttcttcatgaccttgaccagccattccagagggtggagggggcagtatggggatgggggatggccgtgcaggagctggaagcagagatagcacagatagcatctgcagacagcactgtttggtgcataacaggtaatggcaaaatagggctattggtgggggaaaatgcggggtcaatacaaaatgaaaatttaaaagaccaacataaagcatgttttcttgctattggaatggtctggtagagaggggacacaatggtgcaggaaaagaggcatctctgagaagatggtggtgggggatgcagagttcagcacctggagaaagggctgctctgcttcactgtgtccagaggtgcctggtgcatggaagcccagaagtcaggggttgggggccgatgatggacaagacagccactgcctgctggctttggttttctccctgaagggcagcttgtgggtggtggtggggggggcgctgtgaggctgaggacagaggctttgtgcaatggttgctccggagagtgggagagcaaactctttaggagaagagagtaaccctcctgggcaaggagagcgcttgttttgggttttgcagtcttccgtaagacaccaggcacagcatacttgtcattcccaacttgcctgatcatcttagcggtggtggccactgggtagggcccagagggtactgcaggcagggtgcactcgacagggttgggcggtcccagggcaggcccaggacacagtagcagtgggcatggggggaggaggagccaccacgctgggcagcagccagaggggctcattaggaaaagagggagagaagaaaggaggccaggattaagtagaaaagggagtagatgttcctgcagaaaagaatgttccaagtattttatttatttttatttttaacataggctccctggtgagaccttctggttttagctgttgttttctttgcttctgtcaatacggtctggagttgaaatcgcagactgaactgttgtgctctgcgggtggcgatatggaagcacgaggctgtctctgacaaccacgtcacgcaggccgctgtccctcctacccggatgggctctgtgctgggccgggaattctgcccccagggctgatgtgaggacgaagttcttcacttatctgttatgagttttcaccgtcaactacccctgctcttcttttgggg

SEQ ID NO: 42200 - DNA, 2300 bp, Homo sapien
ccatcgcaaaaaaaaaaaaattagctgagtgtggtaccacacgcctgaagtcccagctacttgggagggtgaggtgggaggatcactggagcccaggaggtcaaggctgcagtgagctaagattgcaccactgcactccagcctgggtgacagagcaagaccctgtctcaaaaaataaagaaatataatgggagtcacatatgaagtttaaaatttcctggtagagactttaagttaaaaaaaaagtgaaattaatattaataagatactttatttaatcgaatatacccaaaagagtatgctttcatcatgtggcactaaccacatttccagtggccatagtcatggttacacaggatcaagcctgaaagcctgcatttcagacaagctcccaggtgacaagaatgctgccagtccagggacctcactttgtaggaagggcccaaagaatgctatcttctacctgggctggtgagacagctgtggagcttccacacaattttctacaggacacttggcaaactgaatatgtatcctaagataggaatgcttgaagtcacatcttagggaacatccagctcattgataccatccttgtgcgtgattatcaagtaatctttctcaaacactctcaccaggtattttacacaaagcccagtaaatgggggccctgtctcctccatatcacacaaaggaaatgacatgtgtggataaggaatgacaggacaagtgtgtgctggcgccatccacggcctttacactggcctctccaagaagttcacagttccatgagcgaggcttaggaattcccattttacggaggaggaaccaatctccaagcttaagaagctgcagctagaaatgagcaaccctgtgcctgaggcccaagtccatccatttccaaaaggctaggctcataatccaaggagtgcagcatacaagatgccgccaggcatgagtcacagacatttctatttcaatatttttaatagaacatctccagtttatcaaactcgtgatatgtcacagacaaaattgcttaccttaagctgaggattattttaagaatctgtttcaattttatttattttttaagccaagaatttccagtttttatttctataacatgacttaacaagaaaaacattcccccaattttttaaaaattaggttggattaatttacaatatatgaatcaacttaaaatatcagcccttttatttagagccaaggatgctattttaacagcagaattgcaccattgatacttttacctatatttgatggcacagatatgcaaaagtcatacgacttccactgacaccctctcctccctccagagtagcattcacgtaatttatcttaggtcagttacaagttatatgtaagaaatggttaagtgggctgggcatggttggtggcccatgcttgtaatcccagcactttgggaggcctggtggggggtgttaggtggggggaatcgctttgagcctaggaggtcaaggctgcagtgagctatgattgccccactgcactccagcctgggcaccagcatgagaccctgtctataaaagggaaggggaaggggtggggcaggggaagggagaggaagaaaggaaggagagaaagaaaagggagaaagagagggaaagaagaagggagggagggaggaaagaaggaaaaaaggaaggaaggaaagaaagagaggagggaaggagggagggagggaggagagaggaaagagagaaagaggagcgaaggagggaggaaggaaggaaggagagagaggaaagagaaagaggagggaaggagggaggaagggagggaaggaaggaaagagaggaaagaggggaggaacggaaggagggaaagagggaaggaaggagggagggaaggagggagggaggaaggaaggaaggaaggaagctaagcaatataaccctgtggcaacatttgtaaaagtgactctgagaagacagaaagatcctctatgagagactggtgtccccaggaattggcgaggcctgctgaggatcatttgggtaaatgtcatggtcacgcggccccattctcttcgctgagctccggatttccgtagccaattgtctgctggacattcctccctgatacatctcacaggtaacccgctccaaagtcaattttagggccctcctccccactgcgtccgtcctcctgctctcctggcctctggaatggtccccgcccagccagtttctgacaccagacgctgtcctgggcctcgccccgccttcccacccccacccaaacgcgcgtactct

SEQ ID NO: 42201 - DNA, 2300 bp, Homo sapien
gaagtcactggaatgtatctgaaagtaaagtcctgtagtgacttaaggtattgcagacttcatgtattatggcagagaaaagtgcctgtccaattctctgaataaatgtttgcctttctcttgattttcctttcagtatcggtcttgctgctaagcagtcctgatcctcccccaagtcaagctcacagggctctggatagggccgtgctacctagggagggtcccctgcatgggctgctcctcttttctccagcacaccgcctgttggtgcacagagttggaaatgcagtagacgtatccatgtgttcagactaggttagagaaggctctcaaggaggatgagtgatcaagcacagatagaattcagaagatgaaagcaaaataaagaaaaaattttccgttatctcagagcatgaggcctactggttttgaagtaatttagtgctggttaatttctaacttgtctatgaaaggaaaggaaaagaggtctccaagtttctgaagttctgaggcaagagaaaagttctagtaatggccaaaataagagtcagattttctgagactgatttctgtaatgtaaaggatcatttcacgtttgctttgttcttaataatgatggatctggttttcctgttaatcattttttttgttgtttttctagcaatcaaaaattggcttgtcacaaagtgttacttttctgatagcacttttctaagtgtgaataggccaaagtagtggagtgtcgattcatggatcagcacttagaaaaagtgtgtacctgcacatgggtgtgttgctggcccgccatcggcccttttcctcacttgacctgaacttctacctctggtgatatgccctacatttgctcttattcgggctccaaggatcctggcacacacattcagaaatagttaatcatgccattatttgtctaccgatctagtaaaatattaactaatacttacatcagtacgtattgaactttatcagaatagcaatagaagttattttctcatagtatattaataactatacatgtttcacaaaaaataaaacattttaaagttagttgctaatattctggtaacacaacataagaggtacttttctgcataaatgaagcaggatacagattgtgatttggggtattttgggaggtggaaggtggctgaatcctctgttcaattgtatttgtgtctcaggctccaaaaatatcactgtttcaaatgcttgcctttggattttcacagtcttctttgggacctccagaaattcagctaccccttagagggttagcacctaataagcaacccaaaataattctcagggcagcatgagagatctggggacctggtggggaaaataaaggatgtcaaggacagaccaagacatgcacccatgtggctcaggagcagcccaggagacgcgcctgtgtggcaagacatgagatggccccttttccgggagctggcagttccctcaggggccccaaagtgagctcctaggaaccaacatgtaaggtcctttttaaaggcctaatatagaaacagtactgtgtggtgttttgatttaaggaaacattttgacaagatcactgaaaataccctctaaataagatgagtgaataagagctgggtattatggtaatactgagtaacatttatgaagccattcatacctaccagatgctttacagacactacatccccgaaaggataggcactttggttattctgtggcacagaggaagagaaaaccatagagggatcacttacccacagccccacggcatgtacatgctggagtcaggaattacacccagggctactggcccttttgtcactgttgagcttgaaaacagccaaacagcataacagaaggctgctgatacgtgtgttttcgtcaaccaagagggagtagtgtcctttgctctgatttggtcaacaattttctcattacttggaaagataccaaaagtgtgcttatcagcagatctgatgacacaggcaagtaatgtaacaattagagctaatgcccactcagcgcctcctctatcagacactgtgcgttttcacacctaataccaaaatcttatgaaatgggtttgctgatttatagtttaagaaactgaggcagcaggattcatgctgggcattctgtgttctgggttccaatgtttaacggctataccatcaagggcacggagccagtcttggtagatgtgaatgatgcttggatctgtcaagatgctagtagtgattggtgtatgtcctcacaactcagttccccctaaaaccagc

SEQ ID NO: 42202 - DNA, 2300 bp, Homo sapien
agaagcagggctcaatcacctttgatacagtttccagttctctgcttcctcccagttcttcaatgtgatccatccagatatctgcttaatgcaactgcttcctggtgaccatctccctatgggacaggtaaatgcagcctgcttgactcacctgttgacctccataacccacatggactgtgtagatgggctccagtgaccacctcacagtgacagggtgactccatggaacttgtgcctgcttgttctaaactcaccaattagaacttccatgggaaactgcttgggtaacacgctggaccccaacagaggctttagctccacaagtgccccttccttgacccccttccactggctgaactccctgtcacctccagatttaccctccctctggtgaccacaagaccaaattagaaagaaaccataacaataaaaatcacaacacccagcagtcaacatgtacatcattatcagaaaagaggaaagatacaaaggaagcaaagttttccttgtagtaaacttcaggaaaattttcctgcatggaactttacaaaagatagaataaaaagtgggctgtgcatggtggctcacacctgtaatcccagcattctgggaggtcaagttgggtggatcacttgatgtcaggtgttcaagaccagcctggccaacatagaaacacccatctctactaaaaatacaaaaattacccaggtgtggtggtgtgtgcctgtgatcccagctactcaggaggctgaggtgggaggatcatttgagcctgagatgcagaggttgcagcgagaggcgatcacaccactgcactccagcctggccgacagagccagaacctgtcaaaaaataaaaaataaaaataaaaataaaagtgccttcaacatcattttacagcagatgcagtaatggaattcagtctactttttgtttctacattggataaaagttgaggacataatgaaggatgttttgcttaggactaaaaaatacaagaaatttctgtggcactagacgtatgctcatagcagcacacttttcaaacagtattcttttttttttttttttttttttttgagacagagtttcactcttgttgcctggactggagtgcaatggtgcagtctcagctcagggcaacctccgcctcccgggttcaagcaattctcctgtctcagcctcccgagtagctgggattacaggcgtgtgccgccacacctggctaattttgtatttttagtagagacagggtttcaccacgttggcccggctggtctcaaactcctgacctcaggtgatccacctgcctcggcctcccaaagtgcttggattacaggcgtgagccaccgccccctgcccagtattcttaaatgcaagctttcccattagagatctgataaaagctaggtagcattaattatactgcaacgtgctttgatgagtacctacacactaaattgatatcccgagtttctggaagagctacatactctaaatcccatctcagcgtatggcttgtttgaacccctgtaagactctttccgtccaggaagggccatgggacatcggtacgagtgggtgggctggagaaagaactcctttgcctgtttgctgttctcatccttttcctgaacgccacgtagtaaacatcatttatgcttatcagggacgctaaaccaacaacctgagatccataagtaaggcagtgaccaacgatgggctgccacactttcagccaacttgaggagacaaaacttttttgttcacttttgcagcttacttaacacaggaccgcagggcatggtccagggagtacggggagataattccctccgggtggttcttatagaaaagtcttccctgaattattccataaccttggaaaactactttctttccttttgtattggacaaaccatccaatctcgcttggagaatggggcaaggcctcgggtcaccgggcttcggcggggcagtgaggggcgggaacacggctccggagggcggggccaagccggagcgaggcggcgggtccggacgccgtgcgcgtgcgcgcggcaggtcggcgccgggcgggggcggagcggccgtcgcaggtccacgccgtaaacagacaacatggcggccgcggtggcggcggcacctggggccttgggatccctgcatgctggcggcgcccgcctggtggccgcttgcagtgcgtggctctgcccggggttgaggctgcccggctcgttggcaggccggcgagcgggcccggcgatctgggcccagggctgggtacctgcggccgg

SEQ ID NO: 42203 - DNA, 2300 bp, Homo sapien
acgtgaaggggagggtagattatgcaggacagccctggatttctagacaatagctgcatttctgaccccaaaaaggcaactaatatggatatgattttgatttcatctaagagaggttctcaaagctacaaataagcattgtaaggtttgggcaaaaaggaaactatcagtaaatttgagaaaagtggccaggcacagtggcatgcgcctgtaattccactaccagggaggctgtggccggaggatcctttgagcccaggagttccaggccaacctggacaacatagtaagaccacatcttgaattattatatatgtatgagaaaagtggaaattataaactaaaatcaggatttgttctcatgaaggtagtcaagtttggaaaatgtgtagtggaggggatgtggttcttgcattagtcagcaccgggaagatggtgtcggggaacacgctaagcccatattgtacgtctgagttttcagagccttgtcagcagagctgtactaccagataaatcacgaacaagagtgcgttcaaaaccacaacgctgccctggaaggctttccaaaaactcaactgataggtgataaaaattttttaaatatgacttgcgttattatgatattaactgtgcaagaaggggaaaggtagaaaagacaatcttggcgagtagatagatctgctgctcatggcagacactagggatggtacctgggtgttcactctgctcttctctttactttggtttttgctttttaaaaacgaaaggagcaaaaagaagtggaaagtcgtggaggcactcggcccagcccccacgtagttcaaggagaccaggagggagctggctggtggaggtcctgcccacctgccacactccgtatttgggcaagcctgtgagtcactgtcgggaacatggctcccttcgccaaggccagcactgaccactatccgtgtatcggtaaacgcagggagtgtgccacgtgccttgacagtctagcgcgacgacttaagaagtcgcggctaggtgctcttttttccatttttttacgtctcttccgtagcccgggaatttgggagagaagactaccgtatccagttagacgcagaaataacactaagcagctatcagctcaaaatcacaggaagagatcccgcgcggtcgtctcaagccccagcaccaaacgacagtgggcgtcccagcgggggcacccgagcgcggaccttcacatcctccgaggaacgccgcacccgcgtggcgggggtgggtagatggacctcagcgagcctcgtttcccagtcgtgttacgcaacaactttgcagccgtcatcttcgccctaattgtgcagggggcggtgtttgtgcgtggagctttccctcccggctccgggccgtcgcggctctcgggagaggcgccgggacattttaatcgctgcctccgccgcgcagccctgcgcagctgcccggccgcgccaaccccttccccgccgcagcgcgccccgagtgttggcagcttgccagccgccaccccccgccttccctcctgcccaccccaaggtagagggctcctctcgggagtgtgcggggaaggggaggccgaggtccgggccacgcccgggtagccgcaacccgcagtgctcagtcggcaacaggtagcccagcaggctgcggctctcaggaagacaaaaagcgcctctgcgagcaagtgagggtcgcggggagcgcagagccaccgcggcgaccgggagggtgaagggagccaagagcggacggggcggtgggacggggggctcccgggctcctccgcaggctcgctccggtcgtgtcggccgcgtgggccgttgcgcaacactcgttgcgccgggaatggggcgccagccctcgcgggcgctcggacggcggtggccctggccggggagggacgcgagctggtagtggcgccgccgcggagggggagctgagggcggggaggcggggcggggccgcggagtgcccgccccggcccgcccctgccggccgcggccattggcggcgggccgggggcgggtgcgggcgcggcgattggggccgcggccgccagtcacgcggggctggcgggcggcgacgtagcgcggcgctcggaactgacctactaacacacatctctccgcgcggccacggcgcccgcggacccggcgcgcccgcccgcctcccgcgccgcgccctcgccgccgcccgcctcccgccgcggccccggaggcccggcccggcccgagccccgagcgccggcggcccgactcccggccgcccctttctttctcctc

SEQ ID NO: 42204 - DNA, 2300 bp, Homo sapien
ggccctgggactcctggctcctctgtccttgtccctgtcctcactcagggcttgggagtgggtcccacactcggcagcttcagctttgcaggcagcggttgctccttccttggtaccaggtgttcccactctcaggaagtgtcccaggactgtggaatcctcttactggtctcactggaaagtaagatttagtattttattggctaggcatgggggaatgaagctccagctctctattttattacacggtctctcttccaaatgaggttattctgtgatcatttgtttttccaagaagttgttcagagtcagttagaaagcaaagaaaaaatgggagagccataaacatgaaaaaaatggaagagccataaacatgaaaaaaaaaaggaagaacctcaccaacctgcttcgtggacagcctgtcacactagagtgggctttggcagcagagaggagtgaataaagaaaggacattgcttcccgtgcaggacacagccagccagaggtctctgagcattgccagcccctttccagtcttgccagtgatttcctcctgctcgttttgtccagttgccccttgtttcttattaatgcacatggacacatgttttattctgccatttctgagcaagtggtgtggcctcgatcaccctctgagagcagagtggaagaggacgcatgggcagggaggcagaagtgttgattacagcttcaatcgcatcccagcctggcttcacttgttcctgggtaggacagagacattaagccaggaaggagttttaggagtgtcttgcagtagtggctagagatctaggatgaaatggtgtcttcattgagtcttgcaggagggtatcagcgtccagtggaagaggaggttgtgattcttacccaggtgtgttcctgcatctgcgtcctctaatctggcactatttgcttcccattgagcagtggtgtttgtagtccattgtttgtacctttaagtctttaaatccatgttcagctatgctctaaataaatggatctcaaaaatataaacaggcagttcactaggaggagaccttccaaacactcatgaacctgggaaacacagttaaaatcacaaggaagtaacatcaaattcacaaaagtctagaaaaagcattgatgccatcaaatttacaaaaatatagaagtctgacaatacgaagtgttggcaaaaatgtgttatggaggctgggcatggtggctcacgcttgtaatcccagcactttgggaggccgaggcgggcagatcacgaggtcaggagtttgagaccagcctgaccaacatggcaaaaccccgtctctactaaaaatacaaaaattagctgggagtggtggctcgtgcctgtaatcccagctacgcaggaggctgaggcaggagaattgcttcaacccgggaggcagaggttgcagtgagttgtgatggcaccactgcactccagcctgggcgacagagtgagactccatctcaaaaaaaaaaaaaaaaaaaaagagaaaaaaagtgttatggagagaagaagctgctggagggcgttgaatttgtacgccccgttatacctacattattgggcaatttagcaattactggaaaagctgaatcatgcttctcctactcagtgcaattgcattcccaggcataggtcagagaacccctcagataagggcgcaaggaaaccataaggggaatgttcataacagctttggaatttgcaaaaactgcaagtaacccaaatgttcacccacagaacagtgggaaaaaacttgtgatatatttattgactggagccacatgttcaaacatagatctcacagcttagcattgagcaggaaatacaagttgtaggaggcttgatatttatgtaaaggttaaacctatgcaaggaaatcttgcgtactgctctgggatacatactgtagggaagtactatattaatataaactcaggattgtgggtgccattggaggggggctcgagaaaagaataagcctttcatttggcctggtgtgttcattcacttttttggaatgcatctgaaatattacataccaaattaaaatactgtgtttccaaacctataaaaccgatggcaactttcaaataattggatgttagaaatggaactctcaaaagatttcctcctccccacgaatgtaccctttgcctaggatgggaggctgtcacctggagtagcaacccaaggccctcgaccgcaggggtcctagcaagccttgcctttgtgcatctgctctgggagccagagaagttgaaagcggcctcac

SEQ ID NO: 42205 - DNA, 2300 bp, Homo sapien
caaagacatttgcatgtgctgagcaaaaccaagaataagcaagaaaacatgctatttgaattccgttcaaaatgtctctaataagtgaagcaaattctgcacattctgggcctctgcagagaacaaatagtgttctgcctttaatgggtaaaattatacaatttgcttttaacagtaaaccaaaagccgcggtggcttcggatagcatcgcgctcccgagggctccctccacgcagctcgacccctggcagttttgagcatttcgggggacgcgcttgtccccaccgacctgggagggcgccggtgccaaggcggcctgtttgttttcctgaacatttccttttgcaactttcgcttctcctcttcctgcctcaccgctggtgtctggggctgggtggctctcagatttgtcccggtgcgcagtgcagcctggagttactgatttgtgacctagatccccgggtgtgtcgcccccgaaagtcgggggcacccgctctgggcgcctctcctgcgtgggcagacccgccgaactccggctgacgcccccaaggcgccacctttgtgttcaagcgttccgaggcgcaggcccgagggcgggcgcaggaggcaggtccggggccccagctgcagccccagctccttgggtcccgcccgccgcccgcgcgttcccccggcagggggcgccggcgcaagcctcgctctgcccatcggggcgggcgagcggggaccctgcctcctgcgcgctcgcccgcggtccgccccccgcgctcgtcctggcggccggcgggacgccccagcccgcgccaaggaacctccccagccagcccttgccgtggccggagccgagcggcgcatccgggccggagaagaggacgacgacgaggtcctcgaagtggacccgtttgcgaagcgccagggagaaggaggagcggacgcatcgtagaaaggggtggtggcgcccgaccccgcgccccggcccgaagctctgagggcttcccggcccccactgcctgcggcatggcccggggctcggcgctcccgcggcggccgctgctgtgcatcccggccgtctgggcggccgccgcgcttctgctctcagtgtcccggacttcaggtaggatctggcgttccggcttgtgcgcagacggtagctcacggctcgcttggccagcccttccgccgccactatgctcccggccgctgcgccggcgcccatgctcctgaacgaggggcgccaggcagggccattcgcatctcgcccgacgccgctcccggcccgcaccccggaccccctcgggctggttacaataagccgcgctctggggacgcctaagtgtttccagagtctgggggcgggcggcggcggctgggagcctctcggtggcgcttcccgagggtcgcgagtgggagtgcgagtgtgaatgtgagtacccgccctgggcccgggacccgagtccgcagatgtgccccgagggtcccaggacccgggcttcctccccgaggtcttcctccttcaagggcacacggccccgagtgtcccccgtctgtctcggagcgtccccccacccccagggcggcctgatgcctggcagaatcctggggtggacgtggccccggagaagcggctcttgcggcgggggtgggggcgccggcggctcccgggtcctgactttcccagcccgcgggccgcttgatggaaacgggctctttggcatcccttttgttggtccctgaaacctcctctcccccaccgctctggggtggccgaagtggtgtgtgatctggattgaaatggtttgtgactgggatcgcgggtccctgagcggctggggcgcggccgccttctggccgcgccggggggacccccgggacctgtaggaggctggcggcgggaggggcggggcccggctcctaggtgggtttcctcccggggccccacttcccccgagtccctgcgcggtttcggctgcttggatccggggcgcagaggaacggcggggaggttcggaagtgcagcttgggacctgcctaggttgcctggaggaggcggcgttagctctggcggtgcagactccgggagcacctcccgcccgcgcgcctcgggccggattctcggcaccctgcgggggtggaggagggcgggcggggccttcaggcccaggagcgccagagacctatggggttcgcctgaagcccccggaatgtgtgagacacttcttactagtaaatgggcttcagtatcccccatccctgcactcctgcaggaaggtgagaatcgggacagtcgcaggctgggagac

SEQ ID NO: 42206 - DNA, 2300 bp, Homo sapien
taagtctctcctgccttctcgacccagagaaatggtgtgaaataacgaatgtttactgtttttagctgttaaatcgtggggcaatttgttatgtggcaattgatgactaatacagatggaaaggaatatgttgctccaatttggccttggacgtaagccatattctcttaaccactgagaaagcttgtattttcatccttccaactttgctttttttgtttatccttcagttcagaacctacagaaagggaaggagagagtgagagagaaatgccaaaaaagaaagctttaaaaggcttttaagaaatcatatgcaatataacccacatttctgactccacccaagaaactgtcagcaaaatatatgttgctgtttaaacctttgagttgggtttgtggggcctcagtcatgtgaaaataacacacagatgggggcatgatgaggtcattttcctgaaggtcacacaaaaataaatggcagggctgctgatgaaatggttctggagccacatgctcacgctgtgtgaagtggaaagcaaaggtgctgggaccaccttctccgagctgcacagcaccacggaaaggacacagcattgctgagggaggggttttccagggcaggttcaagacccttctctgcagcccctgttgggttttccctagatccagaagagaggggtgtggaactaagtgcttcagcacctactcttaaaacattactctaaaagcatccttaaggattctaagggaagctaaagggaggaaaaccccaaagataaacccctggcagtcctctaaccactggggagagcagcccccccgttcagacccgcaccagcctgggcagaggaacagcctgagcccgtctaagaagtttggtaataattttgccatccagttgaggaggggctaggatcttctcccattctcctactggatttacagcagctcctgggaatgagaactgcgtgagatatttccctacacaaattgggtagagatagccggacgcctaaatacttttaacagaggtaacaagctagagctggcttagtcattttgtccgcagaccatagcaagagagtttttatttctggccacgtctgaggcctcacgtctggcacccaaggccagggctctccctaatgccctccaattaacagagcttggtactccagcaaaaacaccaaacaaactgctggataatcagttaaaagatcaatctcatggaacaagcaactgagatgctggagaatccaattccttcctctaagaggaaaaacaaagacatttgcatgtgctgagcaaaaccaagaataagcaagaaaacatgctatttgaattccgttcaaaatgtctctaataagtgaagcaaattctgcacattctgggcctctgcagagaacaaatagtgttctgcctttaatgggtaaaattatacaatttgcttttaacagtaaaccaaaagccgcggtggcttcggatagcatcgcgctcccgagggctccctccacgcagctcgacccctggcagttttgagcatttcgggggacgcgcttgtccccaccgacctgggagggcgccggtgccaaggcggcctgtttgttttcctgaacatttccttttgcaactttcgcttctcctcttcctgcctcaccgctggtgtctggggctgggtggctctcagatttgtcccggtgcgcagtgcagcctggagttactgatttgtgacctagatccccgggtgtgtcgcccccgaaagtcgggggcacccgctctgggcgcctctcctgcgtgggcagacccgccgaactccggctgacgcccccaaggcgccacctttgtgttcaagcgttccgaggcgcaggcccgagggcgggcgcaggaggcaggtccggggccccagctgcagccccagctccttgggtcccgcccgccgcccgcgcgttcccccggcagggggcgccggcgcaagcctcgctctgcccatcggggcgggcgagcggggaccctgcctcctgcgcgctcgcccgcggtccgccccccgcgctcgtcctggcggccggcgggacgccccagcccgcgccaaggaacctccccagccagcccttgccgtggccggagccgagcggcgcatccgggccggagaagaggacgacgacgaggtcctcgaagtggacccgtttgcgaagcgccagggagaaggaggagcggacgcatcgtagaaaggggtggtggcgcccgaccccgcgccccggcccgaagctctgagggcttcccggcccccactgcctgcggca

SEQ ID NO: 42207 - DNA, 2300 bp, Homo sapien
attctgcagatggcttctctacctgactgatgccatgttgcctgttccttcactgtacacgtggtgacaaagaaaatggaagatggagtctccatattgaacatacctggcttccaggtagtctttttctatcggcacaactgccagcattctcccgtgcactgccagcttgcttatctatgtttgtagctcaatttttcaggctgctctttgcaaaaaagaaataattttggggttgctttttgttcagaaagaagctctgctgaggactctcttaccttcactatctgcctaaataatttctttttggctcctgtatcaatagcactggtaccatttcagaattctggggaaagtcagggttactcaaataaatggcactcaaaaaattgttattcctttagaaaaaaacataattaagtcccttaactctcattatccaaaaatatagtttccagagtaaagagctaattgcaaataacaacaaactgctgcaagaatggttggaaaccatagatgtggtgaagaaggcctttctaagcaatatgcagatccagaggcaaaaaacagactgaagcactacataaaatttaaaattaaagtatgatgaaagagcagaaacaactaggcggcaactgagcaaaaatatttttcacatatgaaacagaaaaatataagatattcagaatgtatagagttcctacaaatccataagaaggcaaaaataaccaatagaaaaatggattaagaatatgaattggcgattcatacagtctataaatgccaataaacatataagaagctgcacaacctcatgagtaaccagaagcatcaataataaaggatagtgaggtatcattttatctccattaaactggcaaatttttttaaaagattgataatatccatcatggactagagcatagaaaaacttccaaattattttaattggttgagccattttggcagtacttatcaaaattaataacgtgcatagtcttcagatatatcccatgttgaaaaaactggtcagaaaaactccaacatgcacagaaagatatacacacaaggaacatcgacagttatggcagcattatttgtaataggggaaaggtgggaacaacataagtattcaccaatagggaaacgtttacataaaatggaacgatgaatatacataaattattccatggaagtcttcagccattaaatatgagatatattaggaaaaaaatgctagaaaaaaaatttaaaaaaagttgtagaaaagtcttgtccctatgatctcaattatatttaagaaatccaatccaattaagtatgtgcgcgtgcatactgtttgcatatgcattggaaggctctaaaaggttctttaccaaactgctatatgatttaatacctgcaaagccttggcctatgtctgacaaaacaggaagtgctatatgggttggctatttttgtgtataattatgcatttcttaatgataatgcattgctggattacttatgctactaaacgtaaacgtattggccaggcgcggtggctcacgcctctaatcccagcactttgggaggccgaggcaggcggatcacctgaggtcaggagtttgagaccagcctgaccaacatggagaaaccccgtctctactaaaaatacaaaattagccaggcgtggtagcccacgcctgtaatcccggctactcgggaggctggggcaggagaatcgcttgaacccgggaggcggaggttgcggtgaaccgagatcacgccattgcactacagcctgggcaacaaaagcgaaactccgtctcaaaaaaaaaaaaataaagtaaacgtattgcaatcattttaactctctgcgcccagctgatgaccaagtgtaaggcccgttcattactactttctccatcctgaatccagcagggagggtaataggacacaaggtaaacaattcttggaaaaactgcggcatcccacctgaccccgtccagcctcctgtcaaccagtgcgcaagtgcgagtaggcggtgcccagcgctccgccgccccgccctctgcggaggtgataacgacactgagcagcgacgcgcacttttgggacgcgcttgtgacccgccttccggaaggaagcggctaactatggcgaccgccacggagcagtgggttctggtggagatggtacaggcgctttacgaggtgggctccgcgccattagcggtccgcgaccacacccgggcccggggagggtgggaggacgcgtgtggatttgtggcctgagacctcggcgggactggctcggtc

SEQ ID NO: 42208 - DNA, 2300 bp, Homo sapien
catgcccgcctaattttttgtatttttagtagagatggggtttcaccgtgttagccaggatggtcttgatctcctgacctcgtgatccacccacctcagcctcccagagtgctgggattacaggtgtgagccaccacacctggccgtcattattgtttttgatagatttgtcttttagtcttcctactaatgatatgagtggtttaaataatgcaattacagtattaggctattctgtatttgtctgtgtacttaagtttaccagtgtgttttatatcttcagttgctttcttgttactcattaatgcccttttctttcatattgaagaacttcttgtaaaacaggtctggtgttgacaaaatcccttagcttttgttgtctgagaaagtctttatttcttcttatgttgaaggataattttgctgggtataatattctagtccaaagtttttcttcctttgatactttgaatgtcattctatttcctcaggctggtaaggttaccactgagaagtctgctgccaagtgtgttggagctcctttttatgttatttgcttcttttctcttgctgcttttaggatcctttctttatctttgacctttgagagtttgcttattgtatactttgaggtaattttatttggcttgaatattctaagtattcttgatcttcatgttcctaggtattcatgtctttctctaagtttggaaggttctctgttattgtttatttgaataaactttctaccccagtctctccatctacgtcctatttaagaccagtagttactagacttgcccttttgagtttattttctagatcttgtaatagtgcttccttctcttttatttatttttgcttttttctccttggactgtgtgctttcatataacctgtcttttaatctactgattcattctgccacttgatcaattctactgttgagagattatgattcatttttcagattgtcaattgagtttctaagccccagaatttctgctagattctcactctgttgcccaggctggcgtgcaatggtgcaatctcagctcacttcaacctctgcctcccaggttcaagcaattctcctgtctcagcattctgagtagctgggactacaggcatgcaccaccacacccagctaattttttgtatttttagtagagatagggtttctactaaaccccatgttggccaggctggtgtggaactcctgacctcaagtaatccgcccaccttagcctcccaaagtgatgggattacaggcgtgcaccactgtgcctggcctctgcttgatttttaaatgttaattcttcattaaattaatctgatagaattctgaattcctagtctgtgttatcttgaagttgttgggcttcctcaagatgggtattttgaattctctgtctgagtggtcatataatttaatcactccagaattggtcactggtgccttatttagtccatttggtgagatcatgttttcctggatgctcttgattcttgtggatgttcaatgatatctgagcattgaagagttaggtatttatttcaatctttgtagtctggagtgtttgtatccatcctttttgagaaggctttcagtaattgaaatgggattgagtgttgttacataagcctgtggtcgttgtggcctcaggcagaactatgaggccaagagtgctcatgcgcaccaggctttctttttgaaattcgaggtgaggcctttaccacccgtgagctcagaggagggaagactgggacctgtctgaaggtctggagggaactcccagttgcacacttgcccccactgcccctttcctggcatggggtgagatcggtctacttcagcaaccagtgcctgcccttgatccctgcaggagctgaaggaggtgagcaaggagcagcccagactggaggctgagtaccctgccaacaccaccaagaactgttaaccacatgtgctaccctgtgagtgctgggggcaggaaaggaggcatggcagagggctagggcttggcatgggagcagggggcttcatgtgcccaaccctgaatgcacagctttcactctctgcagatgaccactccagggtcaggctgacccagctggagggagagcctcattctgactacatcaatgccaacttggtcccagtaagggccaccggtgaggctgtccatgggatctgggatctgctcgggagatgggctggtttgcaggccacacttgccttcattagctgtaacagctctctaggagatcaccagcttgggcttcatgagctcaatcca

SEQ ID NO: 42209 - DNA, 2300 bp, Homo sapien
cactaactgcccctggtggaaggccctgggaggacacagagaaagcctggaaagatcagagcaagagtccctgaaatggagtcgggtctccccaaggggaagcggggagagctctttggccaacctgagttcctactaaggtgcaacgggtcagaagtcaggagggtccttctcaggcctggttgaagaagggtacagaggtcgtgctggctgctcagccgggagctttcccagaacgagactaaagcactggtgccctcccaggaggactaaatgccggtgtcctccatatgccatgtttatcaggagctgagggtgggccccctaatgaccctcacaaaagcaggctggaggctctgctctgagctgcccaagtctgtctcaagcagctgctgctgaggttgcaacagggctcaaccatggcttttccactctgggaaaatctcacattggagcagcaggagctgcaaatgagatggagccaaggctatggttgagtgaaggaagtgcaggctggcctgtggtagctttctgccatagggcaaaggtggctctatctgtgagtctttctggtcatgtaggcccatcctctagccttcttaggaggctcatcttctactttcagcgccatggcaccaacgggaggcctagggtcagggtctgctcatttcttggtccggctatgcagcccctctagccctgggaggttatcggagagtggagaggtgttgatgagaggattctggcatgtggaaggacagggtggaagaaatcctggatgcctctgaggtcccaggtttctggtataccctctggctggaccatggggagacagggcaaaaaaggaaggaggggtgcccacagcctgctctagctctgcactggggcttggctcagcatgggagagaccagagacagcaagaggctgcgtgaaggaagcacagccagctcactatggtctaaggagagaacagggattggcctcagttttaaccaccgtgccctttgctcaccagggctctggggccggccaggtcagccagttggtgggattccagcctcagggtggccgagctgcaggtgcagcacccggcctccaggtggcgccaatctgcttactttgaggtggcctcttgacaagcagctgagctgcacgcagtccctcagcctgccgaggtcctgggagcagggatcaaggtggtccccgtaaacctgacagtaaacctgacagaggctgcaggagtgcatttccacccagggtgcactcagcgagtggaactccacacccgtttctttggagtcaaggcgcgacctctcagggaggagactgctcctggttgcccactgccgggtcatcccagcttgcagtggaaccctccgcagcctggcctcttccagggtagcccctcactcccctctctcttgtcctaggataaggccgaggagggctgacgagttccagctctggggatgccctatcagctgtgtcaccttgaacaaatcatttctcctcttgggtctctgtttcctccagtgtgaaacgtggtgaaggcatgaggggctatgagagccccaaggcctctttcagagatctcctctgggtcccatgtgaccccgtggctatccccaaaggcaagagggtccccagccctgcagccaaggccctgggacaccctttctaaacaagtgcaggtctctgacgggctgagctttgctcgcttgggtttctttgcttttttcctttttttatctttcctgaatgaaattcctgccagctccgaaggaaggagggaagggagctagccgcagcgtagaaagtttccttgactcctcctccggctgggtctccctcccttgccaagcccagcctgtgaaactgaataacgaagatcactcaacaatgcctgctcctctctgactgcaccgccccgccgccgacgcccagtagagcccccggggcggtccccaccgacggcgcagcccgccgggaccgggagaaagcagctgcggacaccgcgcccgtgcgtctgcgcgcctggccgccaggtgacccagcagcccggccgccgagatgcccaacccgcccaggctccgggcgctgtgacttcgcgccgctgtgtgcgcctccccgagcgccggctgcgccccccagcccggcccggggcctaccgcctgcccggccccctgccactgccaggaggacggcatcatgctgtctgccgactgctcttgagcttgggctgtccgccataccgggggacctggatcccctgacggcttacctgtgagtactgcccgcc

SEQ ID NO: 42210 - DNA, 2300 bp, Homo sapien
taaataataataatcagtggacatgttctattctgccgccagccactcctgcccttgcccaatggattgatgaacaaaggggccacccagactgggaggaagaataaccacgggctccacaacattacttccactccctaaggctgattttgctacagctgctactgcgtatcccacctaccaacagcgggaaccattacttgagctttcgatacagtgttattgccaggaaagacaagccagactcctgatggcagcttggttgtactgcactgtttccattatgggaaaaggcagtgctttggtcttactggaacacacactccttttggacaaggatttgccactgtcacctataatgcttctggcaaacccaccatccatggaggtagagaatgtcttatttaccaacacagcattccacatagcatcgcttgaccagagaactcatttttcagcaaatgaagtgtggcattatgtattaatatatattagccaattcttatttttccactctcttatttccttaccatataacatgaaatattttaacgggttaaccttatacctcagtgaagttaaagaacagcaaaagagggatgtatggctcagctagaagagaaatcaacatcacccaaagaaggataaggtaactttctatctcgttttgggtaatgaagttagcatctttgaagcagtacaagaaagagttaaaagtgtgattttttttttttttttaatctactagggtctttatttggaagttacatatgatttaaagagccatgtatagatgtcaagatcacaatggggtgaactatggtggtttcatcctgtgtcaatgcagctaagctaaaactatttcccaggttctctgtctgacctggttctgggtaatggcttgatcacagacaaatctacacaggatttagaaggtagaagtttagtaacagtcattatgctaaacaggctaacatggggcccgtgcccttggctttctcaggttgctgtgaatctgccaacttgttgggttaagtgggacagtgagcagcccacgctcctgcctctgctcttccaacttccaggccaggaatgtgtgcaactctctggaaaagtgtaccagcagtttcttctgcaaggcacctgtcagtgtgggatgaggtcagatagatgtgcactctagcctgtttttgctcgtttctacttctcatcctaccgtgactttaggcagagatccagctttccactgacttatccaccaccttggtggaacctggttagagatttttctcagacctctaacttgctaccttcttgtagaattttacttggtttctcccacattgcttttgcttctcctatccaacctttaatggatacaatagcaaacagttttccagtggttccaacaattcataatccagcagtgaatgagagttcccattatgcaatatccctgacaacatttgagtctgccagattcttctagtttttgccaatctggtggcagttaatagtacctcactgtggtactatcttgcaagttcctgattaccattaagatgcaccagttgttccttagttggccatttgcatttcttcttttaagttatttaaaagtttctgaaaatgagcattcagattcataaaatgagtattagttttctgaggctgccatagtaaagtcccataaactgcagggggctagggaataaaaataaaagaaatgtactgtctcaaagttctggaggtcagaagtccaaaattaaagtgttggcagatgtgctccctctgaaacctgtaggcgaattcttttttgcctcttcctagcttctggaggctcccggcaatcttggttgtttcttggcttgcagctgtgtgtaactccaatctctgcctttgtcaccacatggcattttctccgtgtgtttctatgtcttcacatggccaccttctttttttttttttttttattgatcattcttgggtgtttctcgcagagggggatttggcagggtcacaggacaatagtggagggaaggtcagcagataaacaagtgaacaaaggtctctggttttcctaggcagaggaccctgcggccttccgcagtgtttgtgtccctgggtacttgagattagggagtggtgatgactcttaacgagcatgctgccttcaagcatctgtttaacaaagcacatcttgcaccgcccttaatccattcaaccctgagtggacacagcacatgtttcagagagcacagggttgggggtaaggtcacagatcaacaggatcccaaggc

SEQ ID NO: 42211 - DNA, 2300 bp, Homo sapien
ctttggacctgagagtttatataaaacagtagatactggtgatgacttaactgtcttcaaggtagcatagtgtaatctaaagaaagtttgtcatgtcttggctacaaccatgacatgagtcagagggaaatgatctcttgaagcctctgtggctttgttattgtgaaattttaatcaagaaggggcataatacacgggtagtggggcagcttgaagaggaggggaagctgattaacagtgtagctgcttctccatagggaccattgttgtggaaggccatgaattgcacgatgaagacatccgcctcatgtacacctttgatcaggccacaggtgggactgcgcaatttgaagcacactcagatgctcaggtatttttctgtttcctagaacatttctttaccaagagatgagagcataagaggagaaagtatttgcctgtgcctttcctgataatgttgacagcttgtctcagggtaaaataaaccagttacttggtttagattggctttattaaactaatatattattatgcccttaacatatgcatttgtttagtgaatacataagtaagcattttgtgatttctacatgtcagtcattgtcccaagtgtggggttgcacaaaaatgaacccttcaaggaatgagtcagtcaaggacacctgaaattaagccagttcttagtattctacctgataagttatctggtagaaataagtacacagagggctcctatccaaaaataggtgtagggtgaaaagtggtcagggaacactcttttcaagagaatatacaaactgttttagattccaggatcaatattttttgccatattggagaagagactatctctttgcagtcctgaccagacatccccagtcagcatagttgtaagatctcgcatgtgggtttggggatattgcaggggtccctctgtgcttagcataccatgtgcaggggaaggtagagcagcacctccatgaaaggaaggtcgacctcctcagtcctttacccaggcgcttaagttagatgtgtacagaactctacgtgggaagacagtggcaaggagtcggaggtatcgtagctgggaaagaaggcagggaggaggtttctaaacactgacagtgggcagttcttcctcattacagcagatgttaggggcctgaaaagttgtccaccttacaaaagtgtcatgtgatgcttctgagtttcttgacatggcttacatgttgtagtggccctgcactgactggaattttgagtttatcatgcatttcactacctctgatgcctttatgaagtgagtcatttcttaacttctctgtttactcaaaggtaaatgagatgatgcctaatgtacaagtcttttgtagagtatattttactctgcaacatgctgtgtaacagaagcgatagtgtcattattgctacatcataatcagcaaccttcagaatagatgagatagaaacattaaccttagcaaaaatatggcagtttaagtcacagaaagttttgtggtccattgtagaatttgtcttgagtcgttctgacaaacctgaagatcacaggggtcatggtataggaaagtcacttggagttgactgcgctgaggccgttgatccacttgttgtggcctgaaaagctgtgctgctccaagggcttcatgattattgatcttacttattagaagagttgatattacttcttagatggccaaaaagcagagtcatgtgagggactctgataagaggtggtcccagggcatctcctgtgagcagcaccctacaaaaaaacaagaaacaaaaacctgcacacctttctccagagacagaggactagctgattatgaagaagtacctgaatgataaactagattaattttattgcttttgctcatttgtgtgaaaaaatagtgctgcattatagactctccagatttaaataacattttgctgagttgggaagaagtgtttctccttatttgattgtcatggtgtgcactgttcattcccacaggctttggtcctcttagatgtcactcctgaccagtcaatggtagatgaaggaatggctcgggaagtcatcaatcgcatacagaaacttcgcaaaaaggttagtttgtcagttaagaataagctactgttttggctttttgtttgttttggttgtttggagaagataggagaggcaggtaatataaaccatagtgatcaatgcataacaatcactaatccatagtccatttggaatgtattctgcagaaaagtcactcctcttcctctccccacgtgttcactcc

SEQ ID NO: 42212 - DNA, 2300 bp, Homo sapien
ggacttaagccaggtacataaataacaatgatgcttaatagagagagcgaggtctctttactgcaggcccaatgaaggctcccactacccattagtcatgtctttttttttttttttttttttttttttttttttgagaaggagtttcactcttgtcacccaggctggagtgcagtggcatgatcttggctcactacaacctttgcctcccaggttcaagcagttctccctcaacctccccagtagctgggattacaagtgtgcaccaccacgcctggccaatttttgtatttttggcagagacagggtttcaccacgttggccaggctggtctcaaactcctgacctcaggtgatccactggcctcagcctctcaaagcagtggtgttacaggtgtgaaccaccgtgcctggccagtcatgtcttaaaaggcattaataataaaagcctgcaacacaactgtaatttcatttttgtgcagatgtatctcacacacacgtatctagaaggacatatgctaagatgcttacagtagttgtctctggataaattaattatgattgtaggaaaaacaaagataatgaaaaaatttcaatgaattggtattttttttaatacacattatatacttttttaacataaatcttatttaaaggtactttaaagtttttggttagcaactgtttttgtctgttgtgggtagatccattctaccttcagccttcgggtcctacagttaggctctacttccctgtcagctcgcctcaggtggggatagtcagtgggacagcaggtgcacatcctggccaggcctcctgcactgccctgaagggccaccctggtggcactgaccgtggatggcctgtggtcgtggccctttctcctttctctgtctcatgtcttgtctgtatgctgcatgttctttgaagattgcctctttttaataaacttatttttttaatgataaacacttatttaacagtttaatgtttatgtttcctttttactcattagggtgaaaatgggatggaggattgtgtcatggccctagaaaccttgtttagtgttctgctttctctttgcagacttatggtaagatgattggcttctttctagtaccctttggcctatgggctgccttcagcacctacttgctgcagcatcctccatttatatccattctgtattattctgccaaaaatagatatagaagttttataacaccttatagctctagttccttatcagaaatcttgttagcttatacatgttaagtaaggactaagaaatactagattctttcttacagtctctggcagtacaatatatgtcagggcccttggctctagaatgaggatctacagttcaaagtaagacatacctcatcttaatgtggattgccataattgtgagtaatgggggaggttcttcagctaatacctgtctgagtaaatatatatatatcacaaaaaatactttaacttagcattgagaggaaaacgtgcaagtaattgtttgatatatgttcttatcagttcagatattagttaaataatataaaagtggaacggctccaactttaattctttttatcctgtttcctttactccatatgttataaggctcctatttattccttaaccgaaggaaaatctgctttgtacaaggtgctgtgcctggtgctctccatgcctgatctcatcacctccatcctgtgaagcagggggtattttccccagtttacagatgaggtttctgaggtgtgggacagtcagtcttctgtgcatattgacttggctgatacatcattaggtgctcctgtttctattttagacatccttcagaattctagaggtgctttgggtttttctatctacagtcctgcagctatgcttcagggatatgaggccatttctcattcacagggcatgttttgtaacctcatgctcattttggtgcctattactgtgtcattctctaacatgtttagttgtttctcagtataaatgagatcagttgttgatgactgcatataactgacatgatgtcctgtgtcttcatacaggctccctacacaccttttctcactgaattgatgtaccagaatctaaaggtgctgattgaccctgtttctgttcaggacaaggacacactcagcattcactacctcatgctgccccgtgttcggtaggactcaaatagaaataagcctcacctgtgccaaggaggggagagttgctcaagcatgtggggaagaggagggatttccctgctccagctccatctgtgccttgcctccc

SEQ ID NO: 42213 - DNA, 2300 bp, Homo sapien
agcccaactgttcttgtcctgttttttcttaaattaaactcagaggcactcacacatctgaaaaattaatgagggtaaaagaaaatgaaagatactacttgtcacagacttttttttaaatgataacttgaatcaataacttgattagactatgatgcttttgatgctttcaaaactgtttgaggtatgtaggtgtcttttcctgtagagttgattaccctggtctgttgtggttcttgagtacttaagattttttatcttctctgttgttcccttattagcaattttatccccttctgatctgatactgacttggaaagctcgtcacccaccttgttagaattgttaagtaaatataaatagactttgagaaggaaaggtctcaagggtggctcactagatacttaagtcatagattgatcaagtatctctgcatgaggttattagcaaaacatttaaaaagacactttaagacttctctcattagggactaaaccagaaaggtatagggctcatccttcataaaaatcatgaataagcaataaaaagggtaaaatggaaaactggaatctatatttgaatgtgagattctcatctttttagctttaagattttttaagttttaccagttttcctcaaagagaagatgaagttacttcaagagaactgatttctgtcatgtgagtgtaggtaagaaaattcttaactactttgagatatttttcttcagattattaatgagttttttgcaccactagatagaatttccaagattttcctgcttacttttggaaacattgtctctaccattactgaatattaaataatagccatgtacccctccctcacaccatatacgaaaataaaattatttgtggcctaaatgtaagcgaaaaatctataaccttgtttaggtaatggtttattgatgacaccaaaagctcaagcagcaaaaccaaaaattgacaaattgggcatcattaaaatgaaaaatctttgtgcttcaaaaaatgccatcaagaaaataaaaagacggcccacagaacaggagaaattttttataaatcatatatctgataaaggatttgtatccaggatgtatacataacccttaaaacccaaccacaaaaagagcccaattagaaaataggcaaaggataaatatctatccaacgtggatacgcaaatggccaataagcatgtggaaagatgctcagcatcattagtccttagggaaatgcaaatcaaaaccacaagatactacttaacatctcctagaatgactgtaattcaaagatggacaataagatgtgttgggtaagatctgaagaaattagaatcctcattcactgctgagggaatgtaaaatagtacagtcactttggaaaaattttggcattttctcaaaaagttaaatacagaattatcatgtgacccagaaattctacttctagctacaaacccaagagaaatgaaaacatagatccacacaaaattttgtatgtgaatgttcatagcagcgttattcgtaataaccaaaaagtggaaacaatacaggtatccaagaaatgatgaatggataaacaaaatgtggcatattcatgaaatggaatactattcagctatcaaaagtaatgaagtatgaatacatattacatcatggatgagccttgaaaacatgctagagaaaggaaaccagatgcaataggccacatatagatgattcctataaattttcccatttatatgaaatgtccagaataggtaaatctgcagggacagaaagaagataaatcgttgccactggctatggagaagaaagaatggggagtgactgctaatggttttggggtgttttggtggggaggggaggttgaaaacgttttgaaattaggtattactagttatactaccttgtaaatatactaaaaagccactgaattgtacactttttacattacactatgtaaattgtacatcaataaagctgtaattttttaaaagtatggatagtgtcatgtacacccatgttaataatatggtactctgttattcctagatttctcttttgacagtaataaatttgatttcttttgcagcaacaaaatgcttcaacaagttccagaaaacataaattttcctgctgaagaagagaaaatcttggagttttggactgaatttaattgttttcaggaatgcttaaagcaatcaaaacataaaccaaagtatgtgaattttttaggttaagttcccttaagaatagtcatttcttagactgaattccattaaagcagatactt

SEQ ID NO: 42214 - DNA, 2300 bp, Homo sapien
aaaaattattcacctcttcagtccaagtaatatattttgactacagttaacttttttgctggaattttttcatttgcttaactttttctagacttagtcttcccataccttccaactgtgggacatgatgaggtttctcttcaaatagcctgatcaatcctttattctttaattcacagtgcccccctcttccctttttctcctctttcctttctgcctttgttacatgcctagacaggccacagtaccaggcgttatcagtaccagctcgtattccttatccgaagagaagactagctctctagctcattacagacagcccttccccctttcccctctctcttacgtgcccaccttatctaaagaaagttaaaatgtttagccaactgtggttattttagattgtgaggcccaactccggccaatggagaaagggtacaggggcagggtttgtgtcagggataaaggttctcgtgcccctttgttctggtgtgctctcatggtgactggccaaggagaagcacccctctgcgcagaagtaaaattgctttgctgaaaatcctttgtttgaatgttcaatttccttaggattttgagcattatttccaacacaacagtactattaatataaatgtttctcaatcaaatttttaaataattagacttggcctacctcacctttgtccaggagccctctgtctggctctatctgggctctctggataggtgacaaaaatgaactgaacaaggtggcaacgtgaggaatgtgaaaacttcaaacacattccaaatactttcagttaattaacaagatttgcagctattaaattatgtacgttatgtgagtatagtcagaacactgagttacccatgatggaggacatgaaaccactttaatccttcacacagggccaagacggtaagtaaagttaaatatatgctgaacagactatcaaaatgttcctaaacttaataagaaactgcattctacctattctaggccagataaattttttatatccctctaacggatacaataggcagctacggaactactcccaatttggcaagatccagaatttcctttagaggctctggggccaaagcccgaggcctactgccctttgcaaggctccagattttaaccagcagatcagtaaggtaccaagccgactcatagcaatgataataagtatgcaggccgggtgcagtggctcatgcctgtaatcccaacagttaaggaggctaaggcaagcagatcgcttgagcccacgagtttgacagcagcctaggcaacatagcaagaccccgttgctacagaaaatacaaaaattagccgggcgtggtggcgctagcctgtagtcccagctacttggccagggatgaggtgcgaggatcatctgatccggggaggttgaggctgcagtgagccatgaccgtgccactgcactccagcctgggcgacagaatgagaccgcttctcaaaaaaagaaaaaaaaatcgtttgtgcaatgttttcattaccggaaacattttaagtaaaatacaataaaacttttaaatctggttgtcagacccttccttcccttttgttattatcgtttcacgtagccatttatgataggagaagcggctttggggtcggcggctcagggcccaaaagtataattattaaagccacctctccggaagttgctgtttgtcgttatcaatttaggtacgaagtgtccagtcagataaatactgacaaaagcaaacaagatgaagaacatgagccccgacctcggcgccccttcccagtgggccgtcacctacccggaggtgcccacaacccgagtgagacctcggtctacactactgcaacggatacaagcagcacgcacagcgccgccctcagcgctggttcgttttccacgtggaggcgcaaaaccagcaagcaccactgtcgcaccatccgagccagtgggcgcaatcatgtccggcgcgaccaatcggcgcctggcttgttggcaggtgtcaggcagcgcgcactgattggccggtgcggagcctgtctccttcactggatcccgcattttcagcgcgttgcatcacctccgtgcgcccggttgcagcgtggacgccggatgagttgcttttaggcttgctggcccgcggggctgtccaggcacgcgaggcccctcaggtacgccctctcttccctgcaggatccggccctcaaagacgagggtcacgcacgcgttacaaccccgaaacagtagcacaagatttaatttttaaaagagcgtgtttcttcgggg

SEQ ID NO: 42215 - DNA, 2300 bp, Homo sapien
ttgctttactgtatcagttcgatggttggatttctgtgatttacagaaaatagccctgagacctgtgtacctataatataatctgaataggtttgctataatatccacatacactccaagtaatttctgccaactaatagtggtggtactagactttaactcagcaaatgtcatagaaagctcagtttcttagaccctgaaaggtaacctagttaagtcctcattttcttttacaggaaactgaaaggggggggaaatgacttatttgagattaagcaatattttttgtatcaaagattgatgagttttcctaaaaccaagtgctttagttttgtttcttgacttgcgtaacatcatcaaatatgatccctcaaaatactgccacaacctgaagaagataggggaggatttctcaaacaccattcctatatccagcctgacttgggaattagaaggagggaatgaccctatgagtaagaaacggcgaggagagttctctgactttcatggccctcccaagaagataataaaagtgcagaaggatgagagttccactgggtctctggccatgagtacaaggcccaggagggtaatagagagaccacccttaacacagcaacaggctgcacaaaaaagaacttgtgattccattactccttctaaatcatctcctgtacctgtttctgatactcagaaacttaaaaatctaccttttaagacttctggcttggaaactgccaagaagagaaacagcatttctgatgatgatactgattctgaagatgaattgagaatgatgattgcgaaagaggaaaacttacagagaactacacaaccctcaataaatgaatctgaaagtgatccttttgaagttgtaagggatgatttcaaatcaggcgttcacaaactgcattctttaataggtttaggtatcaaaaatcgtgtctcttgccatgatagtgatgatgatattatgagaaatgatcgtgagtatgactcaggagatacagatgaaattattgcgatgaaaaaaaatgttgctaaggtcaaaaacagtacagaattttcacaaatggaaaaatctacgaagaaaacttctttcaaaaatagagaaaactgtgagctttctgatcactgtattaaactacaaaaaagaaaaagcaatgtagagtcagccctcagtcatggattaaagtctcttaatcgtaaatctccctctcactccagtagcagtgaagatgctgattctgcatcagaattagctgactctgaaggaggtgaggagtataatgccatgatgaaaaactgccttcgtgtgaatctcactttagctgatttggaacaattggctggcagtgatctgaaggttccaaatgaagatactaagagtgatggaccagaaaccaccacccaatgcaagtttgacagaggctccaagagccccaagactcccactggcctccgcagaggccgacagtgtattcgtcctgcggagattgtggcttccctgttagaaggagaggagaacacctgtggcaaacagaaaccaaaggaaaacaatttaaagccaaaatttcaggctttcaagggagtaggctgtctatatgaaaaggagtcaatgaaaaaatccttgaaagacagtgttgcctctaacaataaagatcagaattccatgaaacatgaggatcccagtatcatatccatggaagatgggtccccatatgttaatggctcattaggtgaagtgactccatgccaacatgcaaagaaggcgaatggcccaaactatattcagcctcaaaaaagacagaccacttttgaaagccaggatcgcaaggcagtgtcccctagcagttctgaaaagagaagtaagaatcctatttctaggccattagaaggtaagaagtccttaagtcttagtgcaaagactcacaacataggctttgacaaagacagctgccatagtaccacaaagacagaagcttcacaggaagagcggtctgattcaagcggcctcacatctctcaagaaatcaccaaaggtctcatccaaggacactcgggaaatcaaaactgatttctcactttctattagtaattcgtcagatgtgagtgctaaagataagcatgctgaagacaatgagaagcgtttggcagccttggaagcgaggcaaaaagcaaaagaagtgcagaagaagctggtgcataatgctctggcaaatttggtgagtatattttcaatgtatggatttaacaagaactcagaaagttcagcttttctttcccatgaagttaggtgtg

SEQ ID NO: 42216 - DNA, 2300 bp, Homo sapien
cacatataagtagttattgaaaaaagggactttcaagagtaatcgcttaaggtggggtgcagtggctcacacctgtaatcccagcactttgggaggccactgggggatcacttgagcccaggtgtttgcgaccagtctaggcaacatagtgagactgtaactctacaaaaaatattaataaaagaaaaatcaggctgggcccggtggcacatgcctgtggtccctgccactggggaggctgagttgggaggatcacttgagcctggaaggttgaagctgtattgagccacgatcatgccgtggcactccagcctgggtagcagtgaaaccctgtctcaaaacaaaaaagagtgatagcttaaagcaccttaatacttgcctattcatatgctttagggaatcagcaaatgacagccatcattacaacacatcgatgttaactagaatctttcccggatagtgtcgacataggcctggtaaagatttattagattttttttaatttttaatttttatttttaagacaggttctcaccatgttgcccaggctggtctcgaactcctgggctcatgtaatcggcccacctcggcctcccaaagtgctgggattacaggcatgagccaccgtgcccaggccagctttctaataaagacctaaaaatgttgcagagagtgagttcatgtgaagtggatgttattcagctaggagaatcagagttaggatgagtaagaactgagagaacagaaatagccaaaagaatttgagagtaaaggacacacatgtggccatgtcctctgggttctcctgaacccagaactttgctttactgtatcagttcgatggttggatttctgtgatttacagaaaatagccctgagacctgtgtacctataatataatctgaataggtttgctataatatccacatacactccaagtaatttctgccaactaatagtggtggtactagactttaactcagcaaatgtcatagaaagctcagtttcttagaccctgaaaggtaacctagttaagtcctcattttcttttacaggaaactgaaaggggggggaaatgacttatttgagattaagcaatattttttgtatcaaagattgatgagttttcctaaaaccaagtgctttagttttgtttcttgacttgcgtaacatcatcaaatatgatccctcaaaatactgccacaacctgaagaagataggggaggatttctcaaacaccattcctatatccagcctgacttgggaattagaaggagggaatgaccctatgagtaagaaacggcgaggagagttctctgactttcatggccctcccaagaagataataaaagtgcagaaggatgagagttccactgggtctctggccatgagtacaaggcccaggagggtaatagagagaccacccttaacacagcaacaggctgcacaaaaaagaacttgtgattccattactccttctaaatcatctcctgtacctgtttctgatactcagaaacttaaaaatctaccttttaagacttctggcttggaaactgccaagaagagaaacagcatttctgatgatgatactgattctgaagatgaattgagaatgatgattgcgaaagaggaaaacttacagagaactacacaaccctcaataaatgaatctgaaagtgatccttttgaagttgtaagggatgatttcaaatcaggcgttcacaaactgcattctttaataggtttaggtatcaaaaatcgtgtctcttgccatgatagtgatgatgatattatgagaaatgatcgtgagtatgactcaggagatacagatgaaattattgcgatgaaaaaaaatgttgctaaggtcaaaaacagtacagaattttcacaaatggaaaaatctacgaagaaaacttctttcaaaaatagagaaaactgtgagctttctgatcactgtattaaactacaaaaaagaaaaagcaatgtagagtcagccctcagtcatggattaaagtctcttaatcgtaaatctccctctcactccagtagcagtgaagatgctgattctgcatcagaattagctgactctgaaggaggtgaggagtataatgccatgatgaaaaactgccttcgtgtgaatctcactttagctgatttggaacaattggctggcagtgatctgaaggttccaaatgaagatactaagagtgatggaccagaaaccaccacccaatgcaagtttgacagaggctccaagagccccaagactcccactggcctccgcagaggccgacagtgta

SEQ ID NO: 42217 - DNA, 2300 bp, Homo sapien
tggctcactgcagcctctgcctcctgggttcaagcaattcccctgcctcagcctcccaagtagctgggactacaggtgtgtgccaccacacctggctaatttttttgtatttttactagagacggggtttcaccatgttggccaggatggtcttgatctcctaaccttgtgatctgcccaccttggcctcccaaagagctgggattacaggcatgagccaccgcacctgaccgtcttgatgtattctttagcttgtaaccctggtgtcagtcagtaaggggaacagtagcaggtatttgaaacagagggattataatatatgcagttagttaaacaagtgctggaggagcaaaagccaaaggtcagattccccactgattgacaactgcagtaaaccactaccccactgggactagagaagcaaaaacgtgtgtcctctgagctcacagctactgtgccactgaaaccactactacctgaatccaggccctagttgcaccggacatagctgtgacctctgccctccctacaagtggctcaaagtcaggaaagtactgatttcttcttttccactttccagctttccaccaatggcagctgctgatggcaaagaggaagatattgaaggacagtagagacaatagacactttttggcacacctcacatataactggcacatataagtagttattgaaaaaagggactttcaagagtaatcgcttaaggtggggtgcagtggctcacacctgtaatcccagcactttgggaggccactgggggatcacttgagcccaggtgtttgcgaccagtctaggcaacatagtgagactgtaactctacaaaaaatattaataaaagaaaaatcaggctgggcccggtggcacatgcctgtggtccctgccactggggaggctgagttgggaggatcacttgagcctggaaggttgaagctgtattgagccacgatcatgccgtggcactccagcctgggtagcagtgaaaccctgtctcaaaacaaaaaagagtgatagcttaaagcaccttaatacttgcctattcatatgctttagggaatcagcaaatgacagccatcattacaacacatcgatgttaactagaatctttcccggatagtgtcgacataggcctggtaaagatttattagattttttttaatttttaatttttatttttaagacaggttctcaccatgttgcccaggctggtctcgaactcctgggctcatgtaatcggcccacctcggcctcccaaagtgctgggattacaggcatgagccaccgtgcccaggccagctttctaataaagacctaaaaatgttgcagagagtgagttcatgtgaagtggatgttattcagctaggagaatcagagttaggatgagtaagaactgagagaacagaaatagccaaaagaatttgagagtaaaggacacacatgtggccatgtcctctgggttctcctgaacccagaactttgctttactgtatcagttcgatggttggatttctgtgatttacagaaaatagccctgagacctgtgtacctataatataatctgaataggtttgctataatatccacatacactccaagtaatttctgccaactaatagtggtggtactagactttaactcagcaaatgtcatagaaagctcagtttcttagaccctgaaaggtaacctagttaagtcctcattttcttttacaggaaactgaaaggggggggaaatgacttatttgagattaagcaatattttttgtatcaaagattgatgagttttcctaaaaccaagtgctttagttttgtttcttgacttgcgtaacatcatcaaatatgatccctcaaaatactgccacaacctgaagaagataggggaggatttctcaaacaccattcctatatccagcctgacttgggaattagaaggagggaatgaccctatgagtaagaaacggcgaggagagttctctgactttcatggccctcccaagaagataataaaagtgcagaaggatgagagttccactgggtctctggccatgagtacaaggcccaggagggtaatagagagaccacccttaacacagcaacaggctgcacaaaaaagaacttgtgattccattactccttctaaatcatctcctgtacctgtttctgatactcagaaacttaaaaatctaccttttaagacttctggcttggaaactgccaagaagagaaacagcatttctgatgatgatactgattctgaagatgaattgagaatgatgattgcga

SEQ ID NO: 42218 - DNA, 2300 bp, Homo sapien
gttttgagaactagaattttctaacatggattaagtgtcccgttaagtagactatcactagcatacaatcaaaatgtttccttatctgactactggacattttcttctttttttttttggaatattttgataattatgcttatttttatagccaataaaaaacaaggtttatctttgaaataataagttttcaagagctatttttttttttaatttagaaacaaccgtttttacattgctctctggataagaatttaaataaattgttttgtttgtttgtttgtttgttttttaggaaacccacagaaagtttttgcatatatcaacatcagtgtagcagaagcggacctgaaaaaatgtaagatcatcatatattttctatactgtttgccagtttgtatgactctgtaacttggaataactggttctaaatctaaacctccacagccatttttcacgttatccagagggacagcagtgatgaagagaattccagtatcgtataactcagcaggtttaggtccattccatttggcatcagcagacatggtagcactttactggtgggtttacttaaaactgctattctcaaatattttggacaagggaccaaactttcatagaaactgcctgttacatatatcccactgaatatcatgccacattccccctcagtctgatcatttctttgacagctaatccttgtcactaaacactcttgagggggctttaaaatacacccttgtaagaccgtatccttgaaattgtgaaatctcttgttgataagtttagtaaagtcaagggcaaacagtggccttcaatgaagaatgggagataatccatactgccgctgacacagtaacatattctagttatttggaggccaaaaagtgaaaaaagacacggaaaataagtaaagggaacacgctaatagaggaagagggcaatcagtcttttgtaatttcatttgcgaaaagattgctttattctattttacattgaggaatatatgtgataaatgtgaagttgtggttaagaatacatcaactaggctttgtgacctgtggcaagttacttaaacttctcagcccaagtttgcttatgtgatgaatgacaaaagatagtgcttgcctcataatatttctgtgagaattaaattaaatgatacatttgcaatactttgggaggctaaggcaggtggatcacttgaggtcaggagtttgagaccagcctggccaacatggtgaaaccccatctttactaaaaataccacaattagctgggtgtggtggcagacacctgtaatcccagctacttgggaggctgagacaggagaatcaccagggaggcagaggttgcagtgagccaagatagtgccactgcactccagcctgggcgacagaaggacactctgtctcaaaaagaaaagataaatttgtacttagtacagtatctaccacctacaaaattctgttaatggtattattaaggaagctgacggcagatgctcagagaaatcaattactacggcatagtaattcaaacagttcagtcactcatagttaattcatctgcaagttctacagtgataattagtatgaggtgataaataaaattaaggtgctgtaggattccagagtgtcctctgattcacctgaaaagatgattgttttatagttacaggaaatatatgttttatagttacaggaaataacaataaaatatacattaaatatcagttattcagaggttcctgacatttgtttacaaacaaattgcaaataaattttgctttactttttacacattttgcctcattccaatctagtaacactgtgagatagggagtgtaaagactcttttggtaagttgtcaagatgaaacaagagcctaggctccctctctccaggtctcatttcttttcttccacttcccctggatctctttgtgataaacaagcctgcttttcttgatactaaataattagaaaaagcacaagctgaaatatatttttacattgccatgtacttgtaataattctttactttataggtatgtctgttttaaataaaacaaaatggaaaggtggaacattacaaattcaactagcaaaagaaagctttctgcacaggtaagttttgctccacatggatttaagccctattttttttatattgtaagtggttttatatattatttcaaattatcaagtaatatagtattatattcttaacaaattcaaacatataagtagagctgaaatccctttcaactctgaatccccttcaccccagacgaac

SEQ ID NO: 42219 - DNA, 2300 bp, Homo sapien
ggtttagatttagaaccagttattccaagttacagagtcatacaaactggcaaacagtatagaaaatatatgatgatcttacattttttcaggtccgcttctgctacactgatgttgatatatgcaaaaactttctgtgggtttcctaaaaaacaaacaaacaaacaaacaaaacaatttatttaaattcttatccagagagcaatgtaaaaacggttgtttctaaattaaaaaaaaaaatagctcttgaaaacttattatttcaaagataaaccttgttttttattggctataaaaataagcataattatcaaaatattccaaaaaaaaaaagaagaaaatgtccagtagtcagataaggaaacattttgattgtatgctagtgatagtctacttaacgggacacttaatccatgttagaaaattctagttctcaaaactggaagttaatatgtttctgaaatcagatgttttagaatttggaattttttcttatttcagaaacaaattctggtcaagttccacatcacacattatacctccacaacatcacttaaaacttttggtgttcagagctaacatttatcttggggttgttttattttctagcacttaacctgagttatgtctgcctataactgcccagtgaaggaccataaattaccttggtcatctttccgtgtgatgatctccacatccgaaacttctccaaatctgctgaactgattttgtaggtctgcctcagaaatgtcctggctaaggccacccacataaaggcgcttcgtttctctgttcactttcatgaaggctgggcatatacttgggtgtgtttcagtgggaaaagtaattttctgtatacagagaagagttctttcccttagttcttctaaaatctaacaaaacaactacttcctctgaaccttctgtatcaaatccgtctcctggatctgtatttcacttcctattgtattacttccaaattttagtcttcgaggttttgcccaagccctacatccacatctttcatgaatgcactttggaacagcaaccccatacccatatagacacaggtacagacagagtttttttcctccaaatggccataatattacactctatccctcttaattttatgtattcatgtttttagatgtttttccttgactcactcatacattcatttactgtctttaacaaagtctgacagaaacaggatgtaacgcactaaaagataaaaagagctagcctacctcttcctaattgtctccacccccaacctacccaccccagccttcttcctcctagaagacccaaagaagtgaatagagaggctaggagctccttatagtcacaaaagaataaaacaaatggcacaatattatgtcacaataaaagtgctgcaaagtggggttcagacacaaagatcaagggatatagcgaatacagacttgtgtttttgctatgtgcctgcattgtacaaagtagtttgcatgtttcccatttttcaggagagcagaagaggttaagtcacttcctcaatgccataccgaaaattagtgaatccaggattataatgcaggtctaccttcagaacttggaattcttaacactatactatgaaggttgctgtatcacaggggactcaggaaaacttttccagaggtactagggcccatcatagtatctctcatttcgtttagcacccggcaggcgctcagctctcgcccttcccttccccaagagctgacagactctttccagaagagactcccaaccagcgtccaccacatggcgtgtattctgggcagaacttcggcctacctcttcccgatagtctccgcccccagcctacccacggcagccttctttctctgagaagacccaaagaagtgaagagagactaggaaacggccctgtgacttctcatgcccgaaacccactcctcaccacgtcgttcacctaaagccagcgccgctgcagcccctaacttctggtcacgtgtcccaacggagcatcctctcttccttcctactcgatttccaacccagcctcctaaggttccgttaccacaattcagttcccaagagcttttaatttccttttccgtcctcccaccttccctgacgcctccgtcacctccccctcaacgactgcaaaagagcctaaaccaaaatcccctagtttctattgaacactatcgctgtgtgtaccaattcctggactaggtcggcgtaagagaggaagtaggtgaaaaaaataaagaggcgctcccctccacgtgatcccagccctgcctcttt

SEQ ID NO: 42220 - DNA, 2300 bp, Homo sapien
cctctccttcaataaaccaaaagtgcccagactttggagtaaaatttttgggtcccaatccatctctgacaattcctttctctggaaccttggacaagctacctaacttctctgagcctcagtttcttcaactataaaacagggctaacagtagcacctacctcagaggaatgtcaaattctcctgcagtctatattaactacttttcttttatcaacttagttttttaccgaagttatttttcaaaggaatttttatgtcatcgtaaacacaaagtcattatcagttgagatggttagctgacctaccaaaacaaatgccatgaaaccaaacggagttattaaatcccaactagagatacttctgcatactggaggcggaattatctagctagggatatagtcaagacttcctccttgtcagtcatccacacagacgactgcgattaaacgagttaataccctgcaatgcgtttacagctgggcgccgtacgcgctgctcccaactctaggccatcgtcatgacaggatcaatgccagttcatgcccactttctagggctgggagtaggagaccgaggatgtctgtggagattcacccgcctggcccgggaaccctggccagcgggccctgggggacttggggtggtcacgtactggactcgggacttctcttcccagggcgccggtgggtcctcacacgctcgccgcagggccgcgatctcagcttgcaaggcgcgcacctctgccagctctgcgtccatggcgcgttgctgaccgcagccgggccggcagcgcagctgtcactccgacctgcgcgcttcacccgcgcttcaagcctcgcgcgcgctcccggcgcggaccatcccagagctcacgcggaggggaggcgggagagctccgcgtgaccccagcggccctgcacgtccaactccgctctcgcacgagagcctgagtcctccacttccccgcacacgtttccctggctgtctaagcagtggctatactttctctggagagcgcgttctttgctactccaagcccaagcgctccgctgctcaccctagccggcagccttggagccgcccggccgcgtgcctcactaaagaggcagggctgggatcacgtggaggggagcgcctctttatttttttcacctacttcctctcttacgccgacctagtccaggaattggtacacacagcgatagtgttcaatagaaactaggggattttggtttaggctcttttgcagtcgttgagggggaggtgacggaggcgtcagggaaggtgggaggacggaaaaggaaattaaaagctcttgggaactgaattgtggtaacggaaccttaggaggctgggttggaaatcgagtaggaaggaagagaggatgctccgttgggacacgtgaccagaagttaggggctgcagcggcgctggctttaggtgaacgacgtggtgaggagtgggtttcgggcatgagaagtcacagggccgtttcctagtctctcttcacttctttgggtcttctcagagaaagaaggctgccgtgggtaggctgggggcggagactatcgggaagaggtaggccgaagttctgcccagaatacacgccatgtggtggacgctggttgggagtctcttctggaaagagtctgtcagctcttggggaagggaagggcgagagctgagcgcctgccgggtgctaaacgaaatgagagatactatgatgggccctagtacctctggaaaagttttcctgagtcccctgtgatacagcaaccttcatagtatagtgttaagaattccaagttctgaaggtagacctgcattataatcctggattcactaattttcggtatggcattgaggaagtgacttaacctcttctgctctcctgaaaaatgggaaacatgcaaactactttgtacaatgcaggcacatagcaaaaacacaagtctgtattcgctatatcccttgatctttgtgtctgaaccccactttgcagcacttttattgtgacataatattgtgccatttgttttattcttttgtgactataaggagctcctagcctctctattcacttctttgggtcttctaggaggaagaaggctggggtgggtaggttgggggtggagacaattaggaagaggtaggctagctctttttatcttttagtgcgttacatcctgtttctgtcagactttgttaaagacagtaaatgaatgtatgagtgagtcaaggaaaaacatctaaaaacatgaatacataaaattaagagggatagagtgtaatattat

SEQ ID NO: 42221 - DNA, 2300 bp, Homo sapien
aaaaattttcttttgataagatcaccaaccatggacttgttctaacaggtttacaaggcctgtgtacttaagtacctttgcttccctccttcaacttttgacgtacagggcctaattgtaatgcatttaaatattaagtcagcttcccaaaatgaatatggagtgcatgtaatatgcatttttattcagtacaggtgagcacatctcccttcgtgaatattcatagcccctcctataacctgttgaatatgtatacctagcccactcatacagcataaatccctgccccaacccctcctcctccaaagtgtgggcctttctgctttgcctgagactatgcttcctagcctgtcaggatggccactttgcagactgtaaccctttttaagaaatagtctctctaaatttgcagatctcatgatttttcagttgacactactatggggactaatgaaatcttgtggccagtaaagaaactatttttccctggttcttaaacttccaagtgtgcacacaaatcctctgttagggcagtgtatttttttaaaatgcagattctgattcagtaggtcaggatgtcgctctaacaaaccgccaggtaatgctaaagcgtcccatctgtggagcacacctcaaatagcaagggtctttaatacatttactctcatttgtggaggagcacacctttttcctctccctttaaccagtcacagcttcctctactttcatgaccgcacgcagacattttctgtagatctcctccttcccattttctaccaattcttctccagttagctcaggaaaaatcccattctttctgcacctatgtcaaattactcttgactcaaaaattgaagacagtttatgttttcgagaggcttctatgtttgagatgataatacataattacggttgcagagcttttctctccctctccttcaataaaccaaaagtgcccagactttggagtaaaatttttgggtcccaatccatctctgacaattcctttctctggaaccttggacaagctacctaacttctctgagcctcagtttcttcaactataaaacagggctaacagtagcacctacctcagaggaatgtcaaattctcctgcagtctatattaactacttttcttttatcaacttagttttttaccgaagttatttttcaaaggaatttttatgtcatcgtaaacacaaagtcattatcagttgagatggttagctgacctaccaaaacaaatgccatgaaaccaaacggagttattaaatcccaactagagatacttctgcatactggaggcggaattatctagctagggatatagtcaagacttcctccttgtcagtcatccacacagacgactgcgattaaacgagttaataccctgcaatgcgtttacagctgggcgccgtacgcgctgctcccaactctaggccatcgtcatgacaggatcaatgccagttcatgcccactttctagggctgggagtaggagaccgaggatgtctgtggagattcacccgcctggcccgggaaccctggccagcgggccctgggggacttggggtggtcacgtactggactcgggacttctcttcccagggcgccggtgggtcctcacacgctcgccgcagggccgcgatctcagcttgcaaggcgcgcacctctgccagctctgcgtccatggcgcgttgctgaccgcagccgggccggcagcgcagctgtcactccgacctgcgcgcttcacccgcgcttcaagcctcgcgcgcgctcccggcgcggaccatcccagagctcacgcggaggggaggcgggagagctccgcgtgaccccagcggccctgcacgtccaactccgctctcgcacgagagcctgagtcctccacttccccgcacacgtttccctggctgtctaagcagtggctatactttctctggagagcgcgttctttgctactccaagcccaagcgctccgctgctcaccctagccggcagccttggagccgcccggccgcgtgcctcactaaagaggcagggctgggatcacgtggaggggagcgcctctttatttttttcacctacttcctctcttacgccgacctagtccaggaattggtacacacagcgatagtgttcaatagaaactaggggattttggtttaggctcttttgcagtcgttgagggggaggtgacggaggcgtcagggaaggtgggaggacggaaaaggaaattaaaagctcttgggaactgaattgtggtaacggaaccttaggaggctgggttggaaatcga

SEQ ID NO: 42222 - DNA, 2300 bp, Homo sapien
ctgtatccttgaagccataaaaccaacaatttatatcaactcaagccagacaatatcacaattaaatttaagataattcacattcaaataaaaacttcagtgctcaagtcttagtttatttaagctttgatttgaaaggttctaaaacaattttgtctagaaaagaaaacaaattgttattctttcattttctattttaataaaatatatatccatatttgttaaatttttagcttaaaggagaaaagttaatttgattggtaaaagcaccaaggaggaattttttaaaagtgactctttaaaaaaatcttcaaagttgcttgtatggtatctacaatgccactttaatttttaaaagccaatttcaatattaaagtaattttataaagtttccttcattcagcaaacaaaagtatcttttactatcaacctcaaaaactataaatcaaatttacttttaaaaagctaatttttatgcatcagtttttcttatatgtaactaaaataaaggggagaaaaaatccaaatgacaaaactatcaaataatttgtgctaaaactaatttttacactggaaaaatatattacactggctatatattaattatggtattagggcaatatttttaatcctcataaaattaacaacatggactatgttgtcatttggtgtcctatttcattcaaaaagcagattgtttgatctcctgggaaatcaccaaaatgaaaaggatgactttaaaactatatcatttttcataaactaatattcaccaaaacatgaatgtttattacacaataataaaatcacacaagtttatagtcaaattagttgaagcagactgagtgcagcagttacaacaaataacttaagcacagttctctagtacaacacactgcatttcaccctagagaaagaatgctggcaaagatctctaccacatggaaactgttcttaaagctgctgggccctgaaattttactcagcagtttgaaatcaagacatagcttttctcattcaccctcccacttggggctaatgcacagacatgaacatctattgaggaaaaccacaaaaaacttcaaaacagctacaacggtaggcttacttttcatatattattttaaatattgtttgttaaagtgcgactgactcatctaatagtcttaataaatgtaaaggccatctctggtttaagtttcagttacctcaattaatttttaagaagtacttatgtatatcatcgcataaatttaacatccacgcaggcaagaatagggtgctgcagaagtcacaaatccattatcttcttcattttcaacctctggatttttgacaaactggcatctataatgcagcatcagcaactcttgagtgattctgtttgaagttacttaagaaaaagtctgaaatgtgtacccaccagagaaaatccattgatgagcctaaaggaatcctttctattacattcctcaaagttctttgattaaagttcggtatttcctctagcctgcaatactattctttcagttttcttagcttaaattaaaaatacaatactattaactaaaaattatgatcacctattaaaattacaaaactaagaaaattaaaaacgtatggcttttcctatattctgtaccacctaaaggtgttaatgactacttttcataatgttaaatttaagttttaaaacttttcttggaacttgtttctgttcataccaatataaatcaagagttcttataaagtagctaagtggaaatatgatatttttaactcacatgagacaggatcttgggactttattttaactatttatactacaggtatcctaagaatatttcaattaaatattagtatgtctgctgaaggcacttaattattaagaaacttaaaattatcaatctttcttgaatttctgatagagaagtaaaactattttccaaaactatttttcagaatgttcactgatacataaaaactgctagcatctaattaaagatcactaagggttaaatactgttctctggcccttactgcgcacaccctgccaaaacatcctctaagcttttaaatattgcttcgatggtctgaatttttatttccagggaaaaagagagttttgtcccacagtcagcaggccactagtttattaacttccagtcaccttgatttttgctaaaatgaagactctgcagtctacacttctcctgttactgcttgtgcctctgataaagccagcaccaccaacccagcaggactcacgcattatctatgattatggaacagataatttt

SEQ ID NO: 42223 - DNA, 2300 bp, Homo sapien
cccctgaagtgaggctgcagtgccagatgcacttcaaatgcagatcctgaagcagaccatcaagcaaagacacgccaaattcctgacccacagaaactgtgagataataaatgtgtgttattttaactaagccattcctttgtggtagttttttacacagtaatagataaccactacaatagatgaacagtggtattcttcagcaatgcaacattagaggaatgtttctaaaatgcaaacaggatcatatttaagccatcactggcttaaaaatctctacatggtctctcactgactacagactaaagcccaaatactttagcaggatataaaatactttctttaatccaacctctattccccctgtctagtcgcatctcttaatatggtccatccccctgacttcttctctctctccctccaagctccagcagtatgcaaaacaaattataaattttctgaatgatctacccccatcccctccctaaggggagcacgtgatgatccccttgcctagaatacctcatcacctgcgcttaccctcctctcctatcctctctatagaagtcagtttgggtgcagtctccttgactcccagtcagtttgtggcttctcccaggttatcacagaactctgcatatttctgtgtagcaagccctaccatggattctagttgcttgtttgctgcttttcctgctgacttagaggctataaatcttccttgagggaagaaactgaagtttgcttatctgagcttacgtgtctgaagtcctggcacagaattggcgctcaataaacttttattaaatgagtgaatgctaataacattgtattcactggtcataacttttcaaggaaagttgttcttcacaaaataattttctgtagtacaaagcatcaaagtgtaccattaatgaaactatgaatctctaagattctctaaatttggacatatggtatctatccagcttacttctcaatatcttgttaacttgccacacaatacaaaacaaatcaatgtctgttgtttcattattatatatttcaaagtatttaaaaaagttttactgtatccttgaagccataaaaccaacaatttatatcaactcaagccagacaatatcacaattaaatttaagataattcacattcaaataaaaacttcagtgctcaagtcttagtttatttaagctttgatttgaaaggttctaaaacaattttgtctagaaaagaaaacaaattgttattctttcattttctattttaataaaatatatatccatatttgttaaatttttagcttaaaggagaaaagttaatttgattggtaaaagcaccaaggaggaattttttaaaagtgactctttaaaaaaatcttcaaagttgcttgtatggtatctacaatgccactttaatttttaaaagccaatttcaatattaaagtaattttataaagtttccttcattcagcaaacaaaagtatcttttactatcaacctcaaaaactataaatcaaatttacttttaaaaagctaatttttatgcatcagtttttcttatatgtaactaaaataaaggggagaaaaaatccaaatgacaaaactatcaaataatttgtgctaaaactaatttttacactggaaaaatatattacactggctatatattaattatggtattagggcaatatttttaatcctcataaaattaacaacatggactatgttgtcatttggtgtcctatttcattcaaaaagcagattgtttgatctcctgggaaatcaccaaaatgaaaaggatgactttaaaactatatcatttttcataaactaatattcaccaaaacatgaatgtttattacacaataataaaatcacacaagtttatagtcaaattagttgaagcagactgagtgcagcagttacaacaaataacttaagcacagttctctagtacaacacactgcatttcaccctagagaaagaatgctggcaaagatctctaccacatggaaactgttcttaaagctgctgggccctgaaattttactcagcagtttgaaatcaagacatagcttttctcattcaccctcccacttggggctaatgcacagacatgaacatctattgaggaaaaccacaaaaaacttcaaaacagctacaacggtaggcttacttttcatatattattttaaatattgtttgttaaagtgcgactgactcatctaatagtcttaataaatgtaaaggccatctctggtttaagtttcagttacctcaattaatttttaagaagtactt

SEQ ID NO: 42224 - DNA, 2300 bp, Homo sapien
atcgcactctacattgtttatattctgcattttatgcttatttatgtttattttctgttttccttctctataacagagactttcactgctgagtcccaagcatctaaaatctgcacaaagtaggtgtccagtgaataaagtggaacaaatgagcagaaaattgtaatgcttattatgttaattaagcaggtctcaggagggcctttcctagccagtcctgtgtcactcagctttgagatactgaatctatttcaatcaaagtataatcatagcatataatttacacttttcaacaattcaactccttttctccccaattgctacaattataaccacttaactaaaacagtgaactattacaaactcacatcccctattttttcctttaaggcctgactctaactaccaccacctccccccatccccatcccttgccaccttaaacctcctagatagacactgccaatcagtttaaattttctagacatttttattctgtctgctctagttatctactgatttttctttcacacttgttaaaaacatgaataacataatcaatatcataaatccaaatcacagagttaatgagaagttatataaacattaggctgttgattttcagttaatcttccaaaaggactgtgaaggcctataaaacaattttttgaaaaagtacacagatttgctctctcttccttagtgaaagcctgagttttaagaacaaagacactaacagaaaacatatggaaaagatcagtaacaagatggaatcttggctaaagtgtggtctgccacgtttttcataccaatgtctcaaataatagactagatttttacaactgccaaagcatcacttgaaacactgtatacttttcttaatgcaaagtttaacaaaataaatcttgtgagttctttgtaaaaagctaatggaaaacacttttttgaggaaacaaaatgaactccaggattcactttatcttattagtttgtaaaagcttaaaagaattcccccccaaaatgaactccgaatctactgccaaaagacacaagtcaactctctgtttagaatatgagaacagtgtaaaaattaaacattaaaaacagttaactgttactattcaggagagatagctctatgaaatgaagaaattttctaaatctacaaaataaaggcaatagctattgagtaacataagcttttcatcccattttattcaatactacagaattattttgtgcaatagtaaaaacaggcaaattgaagatacacctttggagtgcaaccaactgactaattttatctgaaaggatattagaagtcattctagtgggtacatctgccaaaaagaggagaaatgagatagctgataaaaatgatgataaaaatgaagatgtaagcctttgtatagaaaagtcgtatagttaatctgtgtaagcaatgacaatcaagtgcattttaaaaataaacaatgcgaaatgttatgtttctaatcctgatttcttgttttaacaaatagaagtactgatatgaacctaggtgttgaataaccaagggactcaagaaattttgagttccaggccaggcgtggtggctcatgcctgtaatcccagcaatttgggaggtggaggcgggaggatcacctgaggtcaggagttcaagaccagcctggccaacatggtgaaaccccatctctactaaaaatacaagaaattagccaggcatggtggctcatgcctgtaatcccagctacttgggaggctgagacaggagaattgcttgaacccgggaggtggaggttgtggtgagccgaggttgcaccactatactctggcctgggcagcaaagcaagactccatctcaaaaaattaaaaaagaaattttgagttccaccttaagttgctgagactctggagttccctgtcacagtgggccttaatttgaagaattctttggcatgaaaatgaaaataaaaacagtaatcagtacatgctgtttcatttagttttgtttgcctttcacattagaggaaattcttgccacacctcaaaccaaaattaaggggaaaagaaagaagtaagccacataaatctgaccaagaacacaagcatcttaatttgaatccacaaagtttcatgtaatgaaaagaaatacataattttaattcaacccgagtgttttccaagaagattgtatttgcttaaattgctacagtaattcaagagacagccctgtctggacacagagttactgtggatttttaagagactcagttaaagaatttaggaatttctgattc

SEQ ID NO: 42225 - DNA, 2300 bp, Homo sapien
aaataatatcctgtgttcataaaaatggcaaaattaatctattctaacaaacaaaactgcaccctaccttgctaattcatcaagttaccccccttcttcttcccatatagggttaaatttcttaagaaagtatcaattttattttagtattattattatttttttgagacagagtcttgctctgtcacccaggctggagtacaatggcgcgatctcggctcactgcaacttccgtctcctgggttcaagcgattttcctgcttcagcctcctgagtagctgggattaaaggcgcacaccaccatgcctggctaatttttatatttttagtagagacgaggttttaccatgttggccaggatggtcttgatctcctgacctcatgatccacccgactcggcctccgaaagtgctgggattataggcgtgagccaccgcgcccagcctatttttttatttttatttttgagacagagtctcactctgtcacccaggctggagtgcagtggcactatcttggctcactgcaacctctgcctcctgggttcaagcgattctcctgactcagcctcccgagtagctgggactacaggcacgtgtaacaatgcccagctaatttttgtattcttagtagagacggggtttctttcaccatgttggccaggctggtcttacaactcctgaccttaagtgacccacccacctcggcctcccaaagtgctgggattacaggcgtaaggcaccatgcctgaccaattttaaagtatagaaaggaaaagtacatagagctgtaggatagaatgttgatattcaaatactagattttcaattcttcaatttttggctattaaatgtatgactacacttcaggagtgaggacggttctatcaaaagtgtactgacatctaggccaaggcaggcatctcgcttgagtccaggagttcgagactagcctggccaacatggcgaaacgctgtgtctagtaaaaatacaacaattagccaggcatggtggtacacatcctagctactcgggaggctaaggcagaagaatcactagaacccaggaggtggaggttgcagtgagccgagatggcgccactgcactccagccggggcgacagagcaagactgtctcaagttaaaaaaaaaaaaaaaaagaataatatatgaatcagtatgtggaaatcaaagaatttacaactaattagagaagttaattacttaaaggaaatgggtggtaaagtttttggtaatatacatgaaaaaaatctaatttttccattttctaaacacaactatctaaggcttcttaaaatgatcaagacccggctgggtgcggtggctcacgactgtaataccagcactttgggaggcccagtcaggcgaatcacgaggtcaggagtctgagaccagcctgaccaacatggggaaacctcgtctctactaaaaatacaaaaattagccaggcgtggtggcacacacctgtaatcccagctactcaggaggctgaggcaggagaactgctggaacccgggaggccgaggttgcagtgagccaagatcatgccactgcactccagcctgggcaacagagcgagactccatctcaaaaaaaaaaaaaaagaaagaaaaattatcaagacccatatgctccaatttagcactataacagcctgaaaatttgcaaagaaagctaacattcctcagccaaaggtacatcaacagaagctgcacctcagtggttggtcaccttctcacagccactaaggccactccaatttatctccttttattccaccttagaggggatgagtagtgacaactataccaatctagacaccttgtaaaaattaataagttactcaaaaaggtcctgaggtcttcccccaaaacaatgttttttttgtcatctgttatgactgttaagtcatctgtaacttgatgataatcatgggttttaaaaaatgtatatttctaccatattagtaatctcatcttcagcatgattctctattatataatatgtttgtttctttctaaggtttgacctcagtcccaaccaacattccatttgatactcgaatgcttgatcttcaaaacaataaaattaaggaaatcaaagaaaatgattttaaaggactcacttcactttatgtaagaatatatcctcatactttcaaagatttaagtgaaaactctgtatctttgctataatgattaattatactatgttagtataaacaagtcttacttttctgtaaagaatgacaaaaatccctgcattcaacagcgttctagtc

SEQ ID NO: 42226 - DNA, 2300 bp, Homo sapien
aaatacagcaatttcacctaacaaaaatacatacacatgacccccaaatgacagactgaggaacgttcatagtacctctccaaaaggtaattaatctagttgaatatataaacaatttgtggcttattcatgtatgagaatactatacagtgacaagaatgaactactgtgtatcacaatgacacgaatggatctcaaaagcatgtcactgaatgaaaaaagccagatgcaaaagagaatgcacagtatgattccatttatataaagttcaggaaataacctatggtgctgaactcaggctgtgacttgaggagtaagaggagggattctggatgtatgagaatggagtgtgaggctgggatttcttgattggggtcattttgtaaaaattaattgagttgtaccattatgatatgtttttttttggtaacatacacttcaataaacagttcagaaacaaaacattgtgcaggacaaactgaatttgacccaagggcttcctgtttatgactgtgttctgaaggaatttaggcaaacactagatgctctggatacaaagattttaaaaatccagttcatattttcattatgttcccaattcatccagttaacagatacatttgcaactgaaatatacttgaataaatgagaatatgagcattctaaaccaaacaggagggccgtcattccctaaggtgctgcagggctaggatggggcctgagttacagagggccactaatgggactaccgagctgcctggaactgtcagcctagaggtccaaggaggagtactttatttaagtgaggggaggatgaacacatagccagctgctatgcacatctgaggcacatgtattctttaggactgtagctgccttgcttaacacaatgtgtgccatttctctggagagagggaacaaacgatggtcagactcttgatgacagtagagaacaggtcttctaacccactggaaaagctctttgctggcctccaaatctatacaacagttgggaagaaccattggggtcacttacaacagtaagtccttgccactagggttagaaaactgtcctctcaggccggccatggtggctcatgcctgtaatcccagcactttgggaggccgaggcgggcagatcacgaggtcaggagatcgagaccatcctggctaacacaatgaaacactgtctctattaaaaaaccaaaaaattagccaggcgtggtggcgggcgcctgcagtcccagctactcgggaggctgaggcaggagaatggcgtgaacctgggaggcagagcttgcagtaagccaagattgcgccaccgcactccagcctgggtgacagagtgagactccgtctcaaaaaaaaaaaaaagaaaactgtcctctcttgaaggtcttagttgatgtagaattgggcagtctcttggggatgagtggaaagggggtacaaataatgatttattttcaggaaatagcatcttccctgctctaagtctccctaaatgtcagtgaggccatagctaatattctcttgaaaagggaaagttgtatgcatcctaagagggtgttacttggacatgcatgtgtgtctgtgttatatcacatatgttgagtccagggagcagttcatggagcctcatccatagtttccctgacatgctatagcagtgctaaaagcttaaaaaaaaaaaaaagtctggagaagtatgcataatgcaatagctacagtcattagaagaaaaaaaaagtatggttctttctcaggtacatctgaagtttgggtatatacttcagtaatgttggtatcctttattcagattgataaatattttattagtctatacaggttgagtaatttttgaaattgtaatttacaaatattcattcacttaagaatctaatatttttaaaactaggtatttcttgaatgactccgactgcactttcaatggccagttgccatgcattattaaactttctttttttttcttcttcagaatcttccagtagacgtctagagtttagctagaagtcttggctacgatacaaacagtgatggaaaacacatgagcagtaacaagttttaatcttgctcctcagtactaacatggactaatctgtgggagcagtttattccagtatcacccagggtgcagccacaccaggactgtgttgaagggtgttttttttcttttaaatgtaatacctcctcatcttttcttcttacacagtgtctgagaacatttacattatagataagtagtacatggtggataacttctacttttaggaggacta

SEQ ID NO: 42227 - DNA, 2300 bp, Homo sapien
gggttagcagtctatggccacttatcccttaatccttcaatgcctctcctttgcagtttagggtattcatctctgtatgtaacatcaccttgaatgttttaccattccttcctatcatagatttgttctggttggcaaaggagaccaaggtatgcctgtgagaattgaaataaatttcatcactgagcaagttagttactttaaccttctagaatcaccaaataccttaaattcccattaaaaagataacagcggcaaatctgttgtgatctgggttcttatgatccctggggttttagtttctcctccatactggctgtgtaaggaaggcttttcatctcaggaaacactgacagtgagtggacctgaggcaagagcaggaggaaagctgcaaggggtataggtgtgtgtatgtgagtatgtgtgtgtttctcagctgtagaattctgagaggcagtcaaaactgccaaccttcctttgtaggactaactttaggccaagagagattggctgagtgaatcctttgatgacagctgctgcaacaccttgatggaggtttctcttgtccctggccaccagacttcacagggattgcgccagtctgtctgaccataatgctactactgtaccaagagtgcctaaatattcatttcttaaatgtttttcagctttaccatgtgcaaggccctatactaaccctgagaccagctaattaaagagttactcttcctgactcttacctccttataactgatgctattgactgttatttttatatggcaccatcacgcccttccccccagacaattataaagctagagaataaaagcacaaaacagaaaacggctgggaaaatgggttgtggattacatcagtcacagaacgtcttagcaaacaggtggagagaaatctcccaagtaatctttgaaaacctgcagaacagtagggcccagagagggggccatgtctgatccaccacctttactggtaatgagtttccctggaacacatccatgctcatttgtttacaaattgttgttggggaaaaggcttatggagtgcctgcataaactggccataaaaatatgggacaataagttgtggaaagccacaagaggtctctgaggaggaaagccttcttatcgccgttatgttcccatgctctgagtgcaacctgctctcttatctataaacactgtgctcaaggagaaagacactcctctgaaacactgaaatgtggacagacgtacaggctcctagttaagcccgctcctactagctactctccaataagttaaagatatgctgtttaagcacaaaggagattcatttaaaccgctactgctatagattacgcctatgacatgctgcctccctttcactgtttcgccctaaacatctgcttcttagatctaagtgattgtactcaataaatcgtgtggagaccagaactctgggccttttgcagcctccattgtgcaactggccccctggctcccatctttatgaactcttaacctgtctcttctcttcctttgttgccacagggctttgggtaccctatgggtggtgttgaggctggtccccaacatattgtctatggctgctttcatgctacaatgacagagctgaataggtatgacagagaaggtgtagcctatgacgcctcaaatatttactatctggccctttatagaaaaaggtttctaattcctggtctaaagataaaggtaagatacaaaaaagttctgaacaggcatggtgactcatgctgtaatcccagcactttgggaggccaatgcaggaggactgcttgagcccaggagttcaaggctgcagtgagtcatgactgaaccactgcactccagcctgggcgatggagcaagaccccatctctatttaaaaaaaaaaaaaagttttttgattctgatagaagaattccaaattatgatttggcaataatactatagcatatagtccatatatcataagtgtaatttctcaaagacttgcctactgaggcatacaagcaaatatataagccaattttcagaagtaaaaatttagtcaccactaactttgaaatattgtttcattctagaaattggctggtggaaaaaaatcaaacatgaagattgcagttttgttttgtttttttctgcttatcatttttcaaactgactttggaaaaaatgaagaaattcctaggaagcaaaggaggaagatctaccacagaaggttgaggaaaagttcaacctcacacaagcacagatcaaacagacagcttggaattcagcaaa

SEQ ID NO: 42228 - DNA, 2300 bp, Homo sapien
tacagtacttcagagtacttccttgaaggcacacttttgtacagaaagaggtgtttctacaatgggttcctagaggtgaaatggtaggacagacagcatagctactgttcagctgtcctcaaggaagaggagagtttctgttttccctacacactggccaacacagcatatcatcaacatttttttcccccaaaaaacaatgtatgtatttcaaatcaggccatgatttttgattagcagtggtcttcaagcttgattgagcattggcattatttgggtaatttttctacccccaaagttttgtcagcaacatctcactatggtagtgaaaaaataaccttcctgttttaatttacttttcttgactgttactgagattgagaaatcttcctcttctgttttattgaccactgacatttcctcttctatgaactgcctgtttaatggtgtttgctcatttgtactcatctttttcttttcttttcttttcttttttgagatgtagtctcgctctgttgcccaggctggagtgcaatggcacaatcttggctcactgcaacctccgcctcctaggttcaagtgattctcctacctcagcctcctgagtagctgggactacaggcatgtgctaccatactcggctaatttttgtactgttagtagagacggggtttcacatgttggccaggctggtctcaaactcctaacctcaggtgatccacctgtctctgcctcccaaagtgctgggattacaggtgtgagccactgcactcagctagttttacatttttaaaaatagatatcattttccttatttttaggaagttgagtggcttatgtatttagtcccttatcttgattcagtctatctaggtcattttacaaaatcctgattcagtctaaccacgtcatttaaacaaatatttagctcctctttgccaaatgatttggacccctgaaataacgatataagaatttcaggccaggtgcggtggctcatgcctgtaatcccagcactttggaaggccgaggtgggtggatcacatgaggtcaagagttcgagaccagcctggccaacatggtgaaaccccatctctactaaaaaaaaaaatacaaaaattaatctggcatggtggcaggcgcctttaagcccacctactcgggaagctgaggcaggagaatcccttgaacctgggaggcggaggtttcagtgtgctgagatcacgacattgcactctagcctgggcaacagagcaaaaactcccgtctcaaaaaaaaaaaaaaaatttaaaaaatagttctaaaattacctagtctaggataggcactgagttaggaccttcatatctgttattccttttattttcagaaaaatttgaaaggtatcaccctagttttacagaagagtgaactttggtcagaaacattaagtaacttactcaaggtccctcataaacagcagggttgcgcttggaatcctgatctgtctctaacttctcatttgcagataaagaaactgaggccaaagtacacaactaatttgccagcgtaacaggtaattaggagccacacagctccctttcacattttctttctattatttcatggttagaagttacataatttccactgatattaatacgtaaccatttttttgttgttgtcgttttgttagtattgtgtgtgagatcgaggtgggtgggcagatgagttaaatattattaatccaatttaaaatagattccagatatacacagcctttagctgacgagaatatcatccctataatctgataaagctcaagtgacatcatcctggctagtataaactttaacatttttaatgcgaatagtctatgaaaaccacagatttcttaatcaagctcatttttgtgtttccaactctgccttttcagcctgcaaacaaaatgctcttcccccacacccactgctgttttctacttttcttatgattaaaaaaaatatttcccttggtaaccattttccctggttactttcttggctgattttctgcacaaagaactgaaaggcatttatccccaagggaggcagttattttagattttactaagaagttcagcaaatacttttcaacattcccttctgtcctttctttgtttttaaagaaagctctgattttgtttcattttcagctggagacttaaatgacaccaagcaaagcctacttagtttagatctccaggtaaaaaagttttaaattttaagtttctacttagcatgtggaatggttttaatatttgggtattttatttcacaact

SEQ ID NO: 42229 - DNA, 2300 bp, Homo sapien
gtttgaggtgttctttgggggtgtgggttttgtgagtcacagggctcctctctgtctgggctggccaagggcaggggccagctctcaccccccactgccatgggtccctctgagaaggagtgaaggaggggagaaggtgggcatgtgagggcgagttggcctcatccccacaaccccagcacagtagtccttgctcctctgagctttctataatcaccctagcaaagggacagtgatttccagtgagaaaaccctccacagagtatcgggagtagtgggaatctactagaggatgtgtcaggagggagaaattacatggggaaataacttgtcttcattttctctggggttgtgatgtgacatcacatgggcagaggcagcactgggtctcaccctgcactgtgtgcacaagggtccagttggaacaaggtcaggaggcagggcatctcactggcctgtccacatggccagctcggaacacactgtttcctgtctcctgagacagaaatttgtatgagaagcaaagattacaaagattacagataaatgaaatttaaatattcagttataaaacaaataactgaaggggttttttttttttttgaggaatttttccagcttaacagaattaaaatgaactatgatgaaacatggcaaaaactacaaggaggccaggcgcagtggctcacacctgtaatcccagcactttggcaggccgaggcaggtgcatcacttgagctcaggagttcgagatcagcctggccaaaatagtgaaaccccatctctactaaaaattagccaggcattgtggtatgcacctgtaatcccagctactagggaggctgaggcaggagaatcactggaaccccagaggcggaggttgcagtgaactgagatcgcaccactgcactccagcctgggatggagtgaattccacacccagagtaagactctgtgtcaaaaaaaaaaaggaagtggaaatatggttgagaataaagggatttctgttggaatttcatccctaggggtttgaaaaccattttactattcagaagcacagaaatggcccaaaccaggccctgaaaggagcccaggaaacaaaaagggtgaaaagaaaaagaaaaaagtccatcttaggcttaggggctaaggtcacacaggacagacctccccgtccgacaccagcccctggctagactatcactgtgccatacgggagggattgtgtggtcagtagtttttgttttgttttgtttgtttttgtttttgtttttgtttgagacagagtatccctctgtcacccaggctggaatgcagtggtgcgatctcggctcactgcaacctctgccttccagggtcaagtgattctcctacctcaacctcctgaatagctgggactacaggctcccaccaccacgcctggctaatttttgtatttttagtacagacggggtttcaccatgttggccaggctggtcttgaactcctgacctgacgtggtccacctgcctcggcctcccagagtgctgggattacaggcgtgagccactgcgcctggcccagtggttgtttttttaatctgctttcctcctgtttctcagagtcacttcccaagagaaagcactattaaaagtatggtgtagctcccactagatgtttctccatttacgagacatggtcagattactttccccctaggctgtggcctcctccagcctctcttttggtttatctgtgtctcatgaacatccaaactgcctggagctccacaggcttccctgggggaccagtgggacccacctcccctggtctttcctggtccgtgtcttctgcaaagggccaaggagtaactgttttaagctttgcagccatgtagtctgctcagtcactaagttcagcacaaaagcagccacagactgtatatacctaagtgagggtggctgtgtgccaatcaaactttattacagacactgaagtctgaagtttgcatttaatgtaattttcacatgtcacgaaatctttggagttcttttcaaccatgtttagcttgaggttccatacaagaacagaagggcgtgggatctggcttctggcctgtcatttgctgtctcctgccctggctctcttcctgtccatacaggcccattattcatgcttgcatttgctgtttgtttattaaaattccccagctcttcgttttaaaaatgccattgggatatatttccagtagagtgggtctctttcaactctgggtttccctggttcttcccaagtctgtacaaacaagaaaagttgggtca

SEQ ID NO: 42230 - DNA, 2300 bp, Homo sapien
ttatactgatggggaatgctctcgtagggcttgaggtcaaggtccagcacagacacggaaaaggcaaacctggacctcgatgaagggacgacaggcctttgatcagagctgcaagtaaaaagtaccatttcaggatacacaagccccccattcatttccctccctcccgttctctctccctttcttctttcaactagtatgtttttatgttttttctttgacttctgcaaagttagataaatcaatctcttttaaaagagaagtgaatggcctcacaccccagctcacaaagagcactcgttctgtgcacctgtgatctgtgcgtgtgacagctgtctgtgccggctgtgtgcaccagcgtgcaaagcttcctcaggccagtgcaccccaccataccaggcgagagagggttaaaggactgaaagatggaaaagtaattatgtggaacatgtgagcgatgttcccccagcccagtggtataaacgaacgctgaaaaatcactttatcatgagccaagtattacaaaacccaacaaaaagtaaaaagtagatctggccattccagcgccaaatggatggaatgtcgacaagccttcttctttgcctctcctgtctgctgagaaacgcaagctcctttggttcacatttgaagagatctggtttctcattttattctcaaattttatcttcagtcctttgtattttgcttctcagggcttagttttgtggttttaacctcagaagtcgtgtgcttataacaagatgtgattaattatttgccctgaaaaacacatttaggattactccgagtcctgagctctgactgctgtgtgtcccgcttttcgtctccgggcactcagcgcacagcactcaagacactggctaaacaagtgacctaagctcagttcagtccaagagaagtatcctgggttctggtgtcccaatgtttactacgctttgagatttagaaatcaacaagccaaaccccaacttcaaaagctcctgccgaggagaggaaatactgatcagcacgtccctgctctgacgctgctcaccatggccttggcgctcactgctgccctgccccagaatcctgtttgtagaaaaaacaaatccctgactaagctgctggggtaagtaactattctcatctgaagagtaaacagcaaataactcatttacaaattaaggtcatgagtctcgctccagaagctggagtgtgcctgcagctcatcccaaggggccacattttattgggagaacctcagaagcccaaggtactgctcagttctgaggcctgagacccaagctgggtgcacctgggctggaacagtcacatccccagcccatgactagggttacgtattttaaaggacaccccaatttctcagaagcagcacctgacaagaccatgggtgtaaagacaggaaggatgttccaggcagctcccggggagggtctgactacctgggtcaaccacaagctagctccatgggaaccaatggcagtgaccagcgggcaccagctcctgacacagaaatgctcttcttccccctcagtaccccggaggccaagactgggcaagaggccccagggacacacctgtcccttgtgccacaagtgtgccctctagcagccttggagaatgaggctcaggtggccttctggctgcaggggggcagcccttgcctggaaggccgttctccaggacactgacccgctgggggttaccgggggaccagcagcctccaagggtgctggggatcggggtggagaagccaaggccgcacactgtgtttcaaatgggaggtcgagaggagcatcagggtttaggccgggaagctgtggcagctctctccacagttccaaattcccaaagggacaaagctctgcagcgacaggaaggcagatccaacttgagacattttcctttatgacagggcagaaacagtagtgcagagctggagaagcctttattttagggggtgtaagaagtttaaatgtggtcaatctatctgtgagctgcaaattagtctagggatctaaatttagtctcaggtctaccaggtatctcaagacgccaagatgactcatgataaatcccagccttagtttgtccctaggcctctagagcaccacagttactggaacttcacaggtgcggccactgcgcacaccttcctggaagcaggcccagccccacacgccatgttctcggaggagaagccttctctgagatcctctccttttgttgagaaaggcctggctagagtgctttgtgcaggatggttccagtgccta

SEQ ID NO: 42231 - DNA, 2300 bp, Homo sapien
cttgtattaatcctaacgattatagtttcttttggattttctttatatgtaatcgtagtctgtgaatttgatgttttccctttccttcccaatccttatacctttcacttctttattttacttcactttatgtagttaatttgtgatagtatgaattttagtcctgttccaaatctcaaaagcattttaccatcaagtaaattgtttaatgtaggtttttttttccttaagtggctgacatcagattaaagaagtttgttcccttcttttcctgatttattaagaggattttttaaaatcaggagcagatgttgaactttatcaatgccttttctatttctattgagatgatcatatgaccaaaatattttctgttaacgtggttaattatgcaatttgttgtgatgtgttctttttctgtatgatgataattgggtttgctaatattttgtttagggattttggcagatgtttatgagtgataagaactgtgctttctctttttgtaatgtctgtgttcagccttggtgtcgaggcctagacctgcccgtaaaacacttaaaagatggtctgtttactctttctctgttgcctggaagaggtggattaacaacggctgggttcagtggctcacacctgtaatcccaacactttgggaggccaaggtgggaggatcacttgagctcaggagttcaagaccagcctgggcaacatagcgagacctcgtctctaataaaagtaattaaaaatcagccgagtatggtggtgcatacctgtagtcttacctgcctgagagactgagatggaaggattacttgagccctgcaggtcgaggctgtaagtgagctgtgatggtaccactgtgctccagcctgggcaacagaacgagaccctgtctcaaaaaaaaaaaaaaaaaaaaaaaaggaatggtattatttctgacttaaatgctttgtagaatcagctgtgaaatcagctaggccccatagttgtctttgtaggaaagtttcaaattttagtaagttgtatttttctagaaattttttgttttatctatgttttcagaattttggcatatgatgttgttgggtaatgttcttttattatcttttcatgtttataggatttgaagtatgctcttttattccagatgtctgatatttgatttctctccctctctgctactgtctgaatgttttaccctcccacccccccaaatttatatgttgaaatcccaactcccaaggtgatggtgttaggaggtggggcctctgggaggtgattaggtcatgagggtagagccctcatgatttgaattcaggcccttatacaagaaaccccagagcgcaagccagcccctttcaccatgtgaagtgacagtgaaaagagggctgtggataaggaagtcggctctcgccagatagcagatctgctggcgccctggtcttggacatcccagcctctagaactgtgagaaacaagtttctgttgtttataagctaccagttttgggcatttcgtgatagcagcctgaaggggctaggacactcccttaatcattcccaccaagagtttagtttcctaagaatcaacttttgatccatttgtactctagctaactgaatagagtgtaaggataggagctgctcatttccatctgctgtgaaaggttttctcaggccccaagaatagtgtgtgggcctgagctaaatccgtgctttgaggttctccccactccctcccatccagtcctgccctttggaaagtgcagcttggatgttttcgaacgccagatcctccaggttatatgcaattgaggggagtggttaaaagggagacaggagatgatggtctgtcatcagtacaaatattgaggccagtgatgtgtgaggcccaattccttttcttttacaactgtttatttttgtgaaagcgagagctatgccatctaaaacaatgcaaaccatatatgaaagtccaaagaaggaagaggagagagtgcctcacattctgctctgtagaggagacagttgtgagcattgtggtgcctgtccttcacctttctccctgcccgcgtcacacacatgtgcacatgtacagctttacgtatgtcgactctgacagtgtggtgtgtgttgagctgtccctggtcagtatggacagacccacatagcttggagcatgtgttgaagagtgtaaatgtcagagccagcgtaccgggtttgagtccctgccttgccattgacaagcagggcatgacagacaagtgatgtctgtgtctgttgcttgtctgtaaagtg

SEQ ID NO: 42232 - DNA, 2300 bp, Homo sapien
cttaggaggctgagggaggagaatcgcttgaacccaggaggcagaggttgttgcagtgagccaaggtcgtgccactgtactccatcctgggtgacagagtgagactctgtctcaaaaaaaaaacaaaaaaatggtgctgggacaactgtatatctacatgcaaaagaatattgttggagctgggtgttacggtgcacacctatagtcccagctacaggggaggttgaggcaggattactcgagcccaggagtttgaagctgcagtgagctacgaacacaccactgcacttcagcctgtgtgacagagcaagacccgaccctgtctctgaaaaaaaagaatgatgtcggacctctacctgaaatcacatacaaaattaactcagaatggatcaaacacctaactataagagctaaaactataaaactattaaaagggaacatgggaaatcttcatgaccttagatttatttagcaatgaattcttagatatgacaccaaaagtatgaacaacctaagaaaaactaaactgtacttcaacaaaattaaaaatgtttgtgcatctaagatattaccaagaaagtaaaaaggcaaccaacagaataggagaaaatatttgccaatcatgtatctgataagggtctagtagccagaatatacaaagaattctcaagataaatgacactattaaaaagtaggcaaagggggctgggcacggtggctcacacctgtaatcccagcattttgggaggccgaggtgggtggatcacttgagctcaggagttcaagaccagcctgggcaacatggtgaaaccttgtcgctaacaaaatacaaaaaattagccagggatggtggtgtgcacttatagttagtcccagctactcaggaggctgagattgcactactgcacttcagcctgggtgacagagagagattctatctcaaaaaaaaaaaaaaaaaagtaggcaaaggatctgaatagacatttctctgaaaaagatatataagtgggcaacaagcacatgaaaagatgctcttagtcttcagggaaatacaaatcaaaactacaagataccactgcacactctcgacgacggctaaaatcaaaaggacaagtaataacaagtgttgctgaagatgggaaaaaaataaagacaacttcatacactgctggtgggaagatcgaaccgtacagcaattttggaaaagtctgcccaggtcctcaaaaatttaaacataaaagtgccactggacctagcaattccactcctaggcatattaccccagaaaagtgaaaacgcacatccatgcaaaaaaaccctgtacccaaatattgataacagcattgagcataatagccaaaaagaggaaacaacccaaatgtccatcaatggatgaatggatatgtccaccccatggactattactgagccatgtaaaggaatgaagtactgatgcatgctacaacatggatgaaccttgaagacatcaggctaagtgaaagaagccagccacaaacgaccacacattcaatgactctgtttatatgcaatatttggaagagacaagtctacagcgatagaaagtagacaggtagttgcctaaggctgggggtcatggggagacaatgggacgatagctaaagggtacagggtttttactgaagtgatgaaaatctaaaatcaactgtgctgatgattgcacgtatctttcaatacagtcaaaaccgctgcactgaacactttcagtgggtaaactgtatggtatataaattacacctcaataaagttgttacagaaaagaaggaaaatggagaaatagctaagctacaagaatgttaggcagtgatatggaaaaacacatggataaatctaaacatctgtgtaaaataatactctaaattatgactaaaaaaaaaaataccaagacaaacagaacaatactgcacataagtttggagagacaactggaattaagtgtcccaagtccttatattgtgtgtggactgggagtatgaaataactgattagactttaaatatgcaggatcaaattggacaagacaccacaaaagggagagaaacaggagtaacttccaaacacatagagcaaaaaatgacataaaaaaaactaataagtaaaagtacacagaggtcaaaaaactatgggctgggggccaaatgcagcccaccacctcctgtttttgttttcctggaactcagccccactcatgttttctccatggctccttttgagctacagtggccaggccgggtacctgcaacagggaccagacattacaa

SEQ ID NO: 42233 - DNA, 2300 bp, Homo sapien
ccggagccccgtggctgactggagcgagcttgcacaccacctgaagccgttcttcttcccttccaacggcctggccagtgggccccactgcacaagggctgtgatcagggagctggtgcacgtgatcacacgggtgctgctgagtggctcggacaagggccgggcaggcaccctgagtccggggctcgggcctcagggcccgcgagtctgcgaagccagccctttcagtaggagccttcgctgccaaggtagggcccagccttccccaggtaggcggtgggggccgcaggggccttgggactctgcagtccccatgggtggccaggcggtcagcacagcctcctgggggctctgggggatgccacctggttacgccagggctcccagcacggggcctcgctgcctctcacccccagatgcagactccctttcttgccttttatctgcatctgtaaattgcaggacacatttgggctgtaggattttcccccagaatatcatccatatgttgtggtcctctctggtttgttgaatgttttcaaccatgttatatatcctgttggatcctcattgcaacccgggggacaggttttccttggcttgttccttagacagagagaattgaggcacagaaatcctgcagggctgggtcctaccacaatgggatgtcttcacaagtctggggtgaagacacagacccatggggcctttggactgcgggacgccttccttgcagacaggagccgggcctggccgctgccacatgtcctgacatctcatgagctgacgctgcccgtgattcttggcagcccatagagaccccatggtctctgggagcctgagatggtttgaagacagcagtcctgcttgtgtgcaaccagaaaccaacccataccctaagccctgccttattatctgtgccaattttttcttttgttttttcaagacaggatcttactctcttacccaggccagagtgcagttgtgtgatctcgactcactgcaacctccacctcctaggttcaggtgattttcctgcctcagcctcctgagtacaggtgcgcaccgttacacctaatttttgtattttagtaaagacagggtttcgccatattggccaggctggtctcaaactcctgacctcaagtgatccgcctgccttggactctcaaagtgctaggattacaggcatgagccaccatgttttctcactacaaatgaactttgtgggggttttttttttcttgttatgaaagtgattcctgatcatttcagaaaattttgttaaaattatgcctataatctgggcacataattgcttttaaggaagccaactgtgtctgcaacgacagatggcaccagttgctgaggtggtctgggggcaccaacaggaggcgccacagcaccccggggctcctgcagacctttttggacatggacacagacaggagggagtggagctgggccctggctgctgggatgtgcagtttaaaacaataagatcatactctacatgtcattttgtaacttgactttctttacttaactagcataaatctgtatctatatcatcacatatatgttttttttttaaattaattatttttaaagacaaggtctgtttctgttgcccaggctggagtgcagtggtgtgaacttggctcactgcaacctccacctccagggctcaagtgatcttcctgcctcagcctcctgagtagctgggactaccgacacgcactaccacgcctagttaatttttgtattttttttttgtagagatggggtttctccatgttgtccgggctggtcttgaactcctgggctcaagcaatctgccagcattggcctcccagaaagttaggattgcaggcgtaagccacggcgcctggagatcacatgcattttgttctttattgaccatgcatggatctgctgtaattttaacaaatcccctctagttgggcatgtgaacttttactcctgtttccctgcatgttggcattttcgtgccgggtcctagtgaaatctgcagctgactacagttttccccctgcatggacacctttcttactgtgtctttgcctgtagtttggttctttgtgggagatggttgctcccttcagtggcaggagatgatctgggacttggtacctcccaagctcacttggcaccctgtacagcacaggtgccaaacaactgtgagtggcaagtggagttttgtttctgcctctgtccctatgatataacaggtccttgtcagtggctttgacccctgtctgtggctctgtgtggctggt

SEQ ID NO: 42234 - DNA, 2300 bp, Homo sapien
aggtaagatgggtgggtttgcacccagacttacaacaattatttaagaaaactctgatttttttttccgatgtagaaacattgatgctagttgtagcattcaaagatgatacaagcattcagtgcagaaagtggtgtgtccatcattcctgatataaaactgactgggtccagcacgttaacccatgtgtcactgtggtagtctatgtggcgctcagccaggagctgccctggcctggcctgtaggtcctgctcagagggccctgcttgtggcgaggaccccaggatcaggcaagctttgcgttgccgagttccatagcacctgctgcctcagtttccccatctgtggaattgtgtctatgaaaatagagtctccagtgtggtggtagacagtctgtgttaaacattgtggtgggagggggtcgttaggtttctcttctctgagtcatccaagcaaaatgccatggaccacccgtgaaaaagcattgccctctcttttttgaccactgagttgcagctttctgtgcaaatctctgttggtcctggggtgcataccgagtcgcggaggcttcctgcattcagggcccttctctgctccccatctgatgcgtgggtcctgtgaggggacacatgcagctgagctgggggtgagctcctggatggtggctgttccactgtgggagcaggcggaggctggcttgggcaatggtatggggttggtgagtcactgccccttgagggctcctgggacatggcaggttggagcatctgaggtagaggtcatagaaagggaggccggggggtggtggtgggtggaggtgacagctgccgcgtgggcacagtagaaagaggggagagagccatgggagaaagctgccgttggtggggccacagtgggtgtggggtcgaggcaggcaggcggaggataggaaggccccactgtcttgcggtttctgcctcagctgctgaagagaaataggcctaggtggttttggtttgtggaacgcatcccatggaaacaaagtccatgcctccagccttctctgtccccttctttgctgcattcagtgactgcagagcccaaaccaccctaaccttgactcccccaaggcctggcatctgtggcccctgtcagatcttcctgtgtggagtggccggggcagtgtctgccaggcagcagttggctacatttcctctgtaaatgacataatgtggcacactgtgtgatcagtggagacttgagtggtaacttttctgttgaccaggggggctttatttttttttttttgagacagagtctcgccctgtcatccaggctggagtgcagtggcacggtctcggctcactgcaacctctgcctcctaggttcaagtgattctcccgcctcagtctcctgagtagctgggattacaggtgcccgccaccatgcctggctaatttttgtattttattagaaacggggtttcagcatgttgaccaggctggtcttgaactcctgacctcaggtgatctgcctggttcagcctcccaaagtgctgggattacaggcatgagccactgctcctggccagggttttttttgtcagaagctgtgaccacagctgtactgggccattgagggacatgggggtgatttctgtctcaaccagtttcatcaccttactgactctttaagaacctctgactggggaaagaatattctacatttagaggctaaagagtaaaatctctttagagattgagatgtgagatgtcggaggttttcaaagtcacattccttggaaggcatgtgtaggggccgctttgggagaagggcagacgggaggcggcagcagtgcggtcctcagactgctaccttcccaagtctctgggccgaggagggtggcatggctggggagggacgctggtgaggaagggcactggggaccttcccctgggtctgagggctgtcacccgggttctgtctgtggctgggatgtcccccttgcttgtggtggggtccgtggtggtttttgcctctcccctcaagcaaggctctgttgggaggtcccatcacgaaggctgtcctgtggttgtctcttacagacctcggaagagatatttcaacacctgcagaacatagtggactttgggaaaaatgtcatgaaggagtttttgggggagaactatgttcattatggggtaagtgctttttattcacatctgaattcttgggcatgttttgcatcaacactgccaatttcccggtgatctttggaactttgtgcttaatgataacccgcgtccagctagtctccaagt

SEQ ID NO: 42235 - DNA, 2300 bp, Homo sapien
actctcctttttgcagggtgctgaggaactcaactgcagtcatgtttaagcttccctggccttgtgggggcgtgggaaggactgaattttgtgagccctaaggtcctctctctctgttgggagctacttacctccaggagtggctgtttctgcccccatttctcaaccatccctgtggagggtcctgagccacctcccacccagcttccccaccaccccccccccaccgcctccttttttctctttcagacggagtcttgctctgttgcccaggctggaatgcagtggcacgatctgggctcactgcaacctctacctcccgggttcaagtaattctcctgcctcagcctcccgagtagctgggattgcaggcgtgcaccacacacccagctaatttttgtatttttagtagagatggggtttcaccatattggccaggctggtctcaaactcctgacctcatgatccaccgccttggcctcccaaagtgctgggattacaggcgtgagccaccacacccagcctcccccactttttttttttgagacagaatcttgctttgtcacccaggctagagtgcagtggcttgatcacggctcactgcagcctcaacctcccgggcacaagcgatcctcccgcctcagcccctcagccctacaagtagctggggctacaggcacagataccacaccctgctaattttttgtagagacagggtttcaccatgttgccaggctggtttggaattcctaagctcaagcgatccgcccacctcggcctcccagaatgctgggattacaggcatgagtcaccatgccctgccccagcctcccttttgaggcctaaaatggaggaaagagatgctcaaagccttcagctcattttcctgagtcactggcctgatttcactacaattcccaaggcctggcaaggtgcccagccgttctcaaagttgggtctgcaggtcctctctttgtgaactacataactgcagatgttcttcacaatgtgtatgtcaaccaatgcaatatattgcagcagaccgaatgccgaagcacatgtgagaacctattaggtcagattttaaaaagatttgcaaaagtgtaaaacaataccactcctttattttggtggtgggcgtggaatgtaatgtttacttttttttttttttttttttttgagatggagtctcactctgtcgtccacgctggagtgcaatggcgcgatcttggcttaccgcaacctccgcctcctgggttcaaatgattctcttgcctcagcctccggagtagctgggattacaggcctgcgccaccatacctggctcatttttgtatttttagtagagacagggtttcaccatgttggccaggctggtctcaaactcctgacctcaggtgatacgcccgcctcagcctcccaaagtgctgggattacaggcgtgagctaccgcgcccggctgtttacttttaaacgaaacaacaaaaaactttaaagcattttaacttagaatgtggtaacatcgatagctgtaacccacattagcaaaagcttggggccctcatttttatgagtataaagtggtcctgagactacgagtttgggaaatgcggtagctctacgaggcggtgccattcttgccgccgcatcagtgaatttaggagaaggaaggtcgttagccctctgcctcaccgccaagcaggagccttgcgctccaactgcgtccctcgaagtcttcaggcaaaagcgggactggggagtccagtcctgtggcccagccacatttcctcgcgtagaacgttggacaatgttttctacctcacaggaccatccaaatgactgcgttaggtattcccatgaaatgtacgatgagtacaccctattctacagaagcaaaagctgaggctcagagacgccaagaggtttgctggggtctcgcgactaagcggtcccaacacccagacaccctggctacccggggactgccggtcactaccgggcgccgaaaagccgccggctccttccgccagctacacatccggcgccgaggccggaagcttctcttccggctcccaagaccgcgttccggaaatgagtcgctctaccagtacctaagatggccgccggcccatccaccgtcgcgatcggtgtgaggaaagtgtcacgaacccggaattgcccgactccgtcatggcaggcgccgggggcgtggcttccggcggccacagcttgctagtcgccgcggcggggtcgagcgggggcggcagctgacaggcgctcctcccccgaccgcagcggct

SEQ ID NO: 42236 - DNA, 2300 bp, Homo sapien
attccgggaagctcgtctgctgcaggactactcggaactggaggaggagaacatcagcctgcagaagcaagtgtctgtgctcagacagaaccaggtgagtcttgggcctgtggggtggaggtggcacgtgggttaactgggccttgaggacctcttgctcagcccctctccctgttgggaaggggttcctgtcttattccacacacccgaggcccagggccagctttaccactgtggaggcaggggtatacttggtgggacccagactctccaaaagatgaaactctggctgcagtgtttgctgacattggccaggctgaggtgtcccagccaacaaaaatgaaaacaaaaatctgagaggtaatgaagaggttacaccagaaaaccccagattggactttgagactcccccatcaggtgctgaccatgaggcctgcaatattcctgtgtctctgcctgtgacagggacaaggaaggtcctctctgtctgtgacggggatgaacaggaacccctctgtctctaatggggtctcagagggacccctgacagggacgagtagggtctctgcctgtgacagagatgaataaggagggtcccttctctttgtgatgtgactaaattgtcatgtgctctgctgttctgccactcaaggcctgaacttgctcttctctctgcaagagccacactcctgcatggtggggaatgggagtcttttctctcccaaaactttccccagaatgccatggatgtcttccttgctttcctcaaatcctctaccaccaaaatcctctgagtctcaccatcagggaatgtggtatttatgcccggaggaggaagctcatgtgtttatgcagagctcctagcctggtccttctgtgacagctcgagctcattaacagtcttagccactgtctacattgtaagtaccatttggtcattggtgctgctgttggcagagcccagcgcatggtggccttaggagaagggaaactgaggcttgaggcgaccctgtcctcaggttggcgcttagtggagtctgactctctctccctctctgggattcctcacctccgcatttgtggtgctgggactgagggctccatgcccacctcctgtgagcacaccttggatgtggtaatgggtgtcccttccgacccaagacccacagagatgtgctcagcacttcctgttactggtttgtttcttatttttttctccaaatattacagaaaaataagaaatagttttagcaattgcccacaaattctgagcctccacatcaggcatcagtttctatctgctttttccttgcccacctgcagatacaattttcatgtagacaagactttgatgttgcttttcccacctaccttcgagctcctccaggtctgggtgtcatgtgcatgtggaggtttagtggttgagatgttctgccttgcggggagtttctgttccttcattttgaactatgattagaagtcatgatcatagcacacattgaaatatatttttatgtatcttaagatatttagttaactgttaatgttaattaaataactttatagaatttttaatcagcatgcacttggtaatatttgtgaatgacttaatacaaggttggcagccttctatggatggatgtgtgttgttcttggtgcatctccacacgtacagtcctggcttggggccacctcagacatttgtgctccccttgctgtgtctgctggtcccagcggtgggtgggctgggctgagcatttcattgcattcgcatctcatgccctggaaccttcttagcatccacatctctgagcagaggaagcagtcttggcctggacgggctgccacccttcccaggatggcacctcacctggcgcttcatcttttgcttcatagtggccggagttggtgtgctggtgtgttttcttcatttatggggcctgaaaggagcttccacattgcattgatgcaagagcgttgacttctcttcccaggtggagtttgagggcctcaagcatgagatcaagcgtctggaggaggagaccgagtacctcaacagccagctggaggatgccatccgcctcaaggagatctcagagcggcagctggaggaggcgctggagaccctgaagacggagcgcgaacagaagaacagcctgcgcaaggagctgtcacactacatgagcatcaatgactccttctacaccagccacctgcatgtctcgctggatggcctcaagttcagtgacgatgctgccgagcccaacaacgatgccgaggccctggtcaatggctttgag

SEQ ID NO: 42237 - DNA, 2300 bp, Homo sapien
gcggtcgctcacgcctgtaatcttaacactttgggaggccgaggcaggcagatcacgaggtcaagagatcgagaccatcctggccaacatggtgaaacccactctctactaaaaaaaaaaaaaaaaaaaaaaaaattagctgggcatggtggcatgcgcctgtagtcccagctactcgggaggctgaggcagaatcacttgaacccgggaagcagaggttgcagtgagccgaaattgcatctctgccctccagcctggggacagagcgagactctgtctcaaaaaaaaaaaaaaaaaaaaaaaaaaaaaagcagacagtatggtaataattatttcaggcaagaagtagtcatgaatgccaaaaccagtgggtcaaggtttgaggagtcataggctatatctatggttgcaaagtcttcactcatgacactaattaccaaagaaaaacccagcatcaatcagagaaatgcaaatcgacatcacatacctcccggctggtgctctgaaaactcagcaacacctcagtgacagtcctgccagaaacgcatcacctcatcaccccatgagcatataccagtgtgcactgcactcctcagaaaggtcaatcaaaggagactcaggaaacctgacgactgaatgcaactggatcctggaccacaaaaacaatactgaaactctccagtatggtgttgggccctcgtgcaattagagtgtggactgtgcattagatagtgtcagtaccctgtgtgctgtgatttctgctgtcatggcttctttctaatttggtcttgagggagagtgaccataagccaagatagccactctctaggagaaccgaatgggtgtggggttcaggtgagatacaatgagaaagtaaaattaaaaggtacaaaacagaaggaatttattattcttaggttccggagaggttagggatgcctaagagaggcggacaagcagatggagaggggcagtgagagacggtgggaaggaagggactatggctgtgctagggtccatggaaatcatcctttaggatttcccttggggcctgtggactggctaaagaaaatacgagggaagggtgaactcatctgcactgatactggccattaggtgctatggcggtcagcggctgtggggtgtgttgcgctttaggtcaatgagataaagaataaacgagttatctcacacaccaccatatacggagaagtgttacctacgccaaggcgaagggtacgactggctttcaaacaacttaagtcaggcctaaaaatagatgcggagacaacaattatatttaccacgtttatgaccctgtattaatggaaatgtctttattcccaagaaatagaccttgaaggactgaggggcggtgctgaggttcccgctggcccctgggcgccccctgctggcccgtcctcctcccgcccccagacgtctgcacagagcatgcgtcacaccgtccacgggtttccagcagcagccgttcacccgcgctctcggatgcgcttctagctcgtggcctcccgggctctgtccgcgttgttcgtcccacggtcgggagcccagtcctgccgccccgcacccgcctccccctgggggttctcccggcagccgtcttgccaccccgcgtggccgccggctgccagaggcacaggggagcgcgaggcccggcgaccgagcagtgtccccggctctgagtgtggggaaggccgcggggccgcgcccactcgaccgccgtccaggggactgcaaggcgccggtacatccggctcgacgctggcggcgcaggccaatcacggacggggacgggtgggcgcggggctggacgggttttgtagtcggtgcgctagcgggactactgtccccacagccccctgggccacattggcgtcagtggctgcgcccgagggcccgcccctcacagagcatgggccaatcatagccgggggccgggcgggcgccgggcatgatggaccttgtggtcggagcgcaggcaggactccagcccccagcgggccccgcgcgccggaggggaggagccgtgcggcggcgcgggcgggcgggcggccgtcggggcagggcggcggcggcggcggcagcggcggcggctgaggagggcccggcctgcgagagcctcagtgggagccggctcagccctcggccaccatgtcggcgccgtcggaggaggaggagtacgcgcggctggtgatggaggcgcagccggagtggctgcgcgccgaggtgaagcggctgtcccacgagctggccgagaccacgcgtgagaagatccaggc

SEQ ID NO: 42238 - DNA, 2300 bp, Homo sapien
cccgtccgatgagctcggctgagcgtgcacgcagtgccgaaatcaaggacgcctggatgcttttcgttgcagagtgacaaaggttcaacaacaggaagaggatcaggggccaagacaagaagctgaagttcggcctgccaggaaccccgggccccagcatcccacccaaggcgctgctgcaggagttccagctgctgctgaaaggtgcggtgccgcagggccagagtgcgggatcctgagccctgcatgccagtccttgcgggggccgatcgctgtgagccttactcaggtccagccgcctccagggaggacaatgtagacgaggtgcggggcgtgagggcggtgctggccgcacccctggtcctgaggccacgggagccgcgcgaggaggccgccttccactgacgcctgcaccgggaccggttgctgcagcggtgccagctgcaggagctccgcgtctgctgcttctccgacgccagggcgccgccaggatgacaggtgcaggagactgtggctgtgggcagatgtggtttccagccccaggtccccgcggcccctggcttcccagcgcgctgtcctgtgagcaagaagatgaaaaaagccacccgatcaacaggtcagctgccccgcctggcagcccagccagacaaggcaaccgaagttcatcctctctgagttgacttcgtgcgggcagcgggccggcgcccaggatgctggggagccctgcgcgccggaggccgacaagccgtggggctcagaggcgcctcagggcgagaaggcacccgtctcccagcgctttcaccccctggcctgcccggcccgcgtggtgtcccagtggctgcggccacgccaggcattctgccccgcggcggctgcacagggacgagaactgagaacccctgctcaaccccatccggggtgactgccaaatgcctatgccagcggccccgatctccctccggtggaggagtggggggagacacggcctgggggcctcaggctgggcgcgctggcgatcccgaggccgaccaggtcatgcacctccagtccgcctgggcacccaagctgcagccgccttctgtgcgcagacagcagcctccaggcaatccccgagcccgcccgcactccccgcatctcaaaaccggggctagaggtccctgtagctgcggccaagccaggcggtctgccctgcggcggctgcacaggggcaggaaccggccctcagacccaaccccggtggctgcagagggccactggctagaggtccccagctccagcagaggaggagctgggcgggggcagggcctggcgggctctcaggccaggtgcactcgcgatctagaggcagcccaggccattctccaccacctgggcgcccaagctgcaggcgccctctacctgctggcaacagctgcctggccactcccaagctggctggcgctcccaagcctcgcagaaccggggctagatgtcgccgtggctgcggccaagcccggcggtctgcccggcggcggctgcaccgtggctggaaccgaccccccagtcccatcccccatggctacggagggcccctgtcagcggccccgatctctctttggaggaggagcggggcgggagtcacggccaggagggccctcaggccggaagggatgcacgtctgcgattccgagacgtcccgcgcgagcccaggagaacccgcaagccagcagcgcctgcgcccgagctgcagcagccccctgcaggccacgcgggctcgggagcggtttccggagtccgagctggcgctgagctgcaggcgcgagcctaaaggcttagccggggcccacgctgtctgagagatcggagcgttcagctacaggcacgcgcttaacggcttcgtggagctcactcggtctgagaggtcggaggctgcgagtgtcgctgctgaaggctgtggtggaccaggctggatcgcggattctgagctacatcgcgggtttggtggtggatcttggatttgggggtggatcgcgggtttgggggtggatcttggatttgggggtggatcgcgggttgtgggggggatggcggatttggggctgggtgggggtggaaaggccacgaggagccgcggcggctcaggagcgggtggtgggcgtctgaaaagtcgccaccatgaggaagctcttcagcttcgggagacgcctgggccaggcgctcctggactccatggaccaagagtacgctggtcgggggtaccacatccgggactgggaactgcggaagatccacagggctgccatcaagggcgacgccgcgga

SEQ ID NO: 42239 - DNA, 2300 bp, Homo sapien
tcactttttttatcattattattgagggttgttatctcgtttgaacttttagcttcttcagaagtaaaaagggaatctttttacctgtgcttgcagattttattatgtacatattatgtatatatgtttttcttatgtatagattcattacatatatgcaatgatagattaatcatttcattatagttgtagtcttataaaaataacaaatagcaaatagtattactatcacaaaaatactggtttataaaagttgtatttaaaaatattgagctccccaactgtattctatcaatccatttattcatcaaacataacctgaatacctgttatgtagcaaacattttacctgttatgtagcaaacattttgcactatctctcaggacccttccatacttaaaaactttgtttacctgttctgcctgagcaagatgagagatttaaaatgggaatagtaggacttaatctccttgaagcttttcctcccacctttcaagcaaaagcatttctgaaggtagaaaacagtaagagataacctttaactgcccttttgaaaatctgtcagtcttaaatactaatatgaataattggaaagtctgatttgcatatattctgtaaatctaagtgttgactaaaatgagccatacctgttcatctcaatcattagtttcctttagcttcatatttttaaaaatcaaagaagtaatttgtttaaaaaatatgttgttatttcagtgctctttccccatggtacttttaggaattaaaatgtatttaagtgtcaattagatgcctagaactgccctagacctgctgtctataccgtatttgcttaatgtaaggcctcatggattgtgtgataccctactgttttctatattaataagatgattttttaaacgctaccaattgtagttataaaaaattatgaattataaatgccattccaatatcagatatactaaaatgtgacctaatctttaaatcatcctgcaaaatggcaataattgtatcattttacttaattaaaatgtttttgttaagtagtagtaatagtaataattgtaacatctggctgggtgtgtggctcacgcctgtcattccagaactttggaaagctgaggtgggaagttcccatgatgctaggagtttgaaaccagcctgggcaacaaagtgacattcctactctacaaaaatttttttaaaattagctgatcatgctggtgcactcctgtggtcccagctactcaggaggctggggcaggaggattgcttgagcctatgagttccaggctgcaatgaagtataaacaccattgcactccagcctgggcaacagagcaagaccctgtcccaacaaacaaaaatttaacagttattgagctgttgcttgttctggagatggttctaaatgatttacatagattttcatttaagcatcacagtggtgtcccgtgagctagctgttgttgtcatctttattttattaatgaggaaactgaggcacagaaaggctaagcaatagctggtacctgaccgagttcaaagtagaactcaaaccctagttgaactgaatgtaaacaccaagctcattctgtccaaataggctgctgtttcattaaggtagggggcaataagagctaataaatattgtactttcttcaaaagaaaattatttgttttgaaggcagaggaataacttgctattcactgtttacaattacatgaaccattgtaggttttgagatactgcactaccatttcctgacaactcctctcgccctcctaggactgttctacatttgacctgtgcccatggccgtgtggaagtggtcaccctcttgctgagcagaagatgccagatcaacatatatgatagactaaacaggacacctttaatgaaggtatatagtagccaactttttcagcatgaaatggatttgatttaaatacatagaattaaaatgaatttatctcatttaaatataactagttggtgaaacctgtggaatatgtattttgaattcttagaatttatagtctagttttttcatctgacactaataggctgtacactgccaggaagaggcttgtgccattattctcctggaacatggcgccaatccaaacattaaggatatctacagcaacactgctctccattatgctgtgtataataaggggacttcactggcagaaaaactgctttcccaccatgcaaatattgaagcactaaacgaggtacagatcaatcaactttcttttcaaaatacttgttttaacattgacataggtaagag

SEQ ID NO: 42240 - DNA, 2300 bp, Homo sapien
aatgatagctctataaatgatatttataagttatggttatttttttttttagtttttcattaattttgatcaattgtatcttactaggagatcacccatttactgtaggtagtattctcttcctactatatttcatatctacctactacatttcatatcattcctactacatttcatatctacctacatttacatgtaggtagatatgaaatgattcaatatccatgtctccttttactcattacaaatcttacataattttgctctctcttatctctttaccttactcgggtttatgtgaggtatttagtttactaaggttttaaaatattttcatattcattttagtaggaaaaggacggattattttataaatttcattgcctgaataagtttaggtatggtttcgggtacaataagaaagagataaaatggaatgctttatgccaaacatgtttatttttatcacacagctaaagtctgtagttaagttgctgctacttttgagtcaataacatcaagaccagtgttggtgaatcttttggcctttccccaatgcttgaaagaagatcaccactgctggaggcataatgtacaaggcaggaaaagggatggaattgatggtgacagctaagtctgtcttttttcttaggaaataaaggttttcctaggatacatttaagtgttttgcttctcttgggctgaggcaggtcatttggccactaccagtttcagaagatgatgatgttacagcactattcacaatagcaaagacatggaatcaacctaaatgctcatcaatagtagactgcataaagaaaatgtggtacatatacatcatggaatactatgcagccattaaaaagaatgagatcatgtcctttgcagggatatggatggagctgaaggccattatccttagcaaactaacgcaggaacagaaaaccaaacatcacatattctcacttataaccaaacaccacatgttctcacttataaatggaagctaagtgatgagaacacatggacacatacagagaaacaacacacacaggggcctactggagggtgaagagtgggaagaaggagaggatcaggaaaaataactaatgggttctgggtgatgaaataatatgtacaacaagcccccatgatatgggtttacctgtgtaacaaacctgcacaggtactactgaacttaaaataaaagttaaatttaaaaaaagataaagtaagccgggcacggtggctcatgcctgtaatcccagcactttgggaggccaagacgggtggatcacaaggtcaagagatcaagaccatcctggccaacatggtgaaaccccgtctctactaaaaatacaaaaaattagccgggcgtggtggagggtgcctgtagtcccagctactcaggaggctgaggcaggagaatcacttgaacccgggaggcagaggttgcagtgtgccgagattgcgccactgcactccagcctggcgacagagtgagactccgtctcaaaaaaaaaaaaaaaagataaagcagtgagagaggagtttggggattgcacgctggttcagcaaagcaacattttcccaaaagatacacaaactatacagaagaccactttaaaatattatatgtgaagtttaagttttaagattaaaaattcagaaactgtaaaagaatacacatttaaacatgtagaaaataaaattatgtgaatgggataatatcacatgcaaagtcgagacaaggaatggatgttttttaaaaaaggagttactccctttaacataaacagctgttttaaattaataagataaacaatccaaaaagagaaatgtataaataaatgctttataaaggcaatttgcagaatagcaaattcaaatggccaagacacatttggagtcatatttatatacaaattataattagttatcacttggaacttgtaaaatttctcaaggttagagtaacagcagctgggcacggtggctcacgcctgtaatcccagcactttgggaggccgaggcaggtgaatcatttgaggtcaggagtttgagaccatcctggccaacgtaatgaatccctgtctctactaaaaatacaaaaattagctgggcatggtggcaggcgcctgtaatcccagccacttgggaagctgaggcacgagaatcgcttgaacccaggagggagaggatgcagtgagccaaaattgtgcctctgcactccagtctgggcgatagagcaagactcagtctcagaaaaaaaaaaaaaaaaaagagtaacagctacttgt

SEQ ID NO: 42241 - DNA, 2300 bp, Homo sapien
gtggaggggtggtagtgtacggaaaattactaataggagggaatctggctaaactgacctcacagaattcttgctgaagccatgccagagtgatcagatatcacctggggatagtagacaataagaaaaccaattagatatcaatggtgatcagatacgaagatggaggattctgactaaattgccttgctaggattcttactaatattgggcaattcacagacaacacaaaagcccaaaagccagggtttagttgacaagagagttcaaaggagcatggctagagtctggttatggagagaatttttgtcagctgactgggtcttccagaactgtgtagaataaaaatgatgagcacagacatattttccttcttcccaaactgaacaggaaagcattcagtctttttcatcttttagtttgacattagctgtagatttttttctaacttaaaagttagaaagtttacctctgttcctaattcctgaaagtttttttttcattataaatgggtgttgaattttctcaaattcttttcctgcattgatataatcatgtaatatgcttatctttagcttgctaatgtggggggttacacaaattgatttttgaataccaaaacagctttttattcctggaataaatatcacttgttcatggtttgtagttatttttatatattgttgaattatttttgctattatttggttgagaatttttccatctatattcatgaagaatactgatttcttcttcttctgtctttagctctgatatcagagtaacactggcctcatgagttggaatatctttctattgtcttctttctattctttttttattctggaagagactggatataattcgtgttaacctttaaatgtttgttagaattctctgatctagctatccaggccttaagatttctttttcagatatttcaaattatgacttcagttctagggctattcaacataactatttcatgtaagagagaatttgtgctttttcaagaattagtgcatttcatctatgttgtgaaatttatgtttgtagagttgtttgtagtattctctttattcttttgatttcgtcatggtctacagtggtatctcctgtttcattctggatattgatattttgtgtctcctctacagatttgtcaattttattaacatttacagaaccagcttttgtttaatcggtttttctctatttttctttttacattttattgagtcatcttcttatccttattatttcctttctttcacttgccttcggtttattttgctcttctttttctagtatgtgagggagcttggttattgctttgaaatttttttcttttctaatgtaagcccttagtggtatatacatttttctctcaccactgatttagccacatcccacaaattttgatatgttgtgtttcactgtcattcatttcaatgtattttaaaaattcattcactttcactttcattcatttcaatgtattttaaaaatttgagactttctctctgaacaatggattatttagcatgtgttttcacgtgtttggagattttccttttatcttcctgttattgatttctagtttaattctattgtgttcagagaacaaactgtatgatttcagttgtttcaaatttgctgagatttgttttatgacccaggttacttcatatcttgctaaatgtcccatcgacacgaataaaatgtgtattcggctgcgtttgcggtgttacataaatgctgattagttcctgttgattaacagtgttgttgtgtccacagaagcattggagaaagactgtaacctgaggtgataggctttgattgtgtcctggcttagtatgatgggacacacctctgcttgcttcctttcctttggacaaccctcagcctctcagtctctacatgacctcaacatggccgcccacaggccagagtgtctacatgggcgccgccatactggcgcccagcctaagccgctgaaacgggagcgtgtttggcaaagcgccatgttgattactggcaaccttcaggccatgaagactgctgagcatgcgcaaacccaggcagcgctgtaagaagtacctctaggcctgggaggcattgagaaaaaggaagtgggtcctgttctggttcttgcgactatagtcacctcccgaggcaaatgaccactgtcctgagaggacgtgggtgaggggcaggtgagtagagggatggcagcatctgtggactgagcaagaagaatctctgatgtctgtcctgagccttccggtcagtgatgg

SEQ ID NO: 42242 - DNA, 2300 bp, Homo sapien
acagactggggcttgaaactgctgttggtgctgatttaccttcgaggcatggcgcacatggcaaagtggtattttctcctccagtatctgtccaactgctgtcatgagccgctgagcttcagcactgctgctgtacatgcatgatcagttttttactggcttttggctctcagcagtgactggtgctggcttgctttttttctctgataaaaacctctgaaaaaattgcttgatgttttctccaaagtggcttattgaaggaggctgtttctttgatggcagtagctggatgccttcattctgatgggtgtgttctgtcttccgtcttcctgcccggggtaagttgaggagtcctcagtccttgaaacatttcttcatgtttttctaagttgggcttcctagggttctccctcttgtgagtagggggaaacattggcctttggctctggcatgaaccttgacagtttgggttcctgggctccttgtgcccctgccccgggttgctccttctggctgccatgaggtcacgtagctcctgggaagcccgcatgttcccagtaggcgtgctctggagatggctctggggcacttgagaagccaaattctctgaagcatggggcacaacagatgcttgcccatctggaaggaacacaacagcggcagaaacttgaggctgggtctctgacttcgtggccattccaggctcaaattcactaacaacctcctccctaagacacagctttcttggatcttgggagacagacattctagggaggagagagcttttgctggcccctggagcctcgaaaccacgcacatcctcacttgtggtttggatgtttgccaacatacaggttgccaaggggactctgggttgtggcactgcctccctggtctctcccgcccttgaagattgggctcctaagctcctgctctgctgggtgctgcctgtgaggctgtatgtgaggggcttagatggccacctgccctcctgtccagctgtaggagccttcaaggacccatgatcattccaagatgggatccttcgtggggccctctggaactgcttacatgcaggtgaggaggcctgaagcctctctggcatgtgaacagatgctttggtcagcacctgctttctcagacttgccattggtggctttctaaggaacgtggccacctcaacttttgagccagccccagattcacaggtggctgaggagggaccggcaagctgtgtattgcacaaggatgaaaccagtttaaagcactgaatgggcttgaggaccctgaggggtggaccccacctgtgtttggcccaaaacctcaaaatgtgggctcccagcacctgttgagtacatggctcaaggaaggaaagcacctgggctgtgttcacacaggctttcccacttttggggggtgctagattgctggttttcatgtgggtgttggacacgggaagagcctggttgacagcaagccaggatcgatgcatactcacggggatcaagccctcgttggtctggcccaacctcttacccatgtgggctttcaggatgttttctatatgattcctgtccgtgagtcttaataaatccctaccgagtcactcctcaagggcttcctcaagttcctttctgactcttcagaggtcacccccagagtcttccctgggaagctttctatgcccctggatagattttgcggggcctcacccagaatttgccccagatgtgggcacaggtccctctctagctggaacttcaccttctgtgcctccttgctgctttcacctgtggacatggaggactgccaggacctgggtttgcccttcgcctgacttttccctggcaattcatcccaaagctgcatcagatccagagactcttgaatcttgccctggtgttgaatgaaccacttttcaatatgttgctctggagttcaggactgactggaaagttctcaggcagaatgggtgtcccctttcctggggaaggttaggagtggagacactaaagatgtcctgagatttttggaccctagggggtaaagccaacccaccttatagttgtttcctcaacaaaggccattcagggtgctgagtttcaggtagggagagagcttgcactttattctgcgacgcagggcaagctactccagtgttcttcatcggggatggaaaagcaggagataggactgggaaagaggattgaagatgggcctgagccataggtgtgggccggaattggggtgtggatgaaataaagggttgggactcaggccccagatgggacaggggctgg

SEQ ID NO: 42243 - DNA, 2300 bp, Homo sapien
gagtgtaaaaatgagccattgttcatggtgccttgagactatctgggcagagtagggtctgtggctcagggcttggtgagagagaggcccccatcggagaagggaaaaagcgctcgattgctgatttccacccatgtctacctcctgtcagggaccgcaagggcaaagagtagagaagcaccagcaaagaactggctgggacccaggaaggacagggtgggaagaatcccatggccataggagaacatttattaaaagcaaaaatgttgcaatatgtttcagggtgagaaaaacacacctaaaataacaggcctggtagagtctgattaaaaaataaaaagcacatgtaaatactggagtagtagaatggtaccagctggcatgaacagagcaatgagcgggagctgggctgtgtgtgcatttgtgtcccatggaattctctggcaatgctgaaggaggcccggctagatgtagatgtccactttacagctgagggtaacaaggcccctcgcttgaggtgtgggccgaggctcggacctcggttttggcacttagggacatccttttccttcaaaatgttttctcttcattgcttttttttttttttttttttttgaggcagagtctctctgtcacccaggctggatggagtgcggtggtacaatctcggctcactccaacctctgcctcctgggttcaagcgatttgaacatcatacacatactgctgagaccagctctgtccgggagaccctaacccagcggcactggaggaattaaagacacacacacagaaatatagagtgtggagtgggaaatcagggggtctcacagccttcagagctgaaagcctcgaacagagatttaccc[450 bp omitted]acatatacaacacaacacataccacaccacacaaaaaccacaaaacataccatacacacatcacatcccacatacaacacatacacacaacacacatacaccacaaagcgcattacacacaccatacatcagatacactatacacagcctaccacacatacacacaccacatatacatgccacacgctgcacacacaccgcacacacaagcatgcacagcacacacacacacacggcacacacacgcacatgcacgcacagcctctgcaccaacacctctttaagcaagtgcctattttccactccaccctctctaagcctggaggaaagtgcacacacctaaaaaggggtttccttgtggtgaaggagcaaagaaagttactgctgccccaggaccctctagaaagtctggcagaggtaatggctccgggcagaggtgtcaggaaaaataaacagcatttcccccttggcctaagggacccgctccgccctcagcccccagcccttgttgtcatggagagcggcctgtgcacccgagccggcgcccctagccctcccactggctctccgcaggcggctttgtcagggctcagcgtccctgcagctgccgggagaggaggagacagggcggctgcctgtgggtgccgcggaccttcggggcgggccagggaggcgggaccgctcctcagaaccccaggggcttcagtcctgggctgattggcgcgggaagcacagcccggccctccaggtccccaaggagaccccagcctcctgctgcccactgtgagcgacctccccggggctcctctggaagcggctccggcaagtatcgagtttgcctgtgcggagctgggggagcctccggctttcctgtttgctttgttaattattttcgtccccagaggaaggcggtgagtaggttacattggaaaaggtggcaattttcgcttgtttcaggtggctttgagatcctgtgtgggc

SEQ ID NO: 42244 - DNA, 2300 bp, Homo sapien
ctccccatcctctttttgttccttacctaccacaacccctcacctttcaggtcaccacagccagcctgctgctgtgctgccagaatttatcatgaccctcttaggacgacagttgtgtattcctagtgtacctgggtttgtgtccctggtcctaatgggaccccactgctggccttctggcacaggggacctctgtagaggagaaggctgaaccaggtggtggtggcaggcactgctgtccttcctggcctgggctggaagcatctggatggtccagggctgcctcctcagggggcaggagccaagactccagggccccggcattgacagcacagcaacggtgattcagatgttggtggctgggatcccttgagtacctaccataggcaaagccctcatttctcacaaaaactccaccacatgcatcccacattttctccatttcatggaggaagaatggagtcttcaagaagttcatcagtgtccgggcatggtggctcatgcctgtaatcccagcactttaggaggccgaggcagacagatcacctgaggtcaggagttgagaccagcctggctaacatggtgaaacccagtctctattaaaaatacaaaaaattagctgggcattgtggtgggcacctataatcccagctacttggaaggatgaggcaggagaatctttgaaaccagaaggtggaggttgaagtgagctgactttgcgccactgcactccagcctgggcaacagagtgaggctccgtctcaaaaaaaaaaaaaaaaagaaaagaaaagattaagttcagcaatatggctgaggccacagcacccatgcgtccgagctcaggtgacactgtccaccccatccttgtcacggctgggtgtagctctgcatcctcacacaggcagggaacttagggacaaactccacatcacctcagcctttagcttttgggagggaggggcacaccactgtgtcctgagcctcagtttccctgttgtcagacggggataaccatacttcacaggggcatgaaggggcccaatgagtaaccattcacagggcacctgcggcagcacctggcacagggaaactgaggcccagagaaattgcttttatttatttatttattattttatttttattgagacagtctctttctgtcccccaggctggagtgcagtggcgcaatctcagttcactgcaacctccacctctggggttcgagcggtcctcccacctcagcctccttagtagctgggattacaagcatgcgtcacaatgcccagctgatttttgtatttttagtagagacagggtttcaccaagttggccagactggtctcaaactcctgacctcaagtgatcctccctccttggcctcccaaagtgctgggatttcaggcatgagccaccatgcccaggtgagaaattgctttaaaaaaaatgaatataagcctggattaacaagcattattaaaattgagtcagactttgcactctaagcccttcaggacctggtgttattatttattgattctctccctaaaacaatgagggtgccctcctggtggggctgctcagcggggcaggtgctgggcctgctggagcagccctcgtgggtcaggtctcccaggaagcatcttgaaatatctgtttgcagggggcctcttcaccttctaacttgtggccatttcattgttcccaaccaagagggtctgaggaagcctctgatggtgtgtttctgggctcactctgggcttgtctggtctagggccggccccctcattccctgctgggcccctcctccctgaagatctacacagcagatctactcacaaaagtccacccagcagaagcaggaggatggtggttgtgggtcctctgtgagcagccctgttaacctttaaaccagcacggccgccgcagctgtgagcctagcacctgatcagtggagagctgtggattgcatgtttgtttgccattgcccccgccaccctgcaagttgcaccttctagaatcagcaagccaagctcctctcacccagcgtaatgatgcggaaatgcaaatgcaccatcatgttgtgacccatattgcgaaaattagaaaaaaggaagttgtgtttcgctattgcacgaagttcagcccagaggagaaactcgctcgccttcagaagacaggtgagtgggcttggtcctgaggtgttggccgagccctgagatcctaactgcttttgtggaactttggggtggtaggaacattcagggcaggagccatttgagggagacggatgttttcaaggc

SEQ ID NO: 42245 - DNA, 2300 bp, Homo sapien
gcggaggttgcagtgaacctagattgtggccactgaactccagtctgtgtgacagagcgagactccatctcaaaaaaaaaaaaaaaaaaaggtctgaaagatcattagatgtaggtatagaattagcatcattattttcctgaaatgtttgtagaattcaccagtgaagatctctgtgcctgaagttctccatgtgggaaaagttttaactacaaggatttcttgtgcttgttttacattgagcttcttagatgtgtagatttatagtttccatcaaatctagaaaacttgtcattatttcctcaaatattttttttgtccacccctttttgagactctgatcacacatgtattacactacttgaagttttcccacatttcactgttgctcagtttctctgtgtgtgtgtgtgtgtttcattttgggtagtttctgttcctgtctcttcaaattcactagtttttcttctgcaatgtctaattggttgttaattccttccagtgtgtttttggtctcacacttcgtagttttcatctctggaagtttaatgtgggccttcttacattctccacgtctctactggattttagaacataggatgacacagacatgatagtagtttttaatgtccctttttgctaattccaacatctgtgttagttatgggtcagtttatattgaattttttctcttcattagttatagtcccttttatgcctggtaattttttttttttttttttttttttttgagacagagttttgctctgtcgcccaggctggagtgcagttgtgcaatttcagctcaccgcaacatccgcctcctgagttcaagcagttctcctgcctcagcctcctaagcagctgggattacaggcacgcaccaccatgcctggctaatttttgtatttttagtagagatagggtttctccatgttggccaggctggtctcgaactcctgccctcaagtgatccatctgccttggcctcctaaagtgctgggattacaggcgtgagccactgtgcccggcctctgcctggtgatttttgattggatgccagactatgggaattttaccttgccatgcactagatatttttgtagttctataaatattttttagctttgttcaaggatgcagttgggtaaacatatggacttcttcctgttaagttttgttaatatttgctaggtgggaccagagcagtgatcactgcagggctaattatccatcattcctgaagcaagaccctctgagtattcaacgcaatgccccgtgacctgtggggcttttagggctggctggtgggcataggcgtgtccctgccctgtgaaagctccctgtggtcctcacaggtggttctttctctggcctcatgtgctctccccaccgcacacatgctgaacggtcctcgaggagcccctctgagatctctgggttctctctctctctgcagctctctcatcttcagggctccatgctgtggactctggccaccttagtcttctgggcctcccagttttgtcttctcaacttagagagtccactgggccccacagggcttcccttccctgatccatggcccagaaatggtctctgggcagtgagctggggcaataggagggctcacctcattcattcccgtctctcagggaccacagtgttttaccgcttggtgtagagccttgcaaacttgtttcgtaggttttgtccatttttgttgttgttccaggtgagagtaaatctggtttctattactccatcctgaccagaagcataattcccccgagatggggttgaaccaggctctgtcttgccagacagctacctttgaacacaccgaggctgagcacagctcacattccatctggtgtatttttattgctctgccatgtttgacctctggaaacctgagtttatctcttgtgctatgagaagaatgcagcaaaacatgtattttctgtttagaaatcttaatattgccccccattgaactcgttaggaatgcggcagtagccaatcataaatgcccacctgagcgattctggagtcatttaaagaaacgtccactcaaaaggggttttgccccaagacagtgagcactcaggagactgtgtgtggtgggggtgctccaccatagagctggtcggcatccacagccaccaggacgctgccagagcccaggcctgcgccacgccctgcccagaggcacacctgcctgctcaaggcaaccagggcaggctcaaggcagccagggccagctcactgtgtgcctgtcactgtgtgaagcctgcttc

SEQ ID NO: 42246 - DNA, 2300 bp, Homo sapien
tgtcgcccaggctggagtgcagttgtgcaatttcagctcaccgcaacatccgcctcctgagttcaagcagttctcctgcctcagcctcctaagcagctgggattacaggcacgcaccaccatgcctggctaatttttgtatttttagtagagatagggtttctccatgttggccaggctggtctcgaactcctgccctcaagtgatccatctgccttggcctcctaaagtgctgggattacaggcgtgagccactgtgcccggcctctgcctggtgatttttgattggatgccagactatgggaattttaccttgccatgcactagatatttttgtagttctataaatattttttagctttgttcaaggatgcagttgggtaaacatatggacttcttcctgttaagttttgttaatatttgctaggtgggaccagagcagtgatcactgcagggctaattatccatcattcctgaagcaagaccctctgagtattcaacgcaatgccccgtgacctgtggggcttttagggctggctggtgggcataggcgtgtccctgccctgtgaaagctccctgtggtcctcacaggtggttctttctctggcctcatgtgctctccccaccgcacacatgctgaacggtcctcgaggagcccctctgagatctctgggttctctctctctctgcagctctctcatcttcagggctccatgctgtggactctggccaccttagtcttctgggcctcccagttttgtcttctcaacttagagagtccactgggccccacagggcttcccttccctgatccatggcccagaaatggtctctgggcagtgagctggggcaataggagggctcacctcattcattcccgtctctcagggaccacagtgttttaccgcttggtgtagagccttgcaaacttgtttcgtaggttttgtccatttttgttgttgttccaggtgagagtaaatctggtttctattactccatcctgaccagaagcataattcccccgagatggggttgaaccaggctctgtcttgccagacagctacctttgaacacaccgaggctgagcacagctcacattccatctggtgtatttttattgctctgccatgtttgacctctggaaacctgagtttatctcttgtgctatgagaagaatgcagcaaaacatgtattttctgtttagaaatcttaatattgccccccattgaactcgttaggaatgcggcagtagccaatcataaatgcccacctgagcgattctggagtcatttaaagaaacgtccactcaaaaggggttttgccccaagacagtgagcactcaggagactgtgtgtggtgggggtgctccaccatagagctggtcggcatccacagccaccaggacgctgccagagcccaggcctgcgccacgccctgcccagaggcacacctgcctgctcaaggcaaccagggcaggctcaaggcagccagggccagctcactgtgtgcctgtcactgtgtgaagcctgcttcttctttatttcgcttagcaagtgaggcaggagcatgtaaagctgctggcagaggaatatctaattgtgagtgtgagtgcgtgtgtgactgtgagtgtgagccagcccgtcagtgtgaatgtttgagagagcctctctgtatgtgcctgggggagggtgtgaggtgtgggctagggaggggcctggcgatgcccaccggctcacctcacactggacagtgcctgcatgttcaagatgacccttcccctgggccgcaggatgctgcatggcaagggacaagctcagccctggccccagagtttccagccgagcaagacactgcccaccctacagtgcatggctgctggtgcaggccccacccttttggaggcattgtgtgccagcctgggggctgaggatatgactgtgcagatggccatgccccaatcctggagtccaccatgctgggtggtggcatggagcttccctcctccgcacccccgcagagccggggcctctggctgctccaaatgccagttggagaaggtggttttctttctctactaatgtcttttcagtacctcctaaatggctctactttgaacctgctgggcaaggaagagattttcaaggaaaccatctaccgtgtgcaagctcctgccggccaaccccagaccccagcacggagccaggcgcctgtgcccgccgaccctcagcatcctcctcagaaaggctggtggcatcaggtatggggataagtgaccgccacttgcagcccctaggctcctcg

SEQ ID NO: 42247 - DNA, 2300 bp, Homo sapien
ctcctacctcagcctcccaaagtactaggattgtaggcgtgagccagcgaaactacgtgcccagctttttatagtagttagaagaaaccacttttctagtgtttctctacaaaaaatcggtcatggctgggcacggtggctgatgcctgtaatcccagcactttgggaggccgaggcaggtggatcacgaggtcaggagtttgagaccagcctgaccacatggtgaaaccccgtctctactaaaaatacaaaaattagctgggcgtggtggcgcgcacctgtaatcacagctattctggagggtgaagcaggagaatcccttgaacctaggaggtggaggtcgcagtgagccgagatcacaccattgcactccaggttaagaaataccattaaaaataatgactgactaggctgggtgcggtggctcatgcctgtaatcccagcactttgggaggccaaggcgggtggatcacgaagtcaggagttcgagaccagcctggcaaacatggcaaaaccccttctctactaaaaatacaaaaattagctgggtgtggtggcacacacctgtaatcgcagctacacaggagggtgaggcaggagaatcccttgaacccaggaggtggaggttgcagtgagccacgatcatgccattgcactccagcctgggtgacagcgagactccgtctcaaaaaaaaaaaaaaaaaaaaaagaaggtcattctggaccatgctacagatctgcctggaaccctccccccggctccggtgcaggaggacaggaaagagctcaggacccaggaaccagacaagggaagccggcccccgccccagccaggattgctccctgcaaccctgggcttcatgtttgggtttgtaaatagggccccgagtcccagtctcacaggtgacaggattcagtccaggtcctggtgccatccctactgccccctgcatcctccaaggctctgcagaaaggggagttggcagcaacgtggcaggtgggccaagcagagaagggtggaatcctgcccttccagcctggggcaccaggactgagacaatgccttggtcacagatagggtctatggcttggaaaagcaggtaggggtgccaggctgcacagaggtgagtgcctcagcggccagagcctggtgtccccagtcctgctcagtgccccttccagggggacaggtttgagatggaggagctcacccacctggaggcctgagatgtccatcttctcccggacgctgaacttctggcccatgagccgcagcttgggcacacagtaaaggatcatgctgttgaactgcaagagggatggcacaggtgaggaacgagagctgcccgcaggtccccccaggggccccagtgagcttctcacatgggatccttttcatttttttttaatgttataaagtgaaaaatatttttaaaagatatgtgcagtaattttaactatggttacatctttgagtgaggagactctagtcgctagctttatttttgttcatttctatttttaaatttttaaaccatgaacatgagctaattgtataatttaaaaaaaaacctttttttatttttttgagatggagtcttgctctcgttgcccagtctgaagtgcaatggcgcaatcttggctcactgcaaactccgtctcccgtgtttaagagcttctcctgcctcagcctcccgagtagctggaattacaggcgggtgctaccacgcccagctaatttttgcatttttagtagagatggggtttcgccatgttggccaggctggtctcaaagtcctgacctcaggtgatccgcccacctcagcctcccaaagtgctgggattacaggtatgagccaccacgtccagccaaaccaaatcttttgaatgagctactgatacattcaccaacatggatgaatctctcaaacccacatggtgagctaaaggagccagactcatctcatggcattgatgtgacatttgggaaaggcaaaattctagaaacagagaagagatccatggttgccagggcaggcgagcgcttgctcacaaaggggtgggacaagggaactgggggggtgggcgggggcagtgatcaaattgtaacttggccaggtgaggtggctcacgcctgtaatcccagcactttgggtgggtggatcacctgaggtcaggagctcgagaccagactgataaacatggtgaaaccccatctctactaaaaatacaaaaattagccgggcgtggtggcgcacgcctgtaatcccagctactcaggaggctgaggcaggacaatt

SEQ ID NO: 42248 - DNA, 2300 bp, Homo sapien
tgattctcctgcctcagcttcccaagtaactgggactacaggcacgcgccaccatgcccagctaatttttgtatttttagtagagacagggtttcaccatgttggccaggctggtcgcaaactcctgaccttatgatccacctgcctctgcctcccaatgtgctgggattacaggcgtgagccactgagcctggccggtctttacagactctttatagggtcttaagttaagatgaggacattacggtgggctctaatctaatatgactggtgtccttagaagagagatttgaacacagagagacacagggagagcaccatgtgtagacaggagttaagttgccaccggccaaggaactgccagaagctggatgatacaaggaaggctgttctcctggagtttttggagggactgcaggcctgccgacaccctgatctcagacttctggcctcctgaaccataagacaataaatttctgttgttctcaggcacccagtctggggtactatgttacacagctctaggaaacacacttcctaaatggccaggtgtttagcatttgaaggctcctgaaggcctgggtcacagcgtggtggcttagggagctgcaggcagcctggtgttttccatccccacctagctccacccagctattggagggctgccccagacctccctcccagccctgtccatgcacctacaggcagtggccttctgcctggtggtgcatggtgggcaaaaccagggaagggaccacacaggcctgagaggtgggctaggggccacttggcaagacattctggggtcccagagtgtggtctggagtgggcactgctgatggccctgcccttcccgacatggcagaaagaatacacatgcttgattttgaataaaggagattgaagtaagccatcgtgtgtgacccacaagtccaagtgggaagaacatatcaggggtgacgccaaccctgatggcgaaagggggagggcccctcacgtttcacactgaacctcagctttggagggctcggaaagcagagacggggaggggctgccctgctggaaccctgcttcatggtccacctgaacatccacactcttcacggtcacctgccaggcactctagagccagcctggcccacctgggccaccttctgcgctcctggaggcatgcctaagccagccgcactgggcttctgctgccacacattgccaaaccagggcctttgcacctgctgttccctctgccaggattgcctttgccagctccacaggaataggcatggctcaggtggtctcccacaagcagcccaagatccaggatgtctgaggcctgacaccacacccaaccctttggtggctgcctgggcagggggctaagcctgggttgggtggggtcagagggagagaaagagcccggatcacagctctgggcctgctgcaagtggagctgggtgggaaggggaagccaggagaagggaggcctccaggtgtggtgggccctgcagacagaccccagggctttccatcctgtttcccccagccgggggcccctcagtgagaaccgaagacaacaagggcacccagacctcagtgtgcctcagacggcctggcccagtgagagacagggaaagaaggctgggtccacacaggactctgggggtgagtgggttacgggaggggcgggccggggaggcgttttgctgtttgccctttggtaccggccgaatccggcaccctgagaaggcaaaatcctgctcaaaaaataaaaacacagaagcacatggaaaaaccacactaggagtgaaggtgagaacaggaagggatgggggaagggtgttgggcagaggtagccacgcgtgcaacgccccggagtagcaacactttccgctcagccggctgccttggcccgctgggtatttggtctccccaagggcccccgcccacagcccccggccggacctcggccccagtccaacgtgtgggcgtggtctgtaagttgcatggaaccgcccctgggcgggcgtggagggcggggcctccccgcccctcacccaggcccaggcccaggccccgcccccacaagccgggctcactcccctggcagaccccgccaagcgcctcggagcgcgcaggatgcgctgggcggccgccaccctccgtggcaaggcgaggccccgggggcgggccggggtcaccacgcctgccccagggaaccgcacaggtgagggctggggccgagtggccgcgtgcggggctctgcgcccatttcacagacgggaaagccgaggggagggggt

SEQ ID NO: 42249 - DNA, 2300 bp, Homo sapien
accgtgttagccaggatggtctcaatctcctgccctcgtgatccgcccgcctcggcctcccaaagtgctgggattacaggcgtgagccaccgtgcccgtcctgtccctgttctttacctgtgatgcaccagcggtccactgtcaatgcccaaaaatcaggaaataccagataagcaggaggaagagcctcctggatttggacaccaggagacctgcttggggatgtccttagcagtttcactgaacgtccttgaaccccagagacaactcagatgcagggaacagggacacacactgaggcccatctgcacaatggaacacttcactgctgtgaaaagtaaccagctgctgatatatgcatagcacaacgactcagatgcattttgtgtgtgtgtctgtgtgtgtatgaacgtgtgtgaagttagaccagagcctccttgtctggttctgagtcttccctgcagcataagagccgtgtgactgcaaaaagtgtggtaagaccctctgcccagtttgctcatctgtcgatggggataatgatggttctccctgggtaggctgctatgccgatagatgatggcacatgtaaggcaggtgcaatggcatccagccacagtaatcttctcagtcccagctgttgtcgttataattttataaaaattcttgattgctgttgcatccagagcatctctgtgtccttatttaagaacatcactggccgggtgtggtggctcacgtctgtaatcccagcactttgggaggccaaggcggccggatcacgaggtcatcatggccaacatggtgaaaccccgtctctactaaaaatacaaaaaatcagccaggtgtggtcgcacatgcctgtaatcccagctactcgggagggtgaggcaggagaattgcttgaacccaggaggtggaggttgctgtgagctgagatcacgccattgcacactccagcctgggcgacagggcaagactctgactcaaaaaaaaaaaaaaaaaaaaaaaaaaagaacatcactgtaagtgctctctggtattttaatgtctggatggccctgggtaagggaatcattccctcctgctggaggcgtgggttgtttcagcctttcactattatgtatggttctgaggtgggcttccccatagagaaatcttggcagcagattcttttttttttttttttttttttgagatgcagtctcactctgttgccaggctggagtgcagtgatcttggctcactgcaacctctgactccctggttcaatcgattctcctgcctcagcctcctgagtagctggaattacaggcacatgccaccatgcccagctaatttttgtatttttagtagagatggggtttcaccatgttggccaggatggtctcaatccccgacctcatgatccacctgcctcggcctcccaaagtgctgggattacaagcatgagccaccatgcctggccagcagattcttatttcctgtggctaaaggttcatatgcaacatagggtgcttattgcatttaccaaatgctctgcagaaaggttggatctgtaccccagcccgggtacagggcttcccaggccctgccaacttgcacattgttttctttttgcctttacctcaccgacgcaggaaaaatgagctctcccttgaatcaacatttcctcaattgcctgtgggtctgcatttttcatgactgtgggccactggtatccttgtgaattgcttgttcacacattagaacttgttggttttttttaaactgaatattcagttttcattgatgtgtaagacctcttcatagattaagactaccgaaccaacctttgacctatgctttccaaatatcctttcccgaatttttcacctgagttggttgttttccattattagggagcctcagaagcttttgctttctgctttgtatgcagtcaaatctgctgatctctctctgtccctctttttttttttttttttttttttgttctgatttctgcctttggagccgtgtttaggtcataatcaaaggccatgcctcagtgtctcagggaaggtatgtttgcttttattgtcttctaacacttatttctttttttaatgctccaatcctcaacatctagagtgtacttcatggagggatccagctctgcgttgtcccccggtctggatgaccccatgtgacctctagagcatccaatggcctttggagctgcaccccacccctgtgctccccaatgctgtgccagctcctcactccagggtcctgcccagccctgccctgcgtgcccacccccc

SEQ ID NO: 42250 - DNA, 2300 bp, Homo sapien
ccaaacctcagtttccctgttcatcacatggccaggggcagtcctgagggcgcagaagtggatgtgaaggtgggatgctacctttcccaaaaggggctggggtcaaggttccctgaaggtgggcagtgcctggagcccctgcagtccccactgtgtcccccttccactccgtcgccacccttatggctctgacatcactcaggggcaggagtgtgtgcaaaataaacccagagaagtaagtactacacgtcataacagtgtgatggatgcagaagaattggggtcaggctgcatcccactggggcaaaagaggccctctggggaagccccctctgggtcctccaggggagcacctggaggccagagccagcctggactcacccaggcacacaagcagatgagaggcctgcagggacccacaggctggtccactaccctcctgccctgggacggccctgtacatgggcctggggcaggctgggtctgatggcagcctggcctcctggggagcatggacggggctcaccttcagtgtttggggacaggggtggctgctgtatagtgaccatgactgggccccaagaattttgaggtttccaggtgacaactgcacccattctcctgatgccccctatgccggccctgatgggaggtcatggcacaggggagaactgaggcaaagagacagatggcgcatggactgcagggaccactgtgctgtccgagaaggggacactgagttgggcccccattccgggtcaggctctggcatctcaaattagagctgctatgggggaacggcccacacaggcagggaaggaaagaggaagggaaactgctgctgctggctgggagagtgctgctattccttccttcacgggtctccacttcctggctggggcccagtgcattcacatcatgtggggctaggagcttcttgtggcgggctccggagctggaaatgccaggcctacgagagggaaagcaggaaggaaagcgggagggaagtggagttggcccaaggtcactcattttacagtccaggaaactgaggctcaggcaggttaagtgacctctctagttcgggtcacactgtcaagctagtgtcttcttttgaaggtgggggactggggtcccccaagaaggtgtcccccccccaccccgccgagcgaggtcacaccgttgagtccttctcccctggatttgggaaagcatcactgggcactgcctcctttggctggtccctgtggcgtactggacgcccaccggccttttgccccaggcctggccctgtactccccagggcctgactttctgtatgacgttggatcagtcacgtcccctctcagtttcagttttctcatccaaggggtggggcgcgaggccgggagcggggaggtggactgagccggccggcgggccacctggatcccgactccgccactcaacgcggcagggcccggaagggcgggcccaagacgggcagggctccgggcaggagcgggcgcctccagggaggcgcgcggcggtcgtagctgaggccgccttgagggcgggacttggacgcgggcagggctcgagtgagaggcggggttaaaggccgctgcgacggcgttatagacgccggcgggaccggggcccagcgaggggagggactctgggcccctcgcggcgtcttaactgacgctgggaggggcgggagtccggtggcgcccgcccacgcccgcagtcgcccgcccacgcccgcagtcgcatggcagagcaggaaggggcggggctcagggcccctggaggcgcggaggccgacgacggaggggggcggggctcgagtaaggggcggggcccggtggggggttccttgaggctcggaagccgtcgtcggagggggcggggttcaggtgcagggcggggctcagaactccgggagaggcggaagccgacgccggagggggcggggctcgagtgaggggcaaggctccaggatcctcgcagcggcctatcccaggacggcaagggggcgggactcgagtgagaggggcggagtttagagccctgggggagccgtagcgggcgcggaaggggcggggcctaacggtagggggcggggctcgtcaaagggcggggtttagagtccccgaggctacacagccaaagccggggggctggcctagccaaaaggggcgggcgagcacggcccgcgggcggcgttcgctggagctggtggaccgggcggctgaccgaggggcggacgcgcggcggggcagaccgctggggactgcgggcggcgctgtgtccgtcgc

SEQ ID NO: 42251 - DNA, 2300 bp, Homo sapien
ttgttggtagaagcttcttaaggccttgcagacacactgtgtcccatggtgatcccagcacaggccaccctgagccctgtgtccctgtatctgtgccactgtgaagatctgcagagcgcacatctgggcattcttgatctcgaactcctgagctcaagtgatccacccacctcagcctcccaaaatgttggtattacgggtgtgagccatcacaactggtctgagccaccgtgcctggccctgggcattctgagccacctgtgccacctgtaccttccccagaactgagctatttcctgatggccctgcaggtggcccatgaaaagtagattcttcgcccctctgagtttgttttctgtgataagctctgtgaaagtgggtttccaccgcaacccctcacttccatcttctggagaggcaggttggcaggccaggggcagctctcagctgggcaatgcgcaccacacaggctgggatggctgtgattctgcaggttcaccctcctggtgggaacccaccttgggggtgatgccttcctgtggtcagtgtcagtacgaggctgtcgtctctggtccccttgggctgtgctggctcatgaccctgtgctatctgttttagatcagacctattgtgaccgcctggtgcaggacacgcctttcctgacaggccatgggcgcttgagtgagcagcaggtggacaggatcatcctccagctgaaccgttactacccacagatccttaccaacaaggaggcggaaaaggtgctgaggaggtgaggggggtacccgagacactgctcagtttcccttcctttctgggctgggagaagctggtgaccagccctgggtcattctctcatgggatgacacactaggtatgtcaggattcagaggtgacacatctggacctggctactaaggctgcctgagctacaaactggccctttggggtgagcccaaccaggctcggaacatcagctctctgtgcctcggtttcttcatatgtcattgggtctgctgtccccttcccgagttgctgggaggttacaggagataacatgtgacaatacatgaagcacacaacagtataagatacggagggaggcgagaaagagggcaggagggaggggtgaggagggaggaggcagagggagagccgaagtgggatggggaacagataatgggcccggcccaccccagtgccacagggctttgcactctgcatcttccgaaggttcaaagcgggcaaacaattgcttccttttctctaatttctatattactgtacgaggctggaaagcccagcatgtcacaggtaggcagctgagcttctaggaaggcagatgctgactcaccccacagccgcgccccagtctgcccctctcagcagtgctgagcgggctggtcccctcagaaccccagcctcccccatgtgtggagtggacaccgagagcccctgcctggcaggtgtggtgaggactgactgagctgagccgggtaaacgcctgcccgagagcccttgtcgccagatggccctgcagccctgtgggcagccacgctcatcaccccatctcacagaggtggtccgaaggctcaagaggcagccacttgcccagggccactcatttcaggagtgtcaggccacatcttgagttcatcctattatttgggaaagtgcccagggccagtggctgtcactctgtcacatggccctggcctctcagagctgcagagctgggcacaccagggtggctctgctggagatggcatttaagatgcaattcctgggctctgtcttgggaggtctgttctgctccatcaccccagtgccaggtggccctgaggggacattggatgagagagttagccacaccctgccgaccctacccacatctgtggctctggcgcccccactgagccacctgttccttgacaggtgccacgtgcagggctatcctgagggttggggcatctcctggaacaatgaggttggcccacaacagaacaggagtcaacacgggccctgctactggctcaggtgcttcttccgttttgaaggtggtacagtaattttaaaagttaggagctcaaatccaaatctcttattattgcaattgaagtctaatgcatgttcacttttaaaaagtttagaaagtttaagacgtttatacaagaaaaagcacatattccttcctcacagacaccacagctcctgccacccatctgcctgccattttcacactgccatggtttaactccagttccctgtggccatgtagaatgatatgctgccaccaggtg

SEQ ID NO: 42252 - DNA, 2300 bp, Homo sapien
ccttaccaacaaggaggcggaaaaggtgctgaggaggtgaggggggtacccgagacactgctcagtttcccttcctttctgggctgggagaagctggtgaccagccctgggtcattctctcatgggatgacacactaggtatgtcaggattcagaggtgacacatctggacctggctactaaggctgcctgagctacaaactggccctttggggtgagcccaaccaggctcggaacatcagctctctgtgcctcggtttcttcatatgtcattgggtctgctgtccccttcccgagttgctgggaggttacaggagataacatgtgacaatacatgaagcacacaacagtataagatacggagggaggcgagaaagagggcaggagggaggggtgaggagggaggaggcagagggagagccgaagtgggatggggaacagataatgggcccggcccaccccagtgccacagggctttgcactctgcatcttccgaaggttcaaagcgggcaaacaattgcttccttttctctaatttctatattactgtacgaggctggaaagcccagcatgtcacaggtaggcagctgagcttctaggaaggcagatgctgactcaccccacagccgcgccccagtctgcccctctcagcagtgctgagcgggctggtcccctcagaaccccagcctcccccatgtgtggagtggacaccgagagcccctgcctggcaggtgtggtgaggactgactgagctgagccgggtaaacgcctgcccgagagcccttgtcgccagatggccctgcagccctgtgggcagccacgctcatcaccccatctcacagaggtggtccgaaggctcaagaggcagccacttgcccagggccactcatttcaggagtgtcaggccacatcttgagttcatcctattatttgggaaagtgcccagggccagtggctgtcactctgtcacatggccctggcctctcagagctgcagagctgggcacaccagggtggctctgctggagatggcatttaagatgcaattcctgggctctgtcttgggaggtctgttctgctccatcaccccagtgccaggtggccctgaggggacattggatgagagagttagccacaccctgccgaccctacccacatctgtggctctggcgcccccactgagccacctgttccttgacaggtgccacgtgcagggctatcctgagggttggggcatctcctggaacaatgaggttggcccacaacagaacaggagtcaacacgggccctgctactggctcaggtgcttcttccgttttgaaggtggtacagtaattttaaaagttaggagctcaaatccaaatctcttattattgcaattgaagtctaatgcatgttcacttttaaaaagtttagaaagtttaagacgtttatacaagaaaaagcacatattccttcctcacagacaccacagctcctgccacccatctgcctgccattttcacactgccatggtttaactccagttccctgtggccatgtagaatgatatgctgccaccaggtggcagcaccaggccacagactccaggtcctggaggtcaaggcccagtggcctgtccactgaccttgagaaccacacatttctctgtcatacacatcaaaagagccaatacttctgtctttttttttttttctttgagatggagtctctgtcgcccaggctggagtgcagtggcatgatctcggctcagtgcaacctctgcctcccagtttcaagcaatcctctggcctcagcctcccaagaagctgggattaaacatgcaccatcatgcccagtcaattttttgtacttttagtagagatggggtttcaccgtgttggccaggctggtgtcaaactcctgacctggaactcctgatccgcctgcctcagcctcccaaagtgctgggattataggcatgagccattgtgcctggcttcaacttacttttttaaaacttgaatcacattctgtagactgaaaaataacagaagttagcacttataccatcacttcattaattccctgtcacagcctaccatgagggttcattatcccttttttacaaatgaagaaaccaagtctctgaggggtggagtagctggctaaggtcacacaggaagccacactatgtcccaacacttggaatgatgtcaccagccctgtgctttctttttttcgagatggagtcttgctctgtcgcccaggctggagtgcagtggcacgatcttagctcactgcaagctccgcctcccgggtt

SEQ ID NO: 42253 - DNA, 2300 bp, Homo sapien
ccttccttcatctccctccctcatccacacccccttcctcactacccctctttccttcactcactctccctcacaaccctctgcatttcacctccagctctcccacaacccctccctcacaccaaagctttggtaatgggagttccctcgaccccagcatctcctaccagctcctgcacagttctggatgtcagaacagcatcccatgttcaggtgtggtagcttggaggaaactgctcttcttactggggtatcatgagggcttcctggaggaagtggcattcctgaaggatgagttgatgagaggggctggtaaggagtcccaagccgagggagcagcacggtttttgcctgaacacctgcagcacaggtgtggaggcgcaggacacggccatctgtgggtgtagtgtggaagcggggactcagggcagccaggagggcctcacgtgcccaagggtgccttcccctcccctggggacctagttcactgctggtcacaggaactggttggcccggtggttagcagagctgggcctgatgggcggctgaggcacagacatgggcgcttatcattctccctcctccaggttccagcctcaaagggtggggcaaccaccaggcgggaggcggcagatgcaagagtaggcctggctggtggtcgaggatgtcacagactcagccccaggcttgagtccagttggtcagggatggagctgggggtagctgggcgctgggagggcagtccaaggacagtggggctcaggacctggctgacatgggcctcgggggagggcggtgggtgcacacagatggacaggggagtcagcagtcctcgggccaggcagcccctcactgaggaatgacaccctgcccaagcggcctggggagtcagggcctcaggtcatgtcaggcagccctgaggaggtgcgtgtgtcctccacggcctcaggtggggccacctaggacttgcccaggccacacactggcctgtgccctgcctgcctcggaggtttcctaccttcagctgacgcagtcatagaatgttactgtccctggagacccctccttcaccctccaggggcaagtcacacctgtctacacccttcacccagacacctgtcaccttcactaagtgtgtctcctttacccaggcattaaaggcatctgtagcaaggtggtaaattcctaaaaggatttctgagggggagggggtgctgtgacagagcgcaggctcaaggaggagtcccgagggagggatcccatttcacaggtgggcaaaggggctgagactggagcacaggccctggccccatggctcagggtggaggagggagagggcagctagggctgtcccccggccaccccactcagtgggcgcatggcagcctggcaggtgggagggctctgaggcactggctttccttgcccctggccctcagttccctgaaggggcaggcactgtgatgacccaagcagcagggctgcatggtaatgggatgtcatgtcctggagctccatactccaccggcagcctggttcccactgtcatgtgcgctgggaccctgcgactgagcagggtccctccaggagctgcgcccatagcctcgccctgccagtggcatcgccccagcattaggggttcccagcaccttctggggcaaagcctgggtgcctccagaaaccccctggaaaatgcaaactcatgatgattctgtgggttgacaaatattctcgtttccccacaaaaaggcttgggggaggagctgacaaggggagggaatcaggtgtccggtccaggctcagcagctggggtggggggagtgggtgtgtgtgtgtgtgtgtgtgtgtgtgtgtgtgtgtgtgtgtgtggcacatgaggtgtgaggagggggcagtgtggggaacatctgaggtggggaggcagtgcctggcggcttatccgaggcaggtgagtccatgtggagggcgtcctgtctggggggtctgtgccagcagctggatgtggggatgctgggaataccagggccagccccagctggagcagccatagctgcagtcatctctgaaacacccctgagactgaggaacgaggcaggctgagagaacctgaacatttaatatggtcagcaccttgtaaggtgaaggtgtgttttttacacaaattataaataatgaaaaatatgcatttagaaaaagaagcagcagtccccttggcgggccggctcgaggactctttggttgagtggcaggtgaggccctgggtccagggtctgtcagagcccccctaggtcatctgccag

SEQ ID NO: 42254 - DNA, 2300 bp, Homo sapien
gagtgcagcgtcaggcccagggtgggagaggcaaagtagacaccccatagaggcttcggggtatgcatggagtgacccgagagcacaccagggccccagggacagcgctgctgggtggcccaggtaaaggcggctgtccctgtgcgcacatgtgtccacgtgaacttgctacttagagagcagctgatgctgaaggcaggttgttggaattcccaggcccaggtgtaagcagcagagcccaccagtgtcccctgacgcccactctcttcctcctgggcacataattttagatgaaactgaaaaacacgcagcatgaaagcaaggcccctgccctctgctggttctgtattggctgcctcgtgtatttttccagcctgcagaaagtcgaggcctggatggataccatgtccgcccctccctgtggccctgcggcaccccggcctcccggcctgcatctttcatgagtctggaaacaggatctcccagagagggccccaggaggttggctgccagcagtgggttctcacagctgcctccaagcaggtgaccagtcctgggaggctgtggtctagggcctggcaactcaggggcgcctgtggacaaagggccgggccaaggggctggcaggtttgtcctgagtgactgaagagggccccaccagggcagcttgagaggggcagactcttgctccagagaaagaggaagtttggtacttagcttggaatgaagggccagccctagagaggaccttcctgtggcaggagagagggccatgtcctgccaggggaagtcctgggaggcttcctggaagcagtggcctctgtgtggggccttggagcttgagagtgtctggcaccagggaaaggcattgggggcttcgagagaactgcagggggccctgaccagataggcccctaaggcaaagaggattccatcagaactcgcattcccattttattactctgggaagtaatgtggaagctaagctccactgtatgtcgtatgctgaggcatctgttgagcctctgctgtgtcggggccgggctctgggtggcccacctcagtgaagtcttgctgctaatggccgaatagttctgcaaggcctgtgctgaggcctggaggcgagtggcctgttgggccccaaggctgggaggttgggaggtggcaggggcgatctctgcccttaggtccggcccaggaggacttgcttcttgcctgggccggtgtgcacagatctgtccgcccacacgtcacttcctttcctggcatcaggagctcagactctgaggggagggggagaggaggccgggggcacagaccggtaggggcaggcagggaggagcagccccgcctatggcaggagtgggaggatcgggcaatgctttccagtggaaaatcagagtgcgtgtgctaaggttgctatgtcgtttcctttctctccaggaccgtattcctaggggaggttttataaaggctgagcacatgctcgcagcctctccttagggtaataagcacttctgtctgagcacttaccaggggtgggggcaagggaagccctcacctgcagggcccggtgacccccagagcccgactcaggcacagcccttgcccccctcccccacccgccttgctgaccattcccctccctgcagccggcccgctggggctggaggcacgggcccatcaacgtgaaccattacgccagcaagaagagcgcagccgagagcatgctggacatcgcgctgctgatggccaacgcgtcccagctgaaggccgtcgtggaacagggccccagcttcgccttctatgtgcccctggtggtcctcatctccatctcccttgtgctgcagatcggcgtgggggtgctgctcatcttccttggtaggtccccaggtgggggcagccaggccacctgctcaccttgctggcatctgctcgcatcgcctgggacaggtgcccaccaccttgcacacttggctctcaaggagctgccgagttcctggccctcatcacccagacatgcagtccaggaagtggcaccccccctccccccaccctgcactttggtttttgttttgttttgttttgttttttgaaacaaggtccccctctgtcacccaggctggaatgcagtggcgcagtctcggctcactgcaagctgcatctcctgggctcaagcgatcctcccacctcagcccccaaagtaactgggattacaggcgctcatcaccatgcccggctaatttttgtattttttgtagagatgaggttacgccatgttgcccagtcgaatttttgag

SEQ ID NO: 42255 - DNA, 2300 bp, Homo sapien
agatggaggtgacacggggtacactgtgcctttaagacttgtcctgggttggatccagcagagaacagttgggtaaacagcattgagcacagtggggaaaacagacactacatactcaaatgaggatgacggagcagacgagggaactccagcgctgcagcctgcctgagccctgacacccacacgtcctgccagcagccccaggagctgaggaaactgaggctgggagagggtctcagacggccagcacagagcaggtttacaaaccccgaggctgatgtcccaactgtcactggtgctgcgaccctcccggcttcctcttagaaggtgggaatggggccaggcgcagtggctcatgcctgtaatcctagcactttaggaggctgaggcgggcagatcacctgaggtcaggaggtgatctggccaacatggtgaaattctgtctctaccaaaaatacaaaaattagccgggcgtggtggcgcacacctgtagtcccagctactcaggaggctgaggcaggagaacggtgtgaacccgggaggtggagcttgcagtgagccaagatcgcaccactacactctagcatgggcgacagagcaagactccatctcaaaaaaaaaaaaaaaaaaggatgggaatgatgaaccacactgcaggagctcccacatggcacaaaggaaagaatactctcaggacggggtctccacctgccaagccctcctacttcggggcctctctacacgcccttggccttccaaggtctcagggctcccctgcagctcccagggccctttctgggtgtgacgtattttctctgtggtcccacacctcctgcccctccaggaattgagccctcgtgggcaggcactatcccccagaatagggatttgtcccatactgtgagagagttttttgtgtgaatggtgctggatttccagctgctggtgaacactcaggtgtgccaacagtgccctgattatgcgaggacaacagcaaccatccccgtcgtgggccaccgtgccagaccctgtcctgcagatcccctctgaggcagagctggggcagtgacagcctgagcctcagtttctctgctgtgaagtgggcccacgacagctcctccttcatgggatgaccccgtttggaggatcagggcaagcgcaatcctgctgccctgcccatgcccactcactcctacctcctgtcccggtggcagcctgactggacagagcctggggtctgagctggccttccttccactgcccttctggaaatagagtggccatactgccgcaagctgactatgctgtggtcaggatgaactcccctggcctcccagggtggccgccacatgctctcgacccccaggcccccagatgggcaaagtgctgaggaatgaacatatggagaaacagagaccaaacaaccacttcaatcatacaacaggtgggggcccgcctagcatctggccagggctctgggcactgtgctgcccccagcccaccccctgccacaggtggcacagatgggcccatgagtcagcgcacgttcatcccctttgtgcctcccccagcccctccagcagtctgtgccctcataacccccatttcccaggcaggaaaacctaaggtcagggagtgggaagccctgtgtcagcgtggcccgcaatcaggggaaccccggactctctgacgctgttactaggggcgcagcaggcgctgtgctggagcgatctgcggttcccagggcgaaccccgcctgggaaaaacccagcgtgggcgccagcggcaacgcccgctcgctttcatgcagtttgcctggtggccagggaaaggtcgttcttggcctcattttgtggattaaaagtgtccgcgacggaggttcagagcaagacgcagcgcagggtcctctggggccatcggcgtcgcgccccctcccttgtggggccccgcgggaccgtctcaggcccgaggggttggggtcgccccaaactgcgcgctctcagcgtacagcctccaggccccgggcccgccccgggtggaggcggagtctggggcagcagctcgccgccgggcgggccgggggcgggccgggggcgggcgcgcagctggagcctgcggctgaggctcgggcgcgctcaggcccggatcctggcggcctgggcggccgcaccatggactcgggaaccgaggagtacgagctcaacggcggcctgcctccgggcacacccggctccccggacgcctcggtaagaccttccccccaccgctgcatgatcttgccaggccctgtcctttcgggg

SEQ ID NO: 42256 - DNA, 2300 bp, Homo sapien
tgccaaatgcatagccctacacctagcacactatttaaccactggctctctggggagaaaagtcctgatttgaggtgtttgccaatttccgcagtgtaaatactcccagcattgctgacttcaggctacagggtggcattgctgaacccagagctgggaagggatgttcactgttgcccctcacaaattagtttcagccagtgccagtgcccagcggggctccaggaagtcctgcttctctgggtaacagttggcctggcatattcttccctctacattgtgaaggtgagatatcgcctctgctggcttttatgccacatgagttattttgtgccaggggctccaaggcctacaggcccacaagcatcttttcatctctggaagtgtgtgtgtatctgatgggggtgccagcccagtgggatggggactgagatgagaatactctggtatctcccttgtgcctcagtttcctcacctaggatcatggaggctggggtaagggtgaagtgttagctcagggcattgcctggagcagggctcagaacttagcagtatggttactgacacaggtcacctgctgcattagggccagagacgcccaagagagggcttgtccgtgggggtctagaggaggaaggagctagagatcatggaagacttctcgggagaggtggcatctggcagaggtgggaaggaagaacactttgggtcaaggggcttctggaagcctctccatatcccatccaaggcattccagctcagcttcggtcttgaaagttctgggatttagagcatataacttctgcctttggcgcctcagtttgctctagactgtgaaatgggcataatgatcaccagtgcctccctgggtgatgatgaggtcctcatggttcctggtggtgaagtgagggcaggaaaggacacgctgagccccaccaggcttagccccaggctgggctcccgagggcggcggtacccctggtccttttcttcctagcctgcccattctgtcctggcacagggccttgaggtctagcgcgccgggctgcggcgtgctgaggcgttgagcctgctgcctcctctcaggaagaaacggggtcctccgcagctgacagccctgcggggcgttccaaagaacttcagaggacaggagcgctacctcgagcaaagaaccgcgggtgggagcccaggtagccggcccgcaggtggccgcgcgcgcctgccagtcagccagcccgtccgcagccaggtgggcgtgccaggcccagccccctgcgccggtccggggcggggcgaacggagccccgccctccccgcgcgccgggtcggagccggtgcgggagcggagccgcgcgaagccggcaggagcacgcgggagcgcggccccgcagtggcccggcccgagagagcagcgcgcaggagctggagcggcgccacggcccccaccccagcgcggacctcgcccggaactcggaccccgtcctcgaagcgtgatctctcccgcctcgcacgccctggccgccgggccgcgggcatggacggcgtccgctcgccctgtgagtgccgagcctcccctcaacgccgctcgccgcctttgtgtgcgcgccgcggcgctgcagccccctccccgcgcgcccctcccgcgccccgggcccgcgtcctttgtggagccgccgccgggccactgccttcctcccacccccgggcttccctatcccctttacagctgcctccgggacagcctagcagaaccctcctgggccagggctgggcagggcgcgagatccctctgccggcctccggggccctcagggacaccctagcaggtcctctctcccagggttccagggacaccacaggcccgtccctctccgcagcctggggctgagcagggcacggacccctcctccccaacccaagcctctggtcccgtctgcagcccccctttcccagggcccccagagacggcccccgcaggctctctccgcggccggggctgggcaggttgcgggcttagggcggcgttgtctcatccggcggcctgggcaggtgcggcagggccggcgctcacgcgggcctgtgtgtccttggcccacagagatggacggcgatggcggccgccgagacgtccccggcacgctgatggagcccgggcgcggcgcggggcccgcgggcatggcggagcctcgggcgaaggcggcgcggccggggccccagcgctttctgcggcgcagcgtggtagagtcggaccaggaggagccgccgggcttggaggcagccgaggcgccgggcccgcagcc

SEQ ID NO: 42257 - DNA, 2300 bp, Homo sapien
acgtcgccgctcaggtccccaccgtgcctgtgccaccggctgcggtcctctcgccgcctctgccggaagtgctgctgcctgccgcccctgagctcctgcctcagttccccagctccctggccacggtgtctgcctctgtgcagagtgtgcccacccagactgccacacttctgccaccagcaaacccaccgctgcctggcgggcccgggatcgccagcccttgcccaactgtccagctgacggtggaaccagtccaagaggtgtgtgcccctccccccagcctgtcccatgactgggcagttgcggccaccggggatctgcatagtgacctggggtcttagtcctagaggtcggggttgcttagctctgggacagccacccaggttctgttctcacctctccctagatttcacactttctgtaagccacatcaagacagagggtgtgatttttatagatacaggtttagaggatgctttccctgggacaggatgcaagagactgtgaaaagctttcatagcaccagtgtgtcctctttgagggatgatcaaagtgggttaacatttttggaaaggaagtggctcccagcttttatgaatacactcgggtccaagcgtttcaacaagataaaaacctctatgcctgctcccattgtgacgccccctgggtcgtacccacctggctgcagaagagagcaggagaacgcagcggggcaggctgggctgaggaagtggggagggagagctgactatgcgtggctgtgcccacagggaggcgggagtccgcatgacctgttctcttttctccgggtgtttatttcaggagcaggcctcacaggacaagccgcccggcctcccgcagagctgtgagaggtagtgtggcccagcctcgacctcgcaggacgggtgtaggggcgcaggcctgtacagccactcagcctggctcctgctgctgcttcccctggaacccactatagtttgccctgatgccattaggggtttttcaaacctgacctggtggagcctcagggccctcctctctgggtcttgccagctgttgttggagtttggtagccagaggcccctggctgggctctgggtctctgctctggtttgcagtgctgagaatgttccagaacggagaggctatgggcggagttggcagtgcccagagactaggagggggctgggagggtggccccctgtgtacagggctgaatccagccccgatcctgggtttcctggcctcctgggctgtggacacaggtgtttcaggaaatgaaccgtgtccttatttgaactgtgaccatttgttccaccctcctggggtgctgggcactgcctgggcttggcattttgcaaactgcaaaacggattggcctcacaacagtggtgggtgtgtttctgttgctgtagcacagatggggaaactgaggcacaggggctgattcgcaggtcaggagactgagaggatcaaggtaacgcagctagtagctaggaagcctgtgcttccttctgcccgtgccacttgggtgcagcagggagctgggtgagggcccagaagcaggcttggggtattcgcacaggacgggctgcctctgtaggtcacagatttgggccctggagactccagactgttccagataagctgactttccccgccattgccgacgtgctggttgtcctttggtgccattaatgttcttgggttttgctcagctatggaggttctgatgtcacttctggaaaagagctgagtgacagctgtgaaggcgcctttggagggggcaggctggagggcagggcagcccgaaaacaccaccgcaggtccacgcgtgcgcgctcccggcaggagagggccagccggccccggcttaccatcttgaacgtgagtgggcggggcgtggcgggggtgtggtgggggtgggggcatggtgggggtgtggtgggggtggggccgtggcgggggtgtggtgggggtgggggggaggggtacttgggggtgtgtgggggtgtggcgggtgcacgtgtgggtacgcccgtggtgggtgctgatgctgccccttccaggtgtgcaacactggggacaagatggtggagtgccagctggagacgcacaaccacaagatggtgaccttcaagttcgacttggacggggacgcacccgatgaaattgccacgtatatggtgaggctgggtctgggtggcttggctcccggtgtttcttggacacgtgtgggcctgagcagagcgccacaggtcacatgtcgagcctggccttgtgtggaggtgtcggttggc

SEQ ID NO: 42258 - DNA, 2300 bp, Homo sapien
tgtgcctcagtgttagtcgtggtcccacccagccacagcccagtgagtaccaacacagaatggatgcgtgcatcatggtgcagttgtgcaaacaataacaaggacacatctcacaaacacggtgagagaggccaggcaccacagaatagagtaccattccattgatagaacgtgcagcacgaccatcatgtttagacagacgaacggtaaggccggaaaggagcagtggaggaaattttggtcaaattagtttacctttgttgggccaggcaggggatggggaccaagggagtctgggggcacgagggagggcatcagggtcctattaatctccccattctcaccttttattttttgaacagttttctttttttgtgttcattttctttgtgttttttaaaaagacaaagtgggctgggcgtgggggctcacacctgtcatcccaacactttgggaggctgaggccagcggattgcttgagcccaggagtacaagaccagcctgggcaacatggtgaaacccagtctcatatgaaaaatacaaaaattatccagctgtggtccgagctacaaggaaggctgaggtgggaggattgcttgagcccgggaggcagaggttgcagtgaggcgagattgcaccactgcactccagcctgggtgacagagccagaccatctccaaaaaaaaagaaaggtcgggttgcattttcaagtaaggaaaactgggctccaaggccaagtttgagaaacaccgtcctgccacctctcagatgcccgcagtccctgtgagcctggtggaggctccatgagctcctgcacaaggcactgggagacttggttatactgctggggttctggattcctcccacagggtcactgaccagccctggctgcgcttctgaccataccaaagactgggggtctgaaggcttcaggctcctgctcactcctgggcatggaagtgtgtacagctcactacttaaactctttaattttgaaatttcattgaataacttttgtccagtgcaagatagacaagagccgtatctttctggagctgtctgtgcgggtgagggtgtggacagacagatgacagacaggcaacagccacagctgatggtcacacgctacagaagacacagaaggaagggtggtgctggttcagccacaagggacactatgggaacagggacctggagttgcgaagctggtggctcagagacctgtgggaggcgttacaggaagcagcagccaaggctgggctgagctgcaggcaggcaggagcctggcgtgtcgggaaacagagaagaccagcacgctggggccatggccagctgtgtaaggcatctttttagccaaggaagaaacaggtagataggactggagtaccctggtacaaaggcattttccccatttcttctagattcagcgccctataaagaccagctgtcctcgaaggaacaacccagctttctagccagtcagcagctcctgagccaggcgggccccagcaaccctcctggggcacccccagcccctttggccccctcctcccctcctgtgactgctctgccccaagatggagcagctccagccaccagcaccatgccagagccagcgtcaggaactgccagccaggcagggggtccagggacacctcaggggctgaccagtgagctcgagacgtctcagccactagcggagactcacgaggccccgcttgctgtgcagcccctcgtggtgggcctagcaccttgcactccagctccagaggctgcctcaaccagggacgccagtgccccaagggagcccctgccacctcctgcacctgagcccagcccccacagcgggaccccacagcccgccttgggtcaacctgctcccctgcttcctgccgcagtgggggccgtcagcctggccacctcccagctcccaagcccacccctggggcccaccgtccccccacagccaccctcggccctggagtcggatggggaagggccgccccccagggtgggctttgtggacagcaccatcaagagcctggacgagaagctgcggactctgctctaccaggagcacgtgcccacctcctcagcctcagctgggacccctgtggaggtgggcgacagagacttcaccctggagcccctgagaggggaccagccccgctcagaggtctgcgggggggacctggccctgcccccagtgcctaaggaggcggtctcagggcgtgtccagctgccccagcccttggtgagtagctgccttgtcccagagacactgccctgggtcaggggcc

SEQ ID NO: 42259 - DNA, 2300 bp, Homo sapien
tggcgtcaattggcagcctcctgaaagtttcctttgttctcccgttgctgccttatggacaggaggtgggggtgcttttcctggcacagagcgagtggcagggggccaggtgggggctgtctttgggtgccatctgcatggtgggcaagtgaggggcagggcccaatcgaggccgaggctctggagaggtggactaaggagccacctaaggacgggcagggctgtccagagtgtggggaggtctctgccccagcccagttgtctgcagtgagtggcgtccgacagcatggccttgaaagactggcacccatcagtttgtctggaggtctaggagccgtctgcacactggtcactggggcccaagtttaggaggggcccaagtttaggaagggcccgtggaggcctccgtgggccagggttgctccctggctctgagcaggtgccgtgtcctccagacactccagaccccaggttcccaggacagtgagtgagtcccagctctgatcgcaggtccaggctccctctggtggttcccagccggcagccggcctgtttgatggtgttcttcccagcatggcaacagccaggaattagcactgaatgtagagttccagccacaccaagagctgccagatagacacagagcagctttttgaagcacctggcttaggactgtctacatgggaccatgggccacagcccccgacaaagcctgccagggaaattggtgctcacccagtgcccctacatattggatcctagcctagcctgcatcacagacttcaggggcccctcctgcactacagaaaaccagccatacctcccctgtaaacttgagtgagccattgaggggatatcagctctgtgttcctggcagggtttcatctcagaacagagcagccagggaacagcccttcggagctgctcacccagagcccactggtctggatccctcccgctgggctccctcctttttattagaacagtaaagtctgcaacagaacaccacctcacctttccccacactagctcaggaacagacagaatggactaaaaatagttgagctaggtttccaagtccaggatgcacaactcaggccgagcttgggccaaggagctggacgacaagttgcccgctgtcccccgaggcaggaggcatgagcccttctggagaaggaaggcagacgttgccaggttttctgagtccctgcaagatcagagtcgctcctttttaggtctcccgggaacagcgctgaggagcgtgttcctgctgcggagggagtgtgctcctggcaaggggccgtgggctggagtgtagacagagcctctgtgctagtgaggctttgccgagtgaccttggggaagtctgagcctgtgcttgcccgtcccagctctgcctgcctataggataagcagggatggccgtgccttccggcccagcctgccctggggaccttgtccccaccaggctgggcactgactggctaggacattgcattcagtgtataccaggtgccctctgggtagttgggaccagtcggtttagtggtggtcccagttagaaggaggccagaaatgttccaggctgaggccttgccctaccccttgtggatactgacttgttaatgaggcggtagtgtccccagacattgaggtcagcccctagatagaaaccctcgagtcccctactcaacacttgccgctgacctcatctgaggcagccatctgagatccagacttggcctccaacctgcaaaacaatgtatctttttgcacttggaaaacctccgatgggcttcggcggccaagcccagctgtgcccagctccattccagagctcccgtggccgactcagcagggtgtcctgcctccatcagtggggctcccagaagcctgatgtttgaaagccaagcggtgtgctttgcttttttcttttttcttttcttttttctttctcttttacttttcttagaatatgcttctagagacaaacacttctccctgaagcttaggggcttggccctggcacctctgccccctcggcgaagctcgtgggagcctgcaccctctctccaggggctgccccgtttcccccggccgggtcggccctctctctgaactgctgcctgtgtctgcccctccctgcacactgacgacttttgcttagtgtggtagcgtgtcccagtgtgtgctgttctgcctaaccctgtggtcttgtgtcgtttctttttcccttgcagggtctgccctgaagcgtctctgcctaggcaaagaacacagcagtagtaattatccgggtt

SEQ ID NO: 42260 - DNA, 2300 bp, Homo sapien
ctgtatctttaaaaaaaaaaaaaagtttctgactctttaccaaaattctctatcttgtatctccttcacataatattttttagtttttgtttgctctttgtcctagtttttctttatattgccttgtcttttcttgtgactttttaaatattctgtgtaggacattgtagttgaaattgtatttgcaaaaagaatttgaggtctagtaataggtttctcattattgtttaatttgccttagagcaaattaaacaattttcatattcttatattttcatattcttatcagccgtcttttaaaaagtgcctggtcaaggatagtgaccatttaaaagttgatttgtttaactttttattattgatttgtgggagttcatcatatatcttttgtcatatacaagggggcttccaaaagttcacagaaaaatggaattaaaagataaaagtaagaaatatatggctggccatggtagctcacacctgtaatcccagcacttagggaggctgaggcaggtggattgattgagtccaggagttcaagaccagcctttgcaatatggcaaaacctcatctctacaaaaaatataaaaattagctgggctgctgggtgcagtggctcacgcttgtaatcccagcactttgggaggctgaggcgggtggatcacctgaggtcaggagttcaagactagcctggccaacatggtgaaaccctgtctctactaaaagtacaaaaaaaaaaaaaaaattagcccagcatggtggtgggcttctgtaatcccagctactcaggaggctgaggcaggagaatcgcttgaacctgggaggcagaggttgcagtgagccgagattgtgccattgcactccagcctgggcgacaagagcaaaagtccgtctcaaataaaaataaaaaaacagctgggcatggtggtgcatacctatagttacagctactaaggaggctgaggtgagaggatcgcttgagcccaggaggtcaaggctgcagtgagccgagatagtgccactgcactccagcctggcgacagagcaagaccctgtctgaaaaaaaaaaaacagctgggcatggtggcacatacctatagttacagctactaaagaagaaatacacgcttttttcttaacacaagcaccatcaagttcaagacacttataagcaatgatgccagccatttataagcaatgatgccagccatttataagcaatgatgccagccatttagtccctccctaaagacctaatggtcctgggaatttaaccatggccatggagtcttttttacattattaattgacaaaaaatgggtgccctttacagatgtttcaaaattaggaagcaaaaagaagtcagagggagccaaatcaggactgtagggtagatgcctgatgatttcccatggaaactcttgcaaaatcacccttctttggtgagaggaacgagcaggagcattgtcgtgatggagatggactctctggggaggctttcccggggggggttttgctgaagctttggctaacattccctaaacattctcatactaagcagatgttacattccttgttacccctccagaaagtcagcaagcagaatgccttaagcatcccaaaagctgttgccacaatgtgctcttgactggcccacttttgctctgatgggaccacttccagccctcagcaccattgccttgactgcacttggtcttcaggaccataccaggaaagccacgtttcatgtcgctatagttcaaagagagcttcaggatctccatcccacttgttcaaagttaccactgacagctctgctcttctctgcgcctgatgtgggcgcaatgggtttggcacccattgagtggaaagtctgctcaactttcatttttctgtcagaattgtgtaagctcaacctactgagctgtctgtggtgttggccactatttctgctgttaaccacccgtcctctgcacttacggctcagaccagatgagtgttttcctcacaaagtgatgcggatggcctgccgctgtgggctccgtcttcagcatggtctcatcccttcttaaaacaagtcaaccatttgtaaactgctattttctttggggacatggaccctgtaaacttttcagaaagcatcagtgatctcaccattcttccacccaagcttcaccatacatgtgatgttggttcttgcttggcagaattcacgttattgtgataggggctcttttcaaactgaagtcttctccttcttagtgcctcagactacctcctcttcagacatgctgcaataa

SEQ ID NO: 42261 - DNA, 2300 bp, Homo sapien
gagctcttcttggagtttttactgcacatgtcaactgggaagtcacttgacggggggttggggaggggtctgcctttatatcaaagctgaaaggggctgggcgaggtggcttatgcctgtaatcccagcactttgggaagctgaggcgggcagatcacttgaggtcaagagttcgagcctggccaacatggtgaaacccagtctctactaaaaatacaaaaattagccaggtgtggtggcaggcgcctataatcccagctacttggaaggctgaggcaggagaatttcttgaacctgggaggtggaggttgcagtgagctgagattgtgccactgcactccatcctgggtgacagagactccatctcaaaaaaaaaaaaaaaaaagctgaaaggggtgggagtacaaaaaactgggaaacacatgcctgttttgtgacttcttcaagttttgtcaccctccttcttccaatttgcctgccattatttactttccagagacctcaaggagttggcatttgttttgtttagaattcttagttttcttttcttttcttttcttttttttttttttttttttttttttttttttgagacagagtcttgctctgtcacccaggctggagtgcagtggcgccatctcagctcactgcagcctccgcctccgcctcctgggttcaagcgattctcctgcctcagcctcctgagtagctgggactacaggcgtgcaccaccatggctggctaatttttgtatttttggtagagatggggtttcaccatgttggccaggctggtctccatctcctgacctcgtgatccgcctgcctcagcctcccaaagtgctgggattacaggtgtgagccactgtgcccggcctagaattcttagttttctttgggaggctgaggcaggtggatcacctgaggtcaggagttcgagaccagcctggccaacatggtgaaaccccatctctgctaaaaatacaaaaattagcctggcgtggtggtgcatgcctgtaatcccagctactcgggaggctgaggcaggagaatcgcttgaatccaggaggcggaggttgcagtgagctgagattgtgccactgcactccagcctgagagacagaccaagactctgtcaaaaaaaaaaaaaaaaagaattcttagttttgatgagtgggagaactgaactgtgctgtgcctactccatcttgcccagcacaagaagtcccaaaacttaaaaaaatttataaaatttaaacttgaggagtagttttgcttctgtttgtaggtaatcaggtgtttgtttgtttgtttgtttgagacggagttttgttcttgttgcccaggctggaatgcaatggcgcaatctcagctcactgcaaactccgcctcccgagttaaagtgattctcctgcctcaccctcccaagtagctgggattacaggtatgtgccactatgcccagctcattttgtatttttagtagagacagggtttctccacattggtcaggctggtctcgaactcccgacctcaggtgatcaatctgctttggcctcccaaagtgctgggattacaggcgtgagccactgtgcccaaccaggtgttcttaaatataattttttatctcctttcctaccaagaggggtttttagaactgtttgcttggcaggtgaagaatctgcacgttgtggttctttattactgaatgagaaaataccagactttaccttagctttatttgttccccagttcaacggaatttaaccttagaatttcctaaagatgctttctaaaagttttttatttctctaagtgtcatagtactgcatttatgaatcccaaattggcttccactgtctatttaaacttgatataagatacaggaagattattttgtcaccaccctctttctattccaaacactatttacatgaaggaaactttagtaagagaagatattttggaaaagattttgtaaccaacttacacttgtgtctgtttttgttttttttggtttaaattcaaggggaggccaagcgtgatggctcatgcctgtaatcctaacacttcgggaggccaacacgggtggaccgcttgagctccggagttccagaggagcctgggcaacatggtgaaaccctgtctctaccaaaaatacaaaaacattgcccagatgtggtggcatgcacctgtggtcccagctatttgagaagctaaggtaggaggatggcttgagacaaggaggcagaggttgcagtgagcccagatcacaccactgcgctccagcctgggcgacaga

SEQ ID NO: 42262 - DNA, 2300 bp, Homo sapien
ccccaagatggagtcttgctctgttgcccaggctggagtacaatgatgtgttctcagctcactgcaacctccctctcccaggttcaagtgatctcctgcctcagcctctggagtagctgggattacaggtacacaccatcacacctggctaagttttgtatttttagtagagacggggtttcaccatgttggccaggccagtctcgaactcctgacttcaagtgatccacttgcctctgcctcccaaagtgcagggattacaggcatgagctaccgcgcccagcctaatatcattaattaatattttacttaggtgaggtatctaaccaccaacaataacagatgagtttccagtttttcaaacaaggtaataagagaccttaatgctgcccatgtaatcattagcagatgttgggagaccagcagactggagctaagcagggagtctgcgatcatggaagagagcaaattaatccacactagggattctaacctataatgtttacctagcaccagccctgttaattaattgtcaatttaaattacccagaagaacacacacatctgtaggcctgcttcataaatggtagatcagtaactgaccacactgcagccgtgtatcggcagttgagttttttggtcttcaggctctgctatctctccagtactatgagttatcagcagtagcagagggtaggagagctccacagagatcaatattcggactctggagaccatgacaaaatacatttcatattccaaactaatatataaactacctttttttttttcttttcagatttccagaagctgttctgtcaataacaaagtctcaaagaaaaccacaaaaccaccaacactaagatcattcttgagtccaatttgaaaaactagggtcaagttctgcagaggcattgaaaggacaagaaaccaccctgatacccatcgtgtgagggaaaatgctctattcaccattcctcagcttctgcttctggtttcagagttctctctatattggagggtgttttaaagctagagtggtctttatccacttttattaacacatctgaatgtgaaggtcaagagaggaaagtgatatgtcctaagtcagagtagagtcaacaagaaaataagacaaacagcgactgagcccctggtgtatactgggcattggccagctactggggatatggagatgaagaaaacataacccttcttcaaggagcccaacctaccaaggtagacagacatatagacaaatagatacttgcatagaaaaaaagaggaaaaggggatcagtgtgacctgtgtaactaagtaccctataaaccctcctgcaacagatcatattgccctttatagtggggatggtaatcccatctgaattccacaggtactttgcagtcataccacacccatgtgtctgtcggtcctgactgtaccatttataaacagcttcactttcagcagttctcagccctcttaagctagggtcattgtcagtagggatactgcttcataagcaccagcagaacaccaaaggagaccatatgggtgaaagcaaccagcactgccctggcgcttcataggttcttagagtttttatcttttactttcagtctaacacagcactgcctgctttttgtttttgttgcttggtttgtttttttcttaccgtgttcaccaaacttgtgtccaaatagctttgggctgatgcaaaaatatctatgtggaagagaagagttgttctcatggagggccttcagatgagtgctatagactctctaggcaactccaagaggcttctcaagcagggtgggcagtgagagctgctatggaatcaatggacaaactgacagggactgctttgaaagacagtactcagttgagtatatatattctctcttaagggctaaaagtttataatcatcccttaaacactctgtgatgggatcttcaggatcatcttttgaagtaaactatattttacaatgtgatataaatcaagtgagttttttttttaattaggaattcccgtaagtataaagccattttaagatgtacattttagagactagctattgttaagtggtctgttacatttgtgtaaaccataaagatctttccagaggaagcaagtctctcataccagaatatgaaaacactagccccaggcttgagtaacctagatcacatgaagctgacttcctctgaggagtctaggacctcagatataggtgggagcacacaatcacccttctggaaacagctaagacttgtggctcaggcgtttgaccttg

SEQ ID NO: 42263 - DNA, 2300 bp, Homo sapien
tcctgcctcagcctcccgagtagctgggactacaggtgcgcaccaccacgctcggctaatttttgtgtttttagtagagatggggttttaccatgttggctaggatggtctccatctcttgacctcgtgatctgcccgcctcggcctcccaacgtgctgggattacaggcgtgagccaccacgcccggccgcactaatgcatttttaaaaattaaaagcaagagtgtttaaagaaaaggtaaatacacggaatgcaatgctacaaatgaaaatacgagtgattaaaaactactactcctcaccttgtgaacctgccttgggttataaaagcaaatttggatatttctggattttgctcgttatttaatggctaactgtattatttcttttatttatttatttatttttgagacggaatctcgctttttgcccaggctagagagtgcagtggtgccatctccgctgactgcaacctccgcctcccgggttcaaccaattctcctgcctcagcctcccaagtagctgggattacaggcgcacacaccaccaggcccgcctaatttttgcatttttagtagagacggggtttcaccatgttggccaggctggtctcgaactcctgatctcaaatgattcacccgcctcggcctcccaaaatgctgggattacaggcgtgagccaccgcacctggcctgtattatttttagataacatgtcatcctggctttgtgactaattttatgcataggtgagtggcataacttgtcagcctgcttttaaatgtaacttcctaaaataccagcagcatttaatttatgtacgtatgatactggcttgcatttgaggtgggtatcagaaaagaaagcagaaaaatccaacttgcctttttcaccgggagtatgggggcttctttggccaaaccgtgcgcgtgcaggctccatgtgctgggcagcagctgtccggccacagcctgtcggttgcatcctgctcctctacagaggtttctccaaaaaaagaacaaatggagagatgaaggtaagtaaaagcggcactttaaaacttttagagtgctgggtttctaaatttatattctgaaagacattaatctctttttgaaaatgttttatgcaagcctaatatacatacagtatcaacctcattttagaagcagttacgacagagctttggaacagaatttacgtaaacgacctccttccagaagatgctactaaagcaacaagattcaaatccctctccctcagaagagctgggagatccactgcaaaggcgcacgtttcagtctagccattgcgcagtggtaacgcaggctttcccacgctgcaacagacctgtgctctcaagacagtctcttccgtgacgagcaggcgcttagggctacctgtaccttcagacattatggtgtgtttggccatgtcatttgtcataggtgtaaaaaccacaaccgagagcccgaagctgctgggatgagcacctgccgcggaactgcattctcgcgctccttcctgctctttccaagaagccaggcgcggccggccagcatcccgctctcccggaccccgcagtcagtgtgggcagcaggcccagagtggtgcgagccgacggcggcgttagaaaggcggcgtcccgacgaacagagtgactcggcctcggctccccttcaaagcgccatcttatcgctgcttccctcaggagcaggcgagctcttccccaggacctgcttcgcggcttcccttcgcccgagaaccaccgggcggaggcggcggcctctctggccctgccgggaacagggcgcaggggaggggagcggcggccgaccggcctgaggcgggcgaacggcctctggcctccaggcgctgcctgctccggctcagaagcctcccggatcccgtcccggcccaactccgggcctccgcctccgccgccgcctccgggagccccgagccgcgtcccgccggcgccgcctcttccgcctgctagccggcgggcctgggcggcgtccgcgccgggcgggtccgctacgtcagcgccgcccgcccgccccgccccggccctcagcctcggcctcggcctcggcctcgcagcggcggcagcggcggcggcggcaggtccctccccagacatggccctgggaggcggcagcacatggcggccgcggcggccatgagcgcgcccccgacccgccccagtcccccctagaggccgccgcccccgcccgccagcccgcccgcgcgccacggccccaccacccccggccccgccgccccccgcccgcacccgcg

SEQ ID NO: 42264 - DNA, 2300 bp, Homo sapien
gactctgccggccgcctccacccacgacttaaacaccatctcaccaattgcaaccggatcgtgggtgggacttccgctatcattttaggcttaactaccaccatctcctcgcgggcagtgggggcaaccgcgaagacagaatttcacaaactttcagctccagcagtttcaaggaaatgtcaaatgacaagatggaagaccgagtgtcaagagctaagacaacaaaaaggcccccaaaatttgttttcaagaaaaccaatgaaaaaagcaagcaatcagaacgtgaagtccaggatcatggatgtgcttatcttcacagtcactgctgggtcctgaagttctcctctggcccagtgccagctgcgaagccctctgccaaagggccagaggaggccggtgatatagagctctgattacccacccgtcagggcaccgctgaaggtcactgaatacttactgtgcacccgaaaaataaatcctgcgagttcacgcccgcgtagttcgccccctgattttgagcgactcctttcgcatgggatctacaaaaccgaactgccttaaagacctctttcacacggacgtgaagtcacagaactgacaaaatcccatcctgtcaaagtgcacgggtctttgaaatctaacacaaaaagccatagaaagattctctaaacaccctgtactaagaggaacacggacagggcactgcgttctgaagtagaggccagggcactggcccttagacacgtctcgctgtcaccgggctaacaacattggcaagggcggcggcagcagcactgatatttgcagcccccaagggctctggcgaaaccccctctattactctgtatcctgcctgcttccaagatgaacctgttgctgggaaagaacaggctaaattagaaaagggagtattttgtcaaagttgaaggtgagtgatagcctgcccgcctcaaataggatgggaaaaactaaggatattggggatgatgacactgtcgcctccgaattctggtccggggctctctcccagccctcaagtgtccccacgcggccgcggaccccgaacagggacagctggagacgggcttgggcagcgcgcggcctgcacccgcggccatccatcttgcagcccggcccggccaggctatcccgggcaagggctgggggaactcgctgcccccagcgccgccacggccgggcgacattctgcgccctgggaagggggataggggtgcggcgcggccccggtccccggcccgcccggatccccggcctcaccttgacgtggaagcggatgagcgccaggcggatgcagtgggccatgcagacgggcggcaggaaccagacctttggcggcggggtgcccttgttctggacatggctgacgatctgctgtgccgtctggcgctcgttgccctgccgcttgacccactcgtgcagccgggccttctcgagcgcgccgttgaagaagacgaagagctcgatgttgccgccgaagcaggccttggccagcgccgccaggtagccaagcatgtggttccactggccgccgctgacccagtcggtgtagaagccgccgtagaggcggtgcaggcagttgtcggcgtccaccagcaggcgcagcggggtctgcgggggccgctgccgcccgccgcccaccaggctgccccgggccagcttctgcagctccaccggcaccacggcgctcgggcagtgcttctcgatgtagtcctggaagccctgcacgcccatggcggcggcgggggcgcgggcgcgggtgcgggcggggggcggcggggccgggggtggtggggccgtggcgcgcgggcgggctggcgggcgggggcggcggcctctaggggggactggggcgggtcgggggcgcgctcatggccgccgcggccgccatgtgctgccgcctcccagggccatgtctggggagggacctgccgccgccgccgctgccgccgctgcgaggccgaggccgaggccgaggctgagggccggggcggggcgggcgggcggcgctgacgtagcggacccgcccggcgcggacgccgcccaggcccgccggctagcaggcggaagaggcggcgccggcgggacgcggctcggggctcccggaggcggcggcggaggcggaggcccggagttgggccgggacgggatccgggaggcttctgagccggagcaggcagcgcctggaggccagaggccgttcgcccgcctcaggccggtcggccgccgctcccctcccctgcgccctgttcccggcagggccagagaggccgccgcctccg

SEQ ID NO: 42265 - DNA, 2300 bp, Homo sapien
agactccatctcaaaaaaaaaaaagatttctctaagcaaaggtaacaggaaattatgcccctctgccaatttacaaaacactagaaagcaccaataagatgcttaaagtttttataaatgtctcatttactcaacattatatatactgaattgttcatgtcaattcctttgccagtggtttttacttaatcttaaaaaaattatcatatgataaaattaacacatttactttggatgaatagttctgattttaatgtatggtagcatcaccaccatcagaatacagaacagttccatcactccacaaagatctctcctgctgtcccctttatgtgtacatccttcccctcctctactctcagcaccactgaattggtccctatcactatagttttataatcatcccttttgaacctggcttctttcactcagtataaaaccttaattaaatattcatgcaagttgttacctacaccagcaattccttccttattattgctaagtagtattccatagtatggctatactgtagtttaaccattcacttattaaaggatactttgtttccacgtttgggctattatgaattaagctgctatggacatttgagtaccagtttttgcacaaacaaaagtcttcattaggaaaatacccaggagtggaattgctggatcgtatgataaatgtatgtttaactttataagaaagtgccactgttttctggagtggtggtgccattctgcattcccacaagcaatgtgtaaggatccagttgctcagcattcttgctagcacttggtattgctcatatttttttctcttttagccattctaataggcatgtagtgatatcatggttttaaacgttttaaccactttatgggtatcttttattaaatggtatacactgtttcaatcccttaaacagagaatgctgaatattaatttttatgactcaaaatcatccttatagaataaacattgtactaccctcagggaccaaggaagtacatagggttgttttccttttcttaaaatagccccagaattatgtttgctttttatagctttttaaatctctcttgtcacttcttgctattaatggtgctcctgcctctggcagactctcctcttcatcctcttctcaagctgagtttagaaaatagataaccaagcttgttagaattacatatgaaaagaggccagtccatgagtgagagagcttaaaggattcttcagtgaggaaagcaaaagcacccccctacacccgccaaccccccacatcactgtacccaaacttcctgacatcttgcttggttgctgagaaatttctagtagctaaatctcttaggcacttttcaaaaaggtaaggttgccagctaagagaccaccaagtaattgagttattacaatattcattttgtgcaattcgcactataatatgaccctaggtcaataattaaaagcttagcaaaagcaaaatacagacaaaattatcccattatcccgtgtccagaaacctaagtgaaaaagacgatcttaaatggagcttaaatctagtttcctaacactgacacattggtctgaattctgagcacctactaggtgtgcgaggcattcaaaggggtgcaaagataaagaaactgtagaattaaaaagaactcaacagttctttaaagatacagtgaccatatgcatacatactgattctaatcctaagtaatattcacagtgttcccttgaaagtcgcttgactagttaagtagagagctgtgcggttaccaaaggcaagtcagtgcagctcatcctgtcttttaagtagtcttttccatctctgaacaagactaaactatgaacacttttacgctctattagggagatggatcgcttcagacaaatggcagcaccttacttccctgagcgccccaggctccgattcagaaattaaaaggcaggcacttcctctcacccgaacttccctgaggaatggcagctgtgtgtctgccaggcgcaggggccaatcgggactctgccggccgcctccacccacgacttaaacaccatctcaccaattgcaaccggatcgtgggtgggacttccgctatcattttaggcttaactaccaccatctcctcgcgggcagtgggggcaaccgcgaagacagaatttcacaaactttcagctccagcagtttcaaggaaatgtcaaatgacaagatggaagaccgagtgtcaagagctaagacaacaaaaaggcccccaaaatttgttttcaagaaaaccaatgaaaaaagcaagcaa

SEQ ID NO: 42266 - DNA, 2300 bp, Homo sapien
tctaggtcccctgcccatgctgcatggatactcttccttggaggtcctgcccagggccagcccctcctttcaggtcttggttagaaagcctcttcttgtgagatggctttgcttccaccgtgggccagcagccccttctcacccaggcattgttcaccaccctgtgaagctgggagatgagtgctggctgtctctgaactccctgctgatggaggtgggcagggctgggctctcacctccttttagcctctgttttagttctgcccagcttccttcccaacatgtgtgaatctaaggaacaagctgacttttctagatctccttggaggagtgaaggagggtgagccaagaagggagtggtcacttactgtctcctttcattttcgtgtctcttaatagagtgtacagacttaactattaaagatgtctggaaaaaagccagtaatttctaatgattttaaaatagtttaaaaatcactgtaaatgtaaagttgtacataataaaaagatttgaggtaaagaacttggattagaaattaccatttctagaagtgagaggatgaagcaggcctaattttggatttaaaaaaaatctattctattttagctggtatacagtgtttttagattgagggataaaacagcatttcttattctaaagaatagaatgttatttgactgattggatgttgtttggtttttttcttattaagtaaaatgtttttatggaaatgtttaccgagaattcagaaagtaatttcttcttttacgtatgcatcttgaaaaggtttgctttgcctctcagtgagatttcattatagctaaccttccaacaaaatgtggcgactgcttttattatgaaagttggtgagaagtgaggtccattctacagtgatgtccagtagaattttctgacgtagtgagaatgttctgtgctgtccaattagtatgttagcttctggtctcctgtgaccactgaatacttgaacttaattttgaatttaatttaatataaactttctctcaatgtagccacacattggacagtagttttaaaaacttggggttaagggtggcacacatttttctcctccaaggccctgtggagagttaatactccattgttattggaatcacctaatttagtttaaaattctgttctcaaaattaccttatccattgtagaaacgaaaaacctgccagaattttagttggattaatgagtatgtgaaacagcaggagagaatttggtggtcttggactgtaaatcatttagaacattttttccaggtgttttggtatattttttggactagagagagcccagaggactttgacttctcaaaggtgttgcttctctgcttgctccttcgtgtgttgtggaaatccgaggtattgtggatgttacattggggattcagtagaagtaaagagggtgtcttagattttttcatcattgaaaaggcaattgatatagacctagtcttgacatagtgtgtgggacatagaataagcctgtggcagttacattgagggtgaacgtgtgcatccttgtatggtctccacgtgtgggaggccttaggaggataagaactggttgacaggtaggccgagggatcatacttttattttattttttaaattctgatgatttcacctgacacatttgatctactttgaagaaattgttttgatttcattgacagtgggtggcttctttctgtctcctttctcacagaactctttattttcttgtgtctttctccccctctctttcttgaaaatactgtcatggggtcagctggctttgtgtattttcaagcaaggtgatctttgagcttgacaagaattgaaaattgatttacagtctagatgggatcataagttactgacaggagatgatttaaatgcgatttcccacagaaatttcttagtggagcaatgtgttgcaaactttattatggcatttttttgactgtttggctttcacggatagttttcataaatgtgatttttcagcttctgtgcaaacatttctgcttattgagcttgttgctacagtgttaccctacatctgatgaagtttttttctcgtttgccaggttgcacagagcattgaggatcaccatcaggaagtgattggtttctgcagagagaatggtttccatggcttggttgcgtatgactctgattatgcactgtgcaacatcccctactatttcagtgcccatgccctaaaactgagccggaacgggaaaagtctcaccacaagccaatatctgatgcatgaagttgccaag

SEQ ID NO: 42267 - DNA, 2300 bp, Homo sapien
caaggttttttcttgatgcgagccaggatcgaagggctatggtgtttaaagcttgcgagctgaaggcccttggaaggcaggaacctcagataaattgtagtctgtaagattcctggtcgttctctggggggagtcaacaatgatctgtgcttcactcccagcgtctgttgaccatgcttggctctcaggaggccggaccaaggacagcgtttgcactcctggtctcaccacgcccagtgttggcttagggaacctcttgtgaatgcagccatggacatttgcttttcagagaacgagagtgaaggtttggggaatgtttctgtccttacctatattggcagtaggcagtgtgagaggtggtggttcttgggttgtgttccccttgcctggtgttttcctctgatttcatactgctataaagaactgcctgagactggataatttatgaaggaaagaggtttaattgactcacagttcagcatggctggggaggcctcaggaaacttagcatcatggcagaagttgaaggggaagcaaggcaccttcttaacaaggcagcggtaagaagtgtcgagtgaagggggaagagccccttatacaaccatcagatcttgtgagaactcattcactatcattagaagaacatgggagaaactgcccctatgatccaattacctccacctagtctctctgcctagacacgtggggattatggggattataattcaagatgagatttgggtggggatgtgcagcctaaccatatcaactggtgttcagatgaagaggttgtagaagcatatctactgcttaaagagggaaattggagtcagcaagctctgggcttggttttcttccacatttaaaacaaacccaaggaagagatggtgcagccgtgcaagcccctggtggatctgttgtgtctcacacaggttttctattttctctgtgtcttcagcagtgtgcatcttacttaaaccgcctcagggctcctttcatccccaggcccagtcctcagcttgacacatcataggccctcagcacctaagtgttctgagagggagtgcagctcctagaggtccatgtcccatgtcctcctgcttcctgcatatcatttgggccccagtcggtccttgttactgcgggtcttgtgctgtctctggaacagccctttatgggcaccatctactcactcattcacttctgttggctgacgtggcccctgagctctcttcctgtgcttagttaggccgcgcgaggccagaggttgagtggggaggcttccagcccctgccttctgtcccagcttcaggctggcctggttccatgtcctgctgtcctgcttcagccattcctctatgtggctttcagtcctctcacagatttcttcatttttgcaaggtagcgtgggaatgatgactagcacatggcagcacacatcaggcaggtttatgaaattatgttttaagagaacacagaatcacaaattactcatcctgtatatgtgttaaaatgtgtaacctaattgctgaacaatgaaaagcaattccttttatatttaaaaactcactagttagctgagaacctaatggtagttgcaatgtactttaaatagaaaagtcctcttgcttgacaaaggtaaaggaaactgttcggtccgactttgttcctttcatgcctgccagggcttctggtttcacggagacctcaggctaggagcagccctgagcagggagactgagttacagagaatccccaccaagttgcaggcagagggacagccgaggccctcaggaagtacacgagagcagaaccactatggcaagttcactgagaaatctggaaagttagaatcccagcccgagtccatcaaatggagcatcataaaattaagttttccttactgtgaaatggcaatttgtaatgatttctgagaagtgggacccatggtggtgtcgatgtctgagccaggtgagggtgagatccctggcgccatgggctggcccccaggatgccctggaaaacgcattctgttcacagctgtgtgattcttttctttctgtgttggtgaagcagccagacccggtccgtttggaatgcctgggatggtgccgccgcatgttcctcctcagatgctcaacattccgcagacctctctgcaagcaaagcccgtggtaaggccttccctgcgttgggtcgggtggcgggtctcagacagggtgcgtgcattgaatttcaacgaatgctaaaataagttcctaacctcttgaattgatacgtgaaatagatgccagtgtttg

SEQ ID NO: 42268 - DNA, 2300 bp, Homo sapien
cccagggcactgtcctggtaaaagcatttgctaaatgttggctaactactgtcactgtttgtaaacaggctaataggagtgttaagggatggggggatgcccacatcagggcagcctcccctgcatcacagcagcctctagaagtttccagcttcatttgggcactgctcacctgactactttagtactgctgtaagggtgagggagagtgtatctatcaaggaagtgggcaccactcacctgaaacccgccttttgggctctcaaccttcaggctgagcattctatctacataatagtagacaatggcttaagagttacttctttcccagaacttcagtatgtaaaaaaaaaaaaaaaaaaaaaattccaggctttcacccaggaggaagggaaccagtgacaaccggaattcaggtaggaaggcctattgcaggccatcctggccagtccagaggtgtgggagctgggggtctcctgctctttcctctccctctatggccagctacttctccccccgcccccttccccagtgcccagtgctttgggcactgccctgagtctgtatccacggggtcacttgttgggggtgggtggctgactctgagggtagattttggctcagtaggaggaaggaccttaattgagccgcctgcggtggagcaaacggccccttggcagctgcaggtgggcggtgatggtgaggggctgaggggctaaggagccttgtcatggatgctgctaggagactgagccaggtttcctgtccggagattctggaattccgagcaggggtggcccacatttcccagcacgatgcggattttgctgagggaggatggggagagaaagagggtgagggaggaagggcgggcagggatgtggcccctgcccagcgcggatgccccaaggatgcagcgctggcgaggcagggaagtcctcctctagaacgcgtgcaagtgacccctcagagcgcacctccgcttctcctccccaccgtgggggctcagttccctggacacgggggccagggttcccatactcctcgccccttaggtcacgggcctggggggctcaaatgccagggagctctctcttgacagagctgaccagcccggccccttaggtcacgggcctggggggctcaaatgccagggaacagagctgaccagcccgtgccagcgcactcccggcccgggcttctgtcctcttcctctggggctgagcatcagggaagtccgcgggatcctgcgagggaggcggcagtccccagccgaaaatgaggggaaagaggaagtggtgtcccaaccagaaactcagtggggaacggagggaggcagcgcggccgaggaggaggaacacccccaccgtggtgggggtcagaagaaagttagggccaagtatttgcttgtcggccttctagactaggaaggctctcctgcgggctccactcccgcaccccgcgtctctccttctgccttgcccgggttcccccaacttatcttatcctcggggtcccgcccaccttctccccggggtcccaccccactttcagtctcaaggctcccccagctcaccttcgcgcccgcggacccctgggtctaccttcagccttgggggcccttctcggcctatcttccaccttcgagatccccccacccgccttctcccccggcagggtccccccggccgtcttctcccccggcagggtcccccaacccaccttctcccccgcagggttccccagcccgccttcccggcggcgggagcggcggcccaggccggcgggcggaggcggcgccacccggggcgctgacgtagaggccgctcggcggccgggggtcccttcggtggggccgcggctccccgcccgccgcccccgcgcgtccattcccttttgtgtcccgcgcgcggcccgtcccccgcgcacactagcgccctgagccccgcgggccggcgggcggctcccggcgcggcccctccagccagcgcgcccggcattgtgtggacgcgcctggccgggagcgcgcgcgggggctgtcgtgcgcccccgtccccgtcccctcccggccgcggcgccgcctgcgccccgccgcccccgccgcccccgcgcggcccggcccccggcccggcccggaccgacccgggcagcgcagcggcggggccgagcggcggcgcggcgcggcaacatggcgacggtgcccgtgtactgcgtctgccggctcccctacgacgttacccgcttcatgatcgagtgcgacgcctgcaaggactggttccacggcaggtgagcgcgcggcg

SEQ ID NO: 42269 - DNA, 2300 bp, Homo sapien
ggcagaggtggcacccaagagggccacctggtggaggaggcatggtggttttccagaaggggatgtctagtttaggtttcctagccagatgagcagttgccaggggacaaagaagccctgggtcctccctggggccaagacattgaggttgaaacctgaaggtagatgaggtgtctgtgcagaaacaacagggagaatgccattggaggggagggggttcaggggtgaggacaagagcagggtggccctgatagtctgagcccctgtggacagtgaagagatgggcccagccctgaagacccactctgactagaggatcttaggtctgggcttcagggaccatgaacccctgaagcaccattgagtgtgagtttctgccaggaggaggtcgttatctgcttcctgggggccaggaaacttcagggccggcatcacaggggtgtagtgggacgcttttgtgttctctttctcagggcaagcatgaatgaatgcatgagcaaatgaatggatggctaaatggctggatgaatgggtgaatgaatgaataggtggatgaatggatggatgaatggatgaacagacggatggatgaatgaatgaatcagtgaatggctggatagatggatggttgaatggattaacgaatggatgaatagatgaatgaatagatggctacatgaacgaattgatggatgggtggatggatggatgaataaatggatggatgggtgaatgggtggatggatggatggaaggacgaataaatgaatgggtgggtagatgaatggaataatgaatgaatgggtagatgaatggatgaatggatggatggatggaataatgaagggatggatggatgagtgggtagatggatggatgagtgcataagatggatgggtagatggatagatgaatggatgcatgggtggatagatgaaagaatggttggatggttgggtggatggatggattgatgaataaatggatggatggatgagcaaatggatggatggatggaatggatgggtagatggatagatgaatgaaaaaatggatggatggatgaataaatggatagatgaatggatggaaaggtggatgaacaaacaaatggatgggtggataaatgaatggatggatgggtagatgatgaatgaatcaacaaatggtgagtggatggatgagtggatggatggttgggtggatgaatggatggatgaacaaatgggtgggtggatgaataaatggatgaatgaatggatggatggatggatggatagacagaggaatgaatagatggatggatgaatgaatgggtgagcagatacatggatggatagatgaacaaatggatgggtggataggtgggtgaatggactgatcgatggataaatgaatggatgggtagatggatgaatgggtggatgattgagtgagtggatgggtggatgaattaatgaatgaacaaatggatggatggatgaatggatgagtggatggggagatggataaatggatgagtggatggatggatggaaggatagatgaaaaaatggatggatggataaatggatgggtagatggataaataaatggatgagtggatggatgaatgggtgggtggatgaatgggatgaacgaatggatggatgggtgggcggatggatggatggatggatggatggatggatggatggatgaacaaatgcatggtgcatggatggatgaatgaacgaatgggtgagtggatggatggattggtggatgaatgaacgggatgaatgaatggatgaatgggttggcagatgaatgaacggatggatggatgaacgaatgaatgaataaatggatggatggatgggtgggtgaatgggtacatcgatgggtgggtgaatggatgcgtggatgggtagatggatggaggcttgagctgcaagcacatgggccagaagaagacagggaatctgtggctcaagagagttccaccagccctctatgtctgcctctgggtcacagcagcccttttttctaggccacaaagagtgtcctgagtgtgcccaacaaagatgtggttcacatgcagaatgatgtggagaggctggaaattcgagagcaaaccaagagcaagtcagaggccaagtggaagtacaaggtgagaagtgcacatatgcatgcacacgtgtgtgtgtcagcttggtgagtgtgagcagaggtgaatctgtgaggccctgtgtgtgtgaaggaatgtgcagacatgtgtctgcttgtcctgagtaggtagtgctgtggggtgtgcttac

SEQ ID NO: 42270 - DNA, 2300 bp, Homo sapien
aggagtttgtgcaggccataggctgttgtttaagtgcctgggctgcaggccaagagcactgggctgagtgcctgtctctctgtgcccctagccagcccccggcctcccccagcacacaggaagccattcagggaatgctgtccatggccaacctgcaggcctccgactcctgcctgcagaccacgtggggagctggccaggccaaggggagctcgctggctgcccatggtgcccggaagaatgggggtggcagtggcaagagtgcaggcaaacgactgctgaagagggctgccaagaacagtgtcgacctggacgactacgaggaagagcaggaccacctggatgcctgcttcaaggactcagactacggtgagtgtcactcctgcgtggggcagggcccatgctcagccctagaaggcctggctgagaatggagacagtagcataaacatgcagctctccaagttacagcaggcctcagctcagcaaaaccctcggcctctgactgctgtccccggagaccctcctgtgagcgagactggccggggcccacatctggtggacaggcttgggcttcgtggtggggcctactctagtttgacaaacagaatgacagcaaagtgaactcctgttttctgggctctggaggtgtgtggcaccgggcgccatcttgcttcctcctgaaccttgggtcctgggcattcctcgacaggccccggaggttgaaggaccacaacctgcagtgagtgtagggtggcacttggcttttgagggtcacagggtcaccgcctcaccgtgttggggcagctccccaccagccacaggtcatgccctacagtgtcccctccacctagacccgccaggcagggtgggggctgtcagagcccaccctccatggacgttagacgttttcccttttcatagcaacggaaggagttgtgaggagttttcaccaaacagaacctttcctggagcctcaaagtgtttctcttgcaggaactgagatgccctagtttgattatggggtcccatccttccctggttccccactctctgctgtagcttcctccaggtggggcctctggggatctcaagctccatgaacagatgtacggagggcagcccttagaggccaggggcttgcaggcactggggctaggctgcacagatgaggctgggcaggtagatgcaggtgccttcttgtctggagagtccctgcccctctggataatctctggggcctgtgcccatgcctggggtgtcctcaccatgggcagcttccatcacagctgacagtgacacagcgtggcaggccttagtgtaggccctggggttgctggcgaggaaggtctgcagccacctgtacccccccgccctcctccgtggacctgccctgcactcagcgggccacgccttccctctgcctccctctagtttacccctcactggagtcagatgaagacaaccccatctttaagtcccggtcgaagaaaaggaaaggctcagacgacgctccctacagcccaacaggtagtgctgggacaggggtagggggtccacctgacacccagtgtggaagctgtgactttgtctgtggtccctccagcccctgagaatgtgggctcagctctgcacctgtcctatcctgagggctgggcagcccgtcccgctggggttggtcagctgcttgcaggagtgccgtgggcttcacttctgctttgcttctgggggcctgggagcccagatgtgcttctacacagccccaactcaaaagccctcactcctctggctggctcctctctggtttcttcctcaatgggcagctctgtgagggtcacctttgtaccggaggcacccacttgatggtggctgagggacacctgctggggcagccagtggggtgaggccttgtccaccttccacattaccctcacccgcctgcccagactctgatgttgctgggcctcctgggctctgccccatgcaaaccccactgtggcatcttcccccttgggtggggcagctgaccctgccctattgtgaggcggcttcacagccaggaatccctgtgcttaggcctgcctggccagggggacaggctggggtgggggcagggtagccccaaaccaggaggggtggacaggctgtggcctacagcttgagggggctggcccttcttttccacagcaagggtcggcccatcggtgccaagacaggacaggcctgtgcgtgagggtacacgggtggcttccatcgagaccgggctggcggctgctgcagctaagttgtcccagcaggtga

SEQ ID NO: 42271 - DNA, 2300 bp, Homo sapien
cggccggcctctttcacgtggccccctcctttttggcctcccttccgcctccctcccttctgggtccctccctccggctcagcctaggggttgggggcggcggcgcggggcggggcggggcggggcggtgacgcggggctggccgggcaagaggcgcggcggcgtggggagggggcgcagtcccgggttcgaccggccgagccccgcgcgccccgcccgcgccctgcgcctccgcccggccggccggcgggggagggggcatgagccggcgcccgcgcgccgccccgagctgcgggccggcctagagccccgcgcgggccccgcgccggagccaagccgtcgccgccgccgccgccaaaccgcgggcgcagcagtgggcgccgcgatgcagcggccgggggagccgggcgccgcgcgcttcggcccgcccgagggctgcgcggaccaccggccgcaccgctatcgcagcttcatgattgaggagatcctcacggagccacccgggcccaagggcgccgcgcccgcagccgccgctgccgcggcgggcgagctgctgaagttcggcgtgcaggcgctgctggcggcgcggcccttccacagccacctgggtacgtgtggcggccgcggggtcgcgggccgggcttggcgggagacagcgagctgaaccgcgggggcgccccgagcctcctccggcatcgaagcagccccgggaagctgctctgggagcgcaggttctgggaccgtctctcggagccctccaggcgggaggcggagggtgcaagctccaggcctcacagaaaccaggcctcgtgcccgcgggccgcccggggagggtgttcgctctttccttcactgcttcccttcggcctccagcccggggaccccgagtgagcatccccagtgcaggcgcactgccaggctacggactctcgtgggtggaagcgacctcaggccacgggcgcctgggcttcgccgcagagggatggccgggagtggccgcggctgcccaacccagggaagtcggacctctggggaggaggcctgcgctcccgagggctgggtgctgacgcgggcccaagccggcccggagtccccgggagctccagcgggcgaggaacgcggccttggccgcagtgcggacctgcttcggccttgccttggggccagaggcctgactgtgagcagctgcctggctgtcccttctggtttcaggtcggctgggcctctgcagggcttgaacggcctgcgcagaccttttcagcttctgccctttcttctaatttggcggggcctgctctgccctgatggtgctgtctccatcgcactccaccctcgtcttgtctttccctatctcgctttccaaccgtctgccggtcggcctccctcgcttctctcattggggtcggcctgcctcccatctcccaccttttccctacgggtcctctgccccacatttacctgcgccttgccctgccctttccgactccagccaggctaggactcgcacctcagtgacaggcctgtcggggaagggaggctcctacgctgtagccgggaccccagcccttcaagtcgccttccctgcacccccccacctcctagtcggtgctccctagcctggagacggcagggccagcgcgctccttctaagtccagctgggactcggccattcggctacctttcgtctccatctgctctgttgctactaattcgtttgaagcgggcacacaatcattttaggactgaagaaaatggaaacatctgcatggggaagcgtctgaaaatagaaaacgtgaacaataatttccaggttctcagggtactttggaatttccgggaagcacccaactccggcccagatgactcctggccaccgcatggctgttgtgccacgcacggaagagcaaatgtgcacgctccgtgcatgttctttttctaacgcagcaaggctgatttggttggagcaaacgccatcttcttaggaccagctgccgttttctttttggtttctactttccccgaaagacaagacacactccgagtttctcgcagctgcaaacatgttcatcaggaaccccgagatctcagaggcagctgaggcctggggaactccaggacagaacacggacagggtcgaggagatactccctcccaaatctggggaacggcaacgttgaggagggtctccatctgcgccaccggcgccgaccggcagggcgtggaggttttgcgctgggaggcactggccaagcgcgagcacccccgcggcacgtggtgcggcagtccctggggcagagga

SEQ ID NO: 42272 - DNA, 2300 bp, Homo sapien
ttcacgttttctattttcagacgcttccccatgcagatgtttccattttcttcagtcctaaaatgattgtgtgcccgcttcaaacgaattagtagcaacagagcagatggagacgaaaggtagccgaatggccgagtcccagctggacttagaaggagcgcgctggccctgccgtctccaggctagggagcaccgactaggaggtgggggggtgcagggaaggcgacttgaagggctggggtcccggctacagcgtaggagcctcccttccccgacaggcctgtcactgaggtgcgagtcctagcctggctggagtcggaaagggcagggcaaggcgcaggtaaatgtggggcagaggacccgtagggaaaaggtgggagatgggaggcaggccgaccccaatgagagaagcgagggaggccgaccggcagacggttggaaagcgagatagggaaagacaagacgagggtggagtgcgatggagacagcaccatcagggcagagcaggccccgccaaattagaagaaagggcagaagctgaaaaggtctgcgcaggccgttcaagccctgcagaggcccagccgacctgaaaccagaagggacagccaggcagctgctcacagtcaggcctctggccccaaggcaaggccgaagcaggtccgcactgcggccaaggccgcgttcctcgcccgctggagctcccggggactccgggccggcttgggcccgcgtcagcacccagccctcgggagcgcaggcctcctccccagaggtccgacttccctgggttgggcagccgcggccactcccggccatccctctgcggcgaagcccaggcgcccgtggcctgaggtcgcttccacccacgagagtccgtagcctggcagtgcgcctgcactggggatgctcactcggggtccccgggctggaggccgaagggaagcagtgaaggaaagagcgaacaccctccccgggcggcccgcgggcacgaggcctggtttctgtgaggcctggagcttgcaccctccgcctcccgcctggagggctccgagagacggtcccagaacctgcgctcccagagcagcttcccggggctgcttcgatgccggaggaggctcggggcgcccccgcggttcagctcgctgtctcccgccaagcccggcccgcgaccccgcggccgccacacgtacccaggtggctgtggaagggccgcgccgccagcagcgcctgcacgccgaacttcagcagctcgcccgccgcggcagcggcggctgcgggcgcggcgcccttgggcccgggtggctccgtgaggatctcctcaatcatgaagctgcgatagcggtgcggccggtggtccgcgcagccctcgggcgggccgaagcgcgcggcgcccggctcccccggccgctgcatcgcggcgcccactgctgcgcccgcggtttggcggcggcggcggcgacggcttggctccggcgcggggcccgcgcggggctctaggccggcccgcagctcggggcggcgcgcgggcgccggctcatgccccctcccccgccggccggccgggcggaggcgcagggcgcgggcggggcgcgcggggctcggccggtcgaacccgggactgcgccccctccccacgccgccgcgcctcttgcccggccagccccgcgtcaccgccccgccccgccccgccccgcgccgccgcccccaacccctaggctgagccggagggagggacccagaagggagggaggcggaagggaggccaaaaaggagggggccacgtgaaagaggccggccgaccgagaccgagggagactgagcggagcgcacgccctggaaggagagagccggagagttcgggaggcaagacccccagagacgagagtcggagggatcaaacgacacaggtgagagaaggggcagaggcagacggcgtgggccaaacaagattccagacagtgatgtgagggcaccagagacgccaccgagatgtgcgcagagagaccaaaagaggcgtgagagccagcgggctgtgacgtgacggagggcacagaggcaggcggggcagaggaagggggcggtaaagaaatgggaacagctagaaaaccggcggcttgatcggcttttaggtagccccggaaaggtcgggaggaggaggggcaaaggccgcgctcctcagctgggaaggaggtggtctcaagcagcctccagtcccgggctcaacaccgccaacccggcaagggtgaggcagcgttcagggatgcaaggggcagagcggtagcggcacctgtgcacccctc

SEQ ID NO: 42273 - DNA, 2300 bp, Homo sapien
tcatctagggagggttctctgagtctacccgttgatagggggagcctgactgggctgccccagcctcccaggagacactggcttgtttctatttgccaggtaggatgtcagtggctgcttggccaacagcgacagggccagcttcctggtctcttggtctctcaggaggaggcctgctcagtgtgggatactgttgctcttagtgcgcccctctccaccctttccaaagaaccatgtaggctcacagcaccactctccgagggagtccgaagcaactggcggccattgaggccaccttctttcagtcccaatggtaactctgagttcagaaagtcatgcaacaactgggaaggagagacagtgggctcttgggactgggatcttaccagagtaaggtagtctttgtcctcactccaggccctacagacaaaggatctgggccacttcctagtccccacctgccccccacccccactcccgagtctggggcaggtgccagggactgagggccagcctgaaggcctccccaccagcagctggagctggagaaaggacttcaacttgggtggggggcatggctgtaggtgtggtaagccctagttacctgaggtaaagactgaggccccacatggagctcacagaggaagtccgggtggcccaggacacccccagtgcatcaggcgctgactggcaatggtggatggggctaggaggtaggccctgtgattcctgagaaggaggagggcagatgctcctcccccaacctcctggggacacttctcccctcttgcctggaggaactgttttctctccaaacagacctaagggctcccagggtgcaggaccctcggagtgcaggaccccctcactgagttctcacagtctctctggagccaaaggtcagcatctcctcaggacaggtaaggaaacaggcccagaaagggtcagtggtttcaccagtagtggcaggaccaaagagaggagttcagcgtagggtagctttggggttgttcactccacggcttgggcttatactcttctaaggatggaaagaaagatctagagaaggtactgccaacttcctccaccatgttggagcttttgaggctccgcaatggagccaggtcccaccagagtttggtctttacactctcagagcacccactggccccctggccccaactccgcccagtaacagtttcttgatgccccaaagctgggaaaaggcaaagctgcatccttcccttctcctcgaatccttttccttttctaactagggggatgtaaccagcctacagtcttctgggggctgtcaaggaggatgtgtccatggatcacttgaatttccaattcaagcaaatctcggctggagaacatttttctctcagggcagcccggagagaaatgaggccgtacatggtaaactgaggcagaggtgggaggggtgcacaggtgccgctaccgctctgccccttgcatccctgaacgctgcctcacccttgccgggttggcggtgttgagcccgggactggaggctgcttgagaccacctccttcccagctgaggagcgcggcctttgcccctcctcctcccgacctttccggggctacctaaaagccgatcaagccgccggttttctagctgttcccatttctttaccgcccccttcctctgccccgcctgcctctgtgccctccgtcacgtcacagcccgctggctctcacgcctcttttggtctctctgcgcacatctcggtggcgtctctggtgccctcacatcactgtctggaatcttgtttggcccacgccgtctgcctctgccccttctctcacctgtgtcgtttgatccctccgactctcgtctctgggggtcttgcctcccgaactctccggctctctccttccagggcgtgcgctccgctcagtctccctcggtctcggtcggccggcctctttcacgtggccccctcctttttggcctcccttccgcctccctcccttctgggtccctccctccggctcagcctaggggttgggggcggcggcgcggggcggggcggggcggggcggtgacgcggggctggccgggcaagaggcgcggcggcgtggggagggggcgcagtcccgggttcgaccggccgagccccgcgcgccccgcccgcgccctgcgcctccgcccggccggccggcgggggagggggcatgagccggcgcccgcgcgccgccccgagctgcgggccggcctagagccccgcgcgggccccgcgccggagccaagccgtcgccgccgccgccgccaaa

SEQ ID NO: 42274 - DNA, 2300 bp, Homo sapien
tccctctgcttggactgccattccacttacttagcttgatccgctcaagcttgattttcaagactcaggtcaatcaccatttctttagaaagtcttctctaacgaaaatccctctttttccctctctccagccaggttggatactcttctcatgtctcccacaccgcccaaataccgttatcatgatgtgttctaattgtttttatacttgtctgtctccccatagactgtgggcagggtaacgtctaattcaccttggaattgttaatgcttagtgcagcacaagtatacacaagacattgtttattaaatgtatgaaaccaatccattacttttttttttttttttgagatggagtcttgctctgtggcccaggctggagtgcagtggtgcgatctccactcactgcaacctctgccccctgggttcaagcaattctcctgcctcagcctccctagtagctgggattacaggcgtgcactaccacgcctggctaatttttgtatttttagtagagacgaggtttctccatgttggccaggctggtctcaaattcctgacctcatgtgatccgcccacctcagcctcccaaagtgctggaattacaggcttgagccacaatgcccagtctccattacttattaacaagcccaagtatgggcactgttctctgtaggacagtgctgagaaataccaagtcaacgttttcaaatgtcttttcatctgctgcttactaaaacaaattttttacatcattaccatactggtgtttagatgtcacactatttttgcattggtgtattatatggggcccgcttcctgagccacagggcagtatggtagcttcatcttgtttgttgattcctgtcagctttaggcagagtggcctttgtggactcggtacagaaaattacattcttaggtccatgtgcttgcaactctgcagccaactggtatcagaccatctggtcaatctaacagcctctctgcattcacagtttgtcaccatttctatcttccagtgtcatctgcaacatggggctagtaatgcctacctagagggattaaatgtgaaaatatatgtaaagtatccagtatagggtctgccacagagtatgtatttgcctagtgagttgttctgcacatgcaggggaaggacttacttctactgagccatgagacccaagaccacttgcgagggtgaaaaaacaagatgcagcagattgctagttgcttaatcaaattcattcttcccttcattttggaaagatttttaagggcatcaatgtgccaagttaagattacagtttccagctctgagaggtcatgatactaaattcgagtctgtaagatgtagttagaaggttttgtgtgggacttccagaaaggccctttctaaaataaggatgtgatggctggagctccaactaccattttggcccataaggcaaattggtggacacaagccaggtgtagggatgacagagccgaacgaccttaggtaccttcctcccactttcttttatgggagaggggaaaagcccctcgtgggtttaggatactggaatctgggggttcctgttacacgcaggcaaaccccgtcagccactctgtaaactgctgggccttgctctcacccagattctgctcctcggatttctctgaaccacctggggccgcgacgaaccacctggggccgcgacgccgtaagagttgggacgataggaccagtagaagcaggaggaacaacacaggaagcgcgcccggagaggcggccagtcgctgggttccgtccgcggtgctccagggctctcctggctcttcctccattcactcttctcgaccctgtggccggggagcgcttgcagccagctccgccgccgtccttcttggctcgcgccgtcccctagccgtcctcacgccgtccccttacttagggtcccctttccgcacccgcgccatcccctcagcgtccctcacggttccctcaccgcccgcgcccgttcgaaaatgcccagagccaccgctctcgtcacggtccgcttcaggcctccattggccagcacacgtcacgtgcggcgtgtggcggctgacattggcgggcgggcgcgctgagggcagcgccggggacgcggcctcagcaggggcgccccgccacggggagcagcccaggcgctcgccccaggacgttgtccggcgggctgggctgggacccctctgcctccagggcgcgtcgggagcagcagggatcggtgccgcgccgtgagggtgcgcagaggctgccctcgggcccgctaccc

SEQ ID NO: 42275 - DNA, 2300 bp, Homo sapien
atcttgagtatagaaggaaattactagttcttggtgttctagatctcacttttcagtgttttacctgcccacttatagaaattaaggaagaaaagactcagtactcactggtacattttagtgggtttctttgttgtgtttattgtaactgatttcatatttgtcatgatcagtatctcattttgttccttaaatattattctaaatttggttctcgtgtccagaggtgggtacatttcttttcatctgcctcatcaatgcaaggtatattcacagcacctcattgttgggaacactgagcaagcatgcagaaagggctgctttcaccttgcagaatcctgtttgcgttaggcttgacttccttagacattgacacagggtcactgactgtacggtaactggggtaagctcagtcattttgtgtttatttgaggtcaacccagggctcaagatttcaccacagagattattcttgaggtgatctataaaccatcccttccttagcttggtccaaataagtcctacccctaccccttatctaatgaaattagttgtcatttttagtgtagttgaaagcagttacttttgacttttctctgtagatgtcctcagatgctggttctccaggccatggacttgtttctgcagagctcaccactcttgtttctcaagagctaagttaacattctggagtgccacatactcagaagcacagacttgcccagaaatcttcttagactccctcttacacagatagcaaatacacagctccttagtttgagcatttagggcctcctgccagtaagttcatgttcttgtcatgcagacctctgtgcaactgctgtttctgtgttgcccttagggtcctgagggccttgcctagaataatcctcatataattcctccgacaggaaagctgtgctttcttccatggctgcattctaaataacaaaggcatgatactatacatagagtaggaatttggacaccaaatcgggattctgtgtccctgtcttattcgacaaaagtgcacattactggggagatgggggcggcattttaaaaggagcttggtatagcattagtaatcgttaaaaaaaaaaaaatagaaaatagccttatctgtagcagtacagtagtttgtttctgtgcacacacatctgaaataccacttgtgcagagagctagcgagcaagcgagggcgcagcctgacattaacaagggaggaggcggacaatgagtacattagtggttgttgcactttctgttttctttatatcctttatcttcaagttgcaacctccccctcatctagttcctttaaaaatgtgatatttagtgatctttctttgtatgcctctgccaagacattattgaagcttcttttttccctcactgcaacaaaaggcagagaatggtgttttgagtttttgagaggcatggctactataactgtccaacagaggcataactaagaattgggtttttatattctgaaaatgaacacatgaagttaaatgtcttctgataatatatcacctctaaaaatgtctttatttgttctatccaagtatttctttaatagttttaccaagaaaaaatagaagtggttttggttatgaaaaattggatgatattttaataatcttgtaaggtgtccagcatatcccactttattacaattaacttttttctgcactattcaaacgaggagtagaaaggtaatttttttcaaaatatccagagacaggttgtgaacagaataacagaatttaagccttttaacatgtatgtaaaaggcagtttttgcatcaggaagacagttttctaaattcactacagtattttggggagtaattctttggttagatattttaagtgcatttgagaaacaaaatttagtaatcaatatatttaaaatttatattattcttccctatatttgaacaatttgtccaaaatgcaatctgttcatattggattttgcctgttcagatctaagtgggaatcagtagtttctttgtttgtcgccatggaaaccagtcagccaatctgaatggctcttagatcatacagaacgatgcaatgctccctgctctcagtgaaagttcctcactgagtgagtggggctgactcttcctgcctccggctcttgcctcccagtgccatgcaggtgcaggatgcaaccaggcggccctcagccgtgcgcttcctcagctcctttctccagggccgccggcactccacctcagacccagtactgcggctgcagcaggcccggcggggctctggcttgggct

SEQ ID NO: 42276 - DNA, 2300 bp, Homo sapien
gcctcagtctcagtgtagatctgtgtacttttcattagtgtttgtactttcattaatttcctgtatgttgattttcttttccttttcttttttcctagtttacttctacaatttcggatggaaggattatggtgtagcgtctcttactactatcctagatatggtgaaggtgatgacatttgccttacaggaaggaaaagtagctatccattgtcatgcagggcttggtcgaacaggtaggtcctaagaggtggtttattgcctgtaggcatatttaaacataaaaggaataagatttcctaatttgagggtaaatgtttctcagaatcctatcaaagctttggagtcaggtggaagaagggaataagttctagtgttctgtaccactgtagggtgtctatagttaaaatgatatatagtttcaaatagctagaaggaggatattgaatgttcccaacacaaatgcatgataaatgttgaagattatgcgtatactaaatacactgatctgatcactatacattatatgtattaaaacatcactatataccccatagatatgtataattattatgttaacattaaaaattaaatcaaaaaaaattttaagatatttgaaataccgtaaacaggtagttacaatgaccgtatatatatcattttaaagtctttagcaacaatgtgagttggagaaactgcaatttgagagaagtaatttgctacatttagtaagtgccagggccacactttaaatccatggttgtctgactccagagttcatgtgctttccatttttggaggtataaggattttgtttgtgaagaagagtctatctgtgcccagaattctattaaaaagtcagtgattttacttaaaacattcagctgaatttcattacagtgctgatattggggcaaaaatgaaggccgtagggctgaaattttcattgtcatctgatccaaccacatgcagctcagctctgtccgcagtgtacctgtgctcctgccaggggatctgccacatacctggaagcatgcgcaggggaggggactcagctctgcttgagattagtagctcttaggatcaagccaaaatctcactgtttctagacattgacatgatagctctgcagacattttacatttatactaagatcttctgtgtcctagtgagaaaggtatgttgttaccgactgtgaactggagagcatgcagttttcagaggttctgattttcatatgtaacaagatgttcacaaacttggggatcacacaggtgtatttgatttgccttttactttaatattaattgactgttatatttgaattaatttattaattattaccttttaactagtaataaccttactagttattccttttaattagatgttagtaagaatacctaatgtttataccactaagcctggcttccttaagattgcttaattttccataattgcttatggaaaaatagaattatatcatggtctgaaggaaaacacatattagtataggcacaatctggaaaaagaattgccaagaagaaaagtaggctgcaaatatgaataatccctaaagaagaaactgccgtggtagggagagtgccaagctgggatgtgccagcagttgatggcaaagatagcagggtgggaggttccaaacacaaagtgtatggattgattggatggaaattctcaagaactgttcagagtggaaaatagaaacaggatttgctttcttctgatggagttaagtagaacaaggaggatagatgggccagatgatcagtttcccttccctcctgcacacttactcacctaccttgtgcctgtgctggcacagctctgggctactgagatgactcagtcatggggaggcggtgccacatagacatttaataaagttctgtgcagtaaggaacgtgcaaaataacacctctacaaaaagtcacaaagttatcatcataattgtccttaaaatgtgtctctatttatatggtttcttaacacatattcaaattgtaaatcatcaaagagtgataaataaaataaataaaaatgtaagcttttctcataccagtcttctcttcttcactgtttaggtgttttaatagcctgttacttagtttttgcaacgagaatgactgctgaccaagcaattatatttgtgcgggcaaagcgacccaattccatacaaaccagaggacagctcctctgtgtaagggaatttactcagtttctaactcctctccgcaatatattctcttgctgtgatcccaaagcacatgctgtcaccttac

SEQ ID NO: 42277 - DNA, 2300 bp, Homo sapien
cactgtttctagacattgacatgatagctctgcagacattttacatttatactaagatcttctgtgtcctagtgagaaaggtatgttgttaccgactgtgaactggagagcatgcagttttcagaggttctgattttcatatgtaacaagatgttcacaaacttggggatcacacaggtgtatttgatttgccttttactttaatattaattgactgttatatttgaattaatttattaattattaccttttaactagtaataaccttactagttattccttttaattagatgttagtaagaatacctaatgtttataccactaagcctggcttccttaagattgcttaattttccataattgcttatggaaaaatagaattatatcatggtctgaaggaaaacacatattagtataggcacaatctggaaaaagaattgccaagaagaaaagtaggctgcaaatatgaataatccctaaagaagaaactgccgtggtagggagagtgccaagctgggatgtgccagcagttgatggcaaagatagcagggtgggaggttccaaacacaaagtgtatggattgattggatggaaattctcaagaactgttcagagtggaaaatagaaacaggatttgctttcttctgatggagttaagtagaacaaggaggatagatgggccagatgatcagtttcccttccctcctgcacacttactcacctaccttgtgcctgtgctggcacagctctgggctactgagatgactcagtcatggggaggcggtgccacatagacatttaataaagttctgtgcagtaaggaacgtgcaaaataacacctctacaaaaagtcacaaagttatcatcataattgtccttaaaatgtgtctctatttatatggtttcttaacacatattcaaattgtaaatcatcaaagagtgataaataaaataaataaaaatgtaagcttttctcataccagtcttctcttcttcactgtttaggtgttttaatagcctgttacttagtttttgcaacgagaatgactgctgaccaagcaattatatttgtgcgggcaaagcgacccaattccatacaaaccagaggacagctcctctgtgtaagggaatttactcagtttctaactcctctccgcaatatattctcttgctgtgatcccaaagcacatgctgtcaccttacctcaatatctaattcgccagcgtcatctgcttcatggttatgaggcacgacttctgaaacacgtgccaaaaattatccacctagtttgcaaattgctgctggacttagcggagaacaggccagtgatgatgaaggatgtgtccgaaggacctggtctctctgctgaaatagaaaagacaatgtctgagatggtcaccatgcagctggataaagagttactgaggcatgacagtgatgtgtccaacccgcctaaccccactgcagtggcagcagattttgacaatcgaggcatgattttctccaatgagcaacagtttgaccctctttggaaaaggcggaatgttgagtgccttcaacccctgactcatctgaaaaggcggctcagctacagtgactcagatttaaagagggccgagaacctcctggagcaaggggagactccacagacagtgcctgcccagatcttggttggccacaagcccaggcagcagaagctcataagccattgttacatcccacagtctccagaaccagacttacacaaggaagccttggttcgcagcacactttctttctggagtcagtcaaagtttggaggcctggaaggactcaaagataatgggtcaccaattttccatggaaggatcattccaaaggaagcacagcagagtggagctttctctgcagatgtttcaggctcacacagccctggggagccagtttcacccagctttgcaaatgtccataaggatccaaaccctgctcaccagcaagtgtctcactgtcagtgtaaaactcatggtgttgggagccctggctctgtcaggcagaacagcaggacaccccgaagccctctggactgtggctccagtcccaaagcacagttcttggttgaacatgaaacccaggacagtaaagatctgtctgaagcagcttcacactctgcattacagtctgaattgagtgctgaggcaagaagaatactggcggccaaagccctagcaaatttaaatgaatctgtagaaaaggaggaactaaaaaggaaggtagaaatgtggcaggtattattagtacttaatttaattatagatatgtgg

SEQ ID NO: 42278 - DNA, 2300 bp, Homo sapien
agtaagagtcatcctggggcaaactgctctccagctgtgagcctgtgaaatcaaacaaattatatacttccaaaatacaatggtggaacagccataggacagacattcccattccaaaagggagcaatagaaaagaaggaaggagtaagagctcccaggtaagtccaaaaccaacaggagaaacattaaatcttttttttttatttcaattttttttgagacagtgtcttgccctgtcacccaggctggagagcagtgtgtatgatcatagcttgctgcaaccatgaacttctgggctcaagcaatcttcctgccttagcctctcctgtagctaggactacacgtctgtcccattctgccgagctatttttttttttcatttttgtagacatggggtctcactatgttgcccaggctggtttcaaactcctgcctcaagcactcctccctcctgggcttcccagtggattgggattacaggcacaagccactgtgcccagcccaacattaaatcttgaagcatgagaataatctttgactccatgtcccaccttccaggtacactgggatggaggttaggtccccgtggcctcgggcaggcccacccacatggctttgctgggtacagcccatgcttcagctcccatgcactgaaatagtctgcccgcagctttcccagactggcactgtatgctggtgcttatacacttctggggtttctggagcagccccactcctatgactccactaggcactgccctagtgggggctctctgcagagactttgtccttgcagcagttctctgcctgggcccactgaggcattctttgaaatctaggtgaaggaagccagcctccactgctcttgtactctgcacacctgcagaattaagcaccacatggatgtgccaaggctcactgcttgcaccctccagagtagtggccctacctggacctgggcctgcttgaatcagagctggggtagccaaggagcactgtgccagagtgcagggtgcagagacccaaggtggccctcagcagtgagcaaacaggtcccatgggcaccctgggcccctcctcaaaattcatctgtccccaagaccctagcactctggccttttgatgggcatggttgccccctccccttgtaccaagatgtccataatatctttggggtcattctcccattgtcttgataaatagcacatagctttctcatatccatactaatcttatcaaatggtggcctggccacaccgtgtgctatcttctaaacacactttttctttttttttttgaggtgaagtctcgttctgttgtgcaggctggagtgcagtgacgcaatctccgttcactgcaacttccacctcctgggttcaagtgattctcatgcctcagcctcccgagtagctgggattacaggtgcttgccacaatgtctggctaatttttttttgtagttttagtagagatggggtttcaccatgttggccaggttggtctcgaactcctgacctcaagtgatctacccacctcggcctcccaaagtgctggaaatacaggtgtgagccgccgtgcccggccctaaacatcctttttttttttttttttgagatggaggctcactctgtcactcaggctggagtgcagtggcgccaacccagctcactgcaacctctgcctcccaggttcaagtgattctcctacctcaggctaccaagtagctgggattacaggcgcctgctaccacacccggctaactttggtatttttagtagagatggtgtttcaccatgttggccagtctggtctcaaactcctgacctcaagtgatccacccgcctcagcctcccaaaatgctgggattataggcatgagccatcacaaccggcctacatacttttttattctttacatggctggactgaaaattgtccaaatctttttcattctttacatggctggaccaagaaatgtccaaatctttatgttctgcttccctttgaattataaattgtctttaaatcatttctcttctcccattttaacatgttaacataagcagttaagagaaaccacacaggggaggagccaagatggccgaataggaacagctccggtctacagctcccagcgtgagcgacgcagaagacgggtgatttctgcatttccatctgaggtaccgggttcatctcactagggagtgccagacagtgtgcgcaggccagtgtgtgtgcgcaccgtgcgcgagccgaagcagggcgaggcattgcctcacctgggaagcgcaaggggtcaggg

SEQ ID NO: 42279 - DNA, 2300 bp, Homo sapien
gagcttctgtttaagtgggctaaatctacaaatacttaccatattagaaatttaaaaaaattaaataacgaaaatagctgggcatggtggctcatacctgcaaccccagaactttggaaggctgaggcaggaggatcacttgagcccaggagttcgacaccagtctagccaacatagcgagtcctcatctctatgaaatttaaaaaattagcgaggtgtggtggcggcgcatgcctgtggtcccagctacttggaaggctgaggtgggatgatggcttgaacccaggacttagaggctgcagtgagctatgattacaccacagcactccagccttggcaacagagggagaccctgtctaaaaaaaaaaaagagtaaaataaaatagctaaaataaagctattgcatgttaatattttatttaaaaaaatacattattccaaacaaaaatggggagaagagtggcactgttttatgtgtttgcaagtctctttaatgtctctggcctaatagaagtagattttcatatctgcttctgccttcattctgtgctgatatatatttatttttggttgaagtatatgatgacaagacagcctcatccaaatttgtagttggaaaagggggcattttaaaacagcccttttaggtaattatggatattcatctttgacaccacaccaaaatttaataaatactggtttcttaaaggttaactgcactgtggcatctgaatactagtcaatacatttttctcgttacatttaaatccattaacttatttttcacattgaatatatatctttacccacacttaattttgttttctgttttttgttttggtttacaaatgatactattagactactcaaaaggtaataggcaaatcatttttatgaaaagctgctcttttatttatttatttatttgagacagagtctagctctgtagtcgggctggaatgcagtggcatgatcttggctcactgcaacctccgcctcccgagttcaagccattctcctgcctcagcctcctgagtagctgggaatacgtgccgccacgcccagctaatttctgtactttttatatttttagtggagactgggtttcaccatgttggccaggatggtctcgctcctgacctggtgatcccctgcctcggcctcccaaagtgctgggattacaggcatgagccactgctcctggccagaaagctgctctttttaaaattcattaatattttaaattgccaaatcataattgtatacatctatggggtataatgtgatgttttaatataggtatacaacatgggattattaaatcaaacaaattaacatatcatcactttatctttttttgtgcagagacatctgaaatttactgttattttttatttatttgtttgaggcagagtgttgctgtcacgcaggctggagtgcagtggtgcaattttggctcactgcaacctccacctcccttgttcaagcgattctcatgcctcaacctcccaagtagtagctgggaatacaggtatgtgccaccatgccgagttaatttttatgtttttagtagagataggatttcagcatgttggccaggctggtctcgaactcctgacatcaggtgatcctcctgcctcggtctctcaaagtgctagtgtgtctggagttggttccttctggtgggtttgtgatctcactgacttaaagaatgaagccacagactttgacggtgagtgttacagctcttaaagaccagcagggacccaacgagtgagctgtagcaaggtttattgtgaagagtgaaagaacaaagtttccacaccacggaaacggacccccagggcattgccgctgctggctgtggggaggggggcagccagcttttattcccttatttgtcccctcccatgttccgttttgtcctatcagagcgcccttttttcaatcctccctgcaattggctacttttaggatcctgctgattggtgtgttttacagagtgctgattggtgcgttttacagagcgctgattggtgcattttataatcctcttgctaactacagagcactgattggtgtgttttacaatcctcttgtaagacagaaaagttctccaagtccccactcgacccaggaagtccagctggcttcgcctctcactggaattacaggtgtgagccactgcacccagccaactgtgttgttttgaaatatttaacatattgttgactataggcaccctgttgggcaatagatcacaaaagttattcctccttttatgaaactttctacccttt

SEQ ID NO: 42280 - DNA, 2300 bp, Homo sapien
ttaactaatacctgaggaagaggactctctgcacatctctggcgctctctctccctttctgtactctgccctgtgaactctagatgcatatgcctcctcagattcccagttccatctcctcaagttgaactccatgcttcacttgagtttcccttctctgtgctatgacttggaaattctctccatctgcgggaagttcaaaggctcacctccatgatttccactgctcttcattgtctgatgtcaaatgtcttcaaatgtttcatatattttgtccttttaaatgttgattaaggtgaagggctaaatctggttcctgttacttcattttgagaagaagcaaataggaagtaacttaaaaataccactttttatcaaattcttagaaaaagagtataactcattttgcaaagactttggtatgtttttgagcgtattattctgttacatctaataaacaatctttgcattagtaagataactttaattgctatagtgttaaatgtcctcaagtttagtttttccttatcttcttgtaatcaattggaattaaaaaaaaaacttcagaatcttcttctttataacaggaaaaaaaaccccagtatttttggcatttttagaagtacattcatacacactgtcatttaaaacatgggggtgggaggtggagcaagatggtggaatggaaggctccactgatcattcccccttgtaagaaaaacaagttaacaactatttacacacaaaagcaccttcacaagaaccaaaaatcaggtaagcactcgcagtacctggtttttacttcatatgactgaaagaggcactgaaaaggtaggaaagacagtcttgaatcaccaatgcccctgacccatcccccagcagtggctctgtggtgcggagagagaatctatgttcttgggagacggcaagcacagcaatgatgagacattgcattgaactcagtgctgccctgttataccagaaagcaaaactggatcaaacacagctgattctcacgcatggagggagtatttacaccagccttagcccgaggagaatcacctatcccagcagttggaatttgagttactgccaatctcaccacctctggctagagggccctaaataaactcgaaaggcagcctgggccacaaggacggctcacgcctgtaatcccagcactttgggagcctgaagtgggaaaattgcttgaggccaggagttccagaccagcctggtcaacatagcgagacccagattcttttttttttttttcccccttgagaaggaatctcactctgttgtccaggctggagtacagtggtgcgatcttggctcactgcaacctccacctcccgagttcaaagtgattctcctgcctcaccctcctgagtagccgggactacaggcgcccatcacgacgcccaggtaatttttgtatttttagtagagacgggattttaccacattggccaggctgctctcgaactcctgacctctgatccgcccgcctcagcctcccaaagtgctgggattacaggcgtgagccaccgcgcccggccgcgagacccagattctaaaaaacaaaacaaaaaattagcccggtgtggtgctatgcacctgtattcccagctactcagaaagttgaggtgagaggattgcttggccaggggtttgaggctgcagtgagctatgatcacaccattgtactgcagcctggccgacagagcaagaccccttctcaaaaaataagtaagtagataaagttcaggggtgtacaatcacaggtgtgaatttgcaggatggaggacatgtaacatctttttaaaaaaaaaaaaaattagaaggaccgtataaaaagttaaagaagacttactgctcacctgaccacccttctcatagacccgaaagttagattttactttctgatttttcacaatttctcctggatgctgcggtcccgcccctcgcagcattctggatgttgtagtccctcgctccagggcatccacggtagggtagttgcgcgccccgtggcagtctgggtagtgtagttccgtgcccaggggcagtccggctcgcgtacttccgcgttccggcatcgtcgcctggtgcgtggtgagtgtcctttcacagttctggtgagctagcccggaggtggtccccgctttcgcgggccttccactggaaggaaggtcgggaaagctggcatgggcagtccatgtcgtggccacatgttccttggtgttttgagtttcggctgtggggtctgggcgtgcgtggtccaccccggagagagg

SEQ ID NO: 42281 - DNA, 2300 bp, Homo sapien
ggattataggcgtgatccatcgcaccaggccgattggtgtctctttaattctctttttattctataagatctataagagctctttttattgtattttttctactgtgtttttagtgctatccatttgttgaaagtgttgcatttttaaaaagttgcaaacatgttagttcacaccacagaacgtttgtatcatttcttaatgactgtttcctccatatccagaatatcatgatcacactgttgacaaaaagagtcaagctccgtaaaatattttcagagatttattgtgagccaaatatgagtgaccatggcccgtgacacagccctcaggaggtcctgagaacatgtacccaaggtgatcggtgtacagcttggttttatatattttagggaagtatgaaacataaatacatttaagaaatacgttggtttggttcagaaagacgggacaactcaaagtaggggggcggattccaggctataggtaaatttaaacattttctggttgacggttgacaattggttgagtttatctgaagacctgggatcaacagaaaggaaatgttcaggttaagataaaggattgtggagaccaagttttattgtgcagaggaagctctcagatagcagacttcagagagagcaggttgtaaaatatttcttatcagacttaaaaggctgcctggctcttagttgattatatctcttgtatctgggaaggaaggaaggaaaacaaaggggaaaggggattctctatagaatatggatttttcccacaagagactttgtagggcaatttcaaggtatggcaagtaaatatactttggggtaatacattttgattttcttccttgttatgccagagtcagattggaaagtaagtcatgatatacagggttaaataaaacacatctgatgagaatttatggtttgtagggcacgactccccaggccccttagataggaattttggcaagatttagaaaaatcagggccgggcacggtggctcacgcttgtaatcccagcactttgggaggccgaggcgggcggatcacgaggtcaggagatcgagaccatcctggctaacacagtgaaaccccgtctctactaaaaatacaaaaaaattagccgggcgtgatggcgggcgcctgtagtcccagctactcgggaggctgaggcaggagaatggcgtgaacccgggaggcggagcttgcagtgagccgagattgcgccactgcactcccgcctgggccacagagcgagactccgactcaaaaaaaaaaagaaaaaagaaaaatcagagctttgttctcaaaacctaacaccattaacaataattctcatcacatattgaattgtctcttgtagtctgcttttctcattcatttgtgcaagacaggatccagtcaagacctatacttgtcatctgaagtatgatttatctcttaagaaatattttcattaagaaaaaatctacccctacttctcgcttcttaaaaatctctttatgaaattgactcgttataaaactaggtcagttactgactgcctgttcctaaattccaagtcacatttcaaattttgggacctaatttttgatatgtgagtggagggaagggtgcagccagagtcacatagaaggaaactcaggttatggcctccaccctgcttcatgtctccctcaaaaccaggaacttctgctttggacttcctggaacctgtcctttggcctcacagtaaatatggatgggatgcttttgttttcagtatgatgaggcattttattttttaacatgaatgctcacttgagggcactctgaggcctttttcttttaatggagtccacacaaagtctcacccagctgctggaagatgggggcttcattccctaactagagtttggatgtaagcctgttgctggcccagctctgtgggctttttttatgagacactggctaagaatgggcttcaccgatgccctctgcaacctgtctttgttgcttccctgttcctctactccctactgaattgggaggctggacagagtgtgaagggtgttcttcccaagtacctctctcacttctcatctctttccccagatttgcctctgcaacttgactctcctctaggaagagtactccagagagcagggatatgtcaccaggactcctgacaaccaggaaggaggtaagtcctgaaatttcttcctagctattgcaggaaggtttcataatcttttcttgtcctgaaggctgccttcttggtgttaggcaaagcctatcttgatcttgtaggcgtg

SEQ ID NO: 42282 - DNA, 2300 bp, Homo sapien
catgtgctgtatcccttattccccttggctagagactgcatgaggtcctagtgaacagggatgagttccagacaactctgcctcacctggcctgtggcccaagaacccctggttcttcgttggtccctatgttcagttactgggagctcaaaggagaaggaccagagatgggctccctgtcccactatttagtgtaacatgactagcagctgtgaaaatccctggccgggcgcggtggctcacgcctgtaatcccagcactttgggagaccaaggcatgtggatcacgaggtcaggagttcaagaccagcctgaccaatatggtgaaaccccgtctctactaaaaatacaaaaattggctgggcatggtggcgggcgcctgtaatcccagctactcaggaggctgaggcaggagaagtgcttgaacctgggaggcagaggttgcagtgagctgagatcgcaccactgcactccagcctgggtgacagagcgagactccgtctcaaaaaaaaaaaaaaagaaaaaaaagaaaatccctagacacctcccctgatagccctgctgctcaccatttgctggctgtgttctagtcatgtgcagctgttgctggctacacaatgacaatatctcaggggactccaccactgcttctcagatctgctccctgggaactgagcttcctgagtggcagctgggaccactgagcactgaggaatgggtggcctgaatctgacccctatttaacacttgtgtgggtggtgccaggacaatcacttgcatgctgggcgtgatgtgttatgggttatcttcagggttcctagggcactggcttgggtgagtttccatccagtggttttcttttttttttttttttttttttttgagacggagtctcgctctgtcacccgggctggaatgaagtggcacgatctcggctcactgcagcctctgcctcctcggttcaagcaattctcctgtctcagcctcctgagtagctgggattacaggcacgcaccatcagctaatttttgtattttagtagagacggggtttcaccacgttggccagactggtcttcaactcctgacctcaggtgatccacccgcctgggcctcccaaagcgctgggatgacaggcatgaaccagcacgcccggcctatccagtggttttcttttgttgtgttgagctaggaaagaaaggggtttacaagagcttcagggaaaggaagactgaagaggagatggggccataatattcggaaacttctggtttcctgtcggccttctgaatgccgagcactgccctggggtaggcccctcacctgctgctgagcacactgagagccaccaagccaccgagagactcatccctgacccatggcttgggagatgcctgtgaggctggtgcagtctgccagggacacccgagggagaccctcagagacagcaaaggcttggctgtttcttcttggcagacaagggtcagggagtcttggtgactggcgccaggctctctagtggagcgactctgccgtggaggaacagagcatctgatgcacactcagggacacttgcaagctgcagagtttccctgtcacatgccctcagctgttgggactcccctgattccccagtgactagtgtggacctggagacgccagctcattcacctctttcctttgtctccacagcatacccagtgctgggacccggcgtgaccgtgaaccctggcacctccctgtctgtgttcacggctctgccctttgccacacccgctcccggcccagcacacaggccgcccctcgtgactgcagtggttcctccagccggccctctggtgctctctgccttccccagcacccctctagtggcaggacaggatggccgcggcccgagtggggccggggcttccaacgtctttgtccagatgaggacagaagtggggcctgtgaagccccctcaggcacagaccttgatcctaactcaggcccccctcgtctggcaggctccaggcaccctctgtggaggtgtcatgtgtccacctcccctactcctggcagctgctcctggggtgcccgttacctctgcccaggtggttgggggcacccaggcctgtgagggaggctggtcccatggccttcctcttccaccaccaccaccggctgcccaggtggcccccatcgtgtccccagggaacgctaggccatggccacaaggggctcatggagagggcagcctggctccctcccaggccaaggcccggccggacgactcctgtaaacccaagagtgtctatgagaa

SEQ ID NO: 42283 - DNA, 2300 bp, Homo sapien
agcaaggatgctaaccaccaatgtcccatccccattctcatgcatccccttgcatgtgtgaatcctggttggagtctctcagctcgttgctgtcctcatcttcatcacaagtgtcatcacatgtggttctcagcatgggaattattgtagcctgtctttaaaaaaatcttcattctcattttcacacagaattgctgtttatcagcgtcaaaatgacaggaaagagcactcatgttctgtgttgtgaacaaggggagtgttaggaaactggtcaaaggagatgaggagtgagtactcagagcacagcaagaaaatctgagacacagatgtcactccctgctgggcagcagtcttttgcactgatgggtgggtgttggggaagggaagaggccttcagccggaccagtgcacactgtgaacattcactgaaacacaccctgttggcacttaagaagcatttgcccctttcaaagacatttggactcaagaaggcagagttgcagaaaacgtaacgggccacactgcaggggcaggcagtggattgcaagtctcaagcccagggttctcccctccttgcctgggttgtgtgaaaaagtcatttcctaactcctatccgatatcctcatgagttctcggttttgtcccaactctaaaactgaatggtccagcgagcatttctatgaaatgcctccacagtggccactgggaggggagtgacctccacacagtgactgcctgtctggatgctcccaggccttttgtcctccgagacagagctgcctccttacatgcagccctcttctgctgtgcaactctacctcgatcttagctgagaagatcagcggagagcaattcaagcaaaatcatggtaaacttaccaaaaccaaaccaaacaaacagtaaatgctttggagatctttctgaggacgcgatcttttatcacggggcaaaaacttaaatgattttcaatcagtaacttcatctaagagggatgttgaggcaaaatatcacactcaggcactgaagaagggcagaattcttgtttgcttcctcccttgtcaagttagtcagtcaatgctttctcaagatgctcacacatggctttgatacaggatttgaatgagtctttttctgagccactgatacaaaaagtatattgtggaagtgtcttgtttcaattctgcaatcgcttctgtatgtgtttgaagtcctagaccccaggaggagagacaatcaaattagccaaaggtaatttgtgaagactggccatagaaggtggtggctaaaagtcctctggcccctgctctctgagcatgcccacagaaagtcctgggccacactgactgctgagaaacatcatctcagggcttggatcccctgttcagaggacagatgctcttccacccaatcactgaacagtagaggaatggcggctccatgctgtgtctggcagagctctcagtctctgcacttgagaccctaggccgtcatagacgtgaaggctcttcagtgtcatcacgtggagacagacggtaggaatcctgcaaatgagcagaaaggatctgatgatgaaagtttgttctgaagctactacaaactcaagtcagtgagttgcttctgtactagctttttttttttttttttttgagatggagtcttgctcccaccttgaagtgcagtggtgtgatctcctctcactgcagcctccgcctcctgggttcaagcaattctgcctcagcctcccaagtaactgggactacaagtgcgcgccaccacgcctggctaatttttgtaattttggtagagacgggattgcaccatattggccaggctggtctcgaacccccaacctcaggtgatctacccgcctcagcctccaaaagtgctgggattacaggcgtgagccaccgcgcccggtcagactctctcgtttctaggagggacggtcttggaggctccaaggagaaggcgtcgcctggccccaggaagcgccctggtgcagcgtccctccatttccccatctcctgcggggccctcccagggcgggctccacgcctgccctgcgcgcctgcgcaggagccttgaggcgggcggggttccagcgcgcagccggccgccctcaaccgctcccagcatcggttgccggtggttcggggcagggagacgacgcagcgcgagcggaaagggcggttacccaacggccttagctctcatggcgtcctccgtggtgttacctaaaaataaagttatttgtgattagaaggtaatcgcctcctggtcatgcttccgctggtcaacag

SEQ ID NO: 42284 - DNA, 2300 bp, Homo sapien
ctccagaggaattttctgctagaggtattgagattttctcagtctactggggttacttaacttgtagtaagcctacgattgcaaaaactgtcctgcttactacattgagacaccttactaagaattggtgagagaacccagatgacactgtatgaacaactccttccctgtgtccatctagctatgcctgaagctaaacttacccacagcttcttttatataaagtattaataataatccttcttttgtacgaggaagctctcttctttcatttgcctattaaactttcccctccttcacccacccatgtgtgcccatgtccttaatcttcttggtgcaagatgatgaactgcaggtatttccccagacaatgaagctgcttcactttgagtccctcctcttatcagtttacctatgtctgctgtcctgggttaatcagttggtggctgataggggattggaatctgttcctttttctttccaattatgtgaacgtggagacttctgtaagttgattttctctgaaaagttctattcaattcaccaaacgtatttgaaaaccagtgtttaccaggccctgtgataggcaccacgggtacagagataagaagaaatgtcatccttctgaccttaatctcaattttgaatccagtagagaagatagacaaataacaagtgatttaatggagtgctgaaattataatagaagagctaagagactagatagaggaggaggtgcttctctcccagggttgggaagaatcactagcagtttccaggctccaagtgtgggatggatgtgcgtgcaaaggcctgttggcacgcaggaacattgtatgtccagaaaactggaagtatcgcatgcagccacagcagaggatgtgtgtcaggagccgggttttggagtgtcctatttatgtgatgtgctgaggaatttttaagatgtatcatgaaaattcagatacacaaaagaatagtgtgatgaatacctgtgtactcatcacctatttcattattcatcagcatttttctactcttgtccatccctgctctccccaccctgctgcttatctgtagcattgaaatgaaggtggccagccaacagagtgactggcaaatagtgggcaagcagtgaatgtgagttccttgacttcctttgcttctgtgtggtgttatctatgtcagactctcttccccttagtttcaactgtagttgttgttcaggttggattatctccttcttcctaaactcatcaggcagagagaactttactttgatcgacaaagttgacaaagaatctagttttcttttgatcattaagcatatgtacactcctcttctttatccctgtgaggccctggggatagtatatggtgtacattcatttgggtgtcattgtaccagttaatgcagttttgtgcagaattgatatgccatatatatttattaaagtgattcaaatttctagcttcttcccgtatgcttggtgtgtgttcgtcttaagggtcaaatgtgggtatatatatatcatgtcatcgctcttttctaatttcttctggaaaacaagcttttttacttcttccttccctttctgatagaacatttacatttttggttataattttattttagattttattttaattagacaacagttttgctcttgttgcccagcctagagtacaaaggcgtgatcttggttcactgcagcctctgcctctcgggttcaagtgattctcctgcctcagcctcctgagtagctgggattacaggcgtctgccaccacgcccggctagttttttgtaattttgtatttttagtagagacgaggtttcaccatgttggccagactggtcttgaactcctgacctcaagtgatccacccgcctcggccttccaaagtgctgggattacaggcatgagccaccacgccaggcctaattttatttttttagttgtagtttgtatttaatgtttcaaagtattattctgttttgggggcagtacaatgaattagagctaatgcatttagaaaatatgaattacaggtaattgagggatcagattataaaactaacctttgctttggtttcctctccagggcctgctctcttttttgagtgccccactcattggtgccctgtctgatgtgtgggggaggaagccctttctcctcggcactgtattctttacctgcttcccaatcccactgatgaggatcagcccatggtgagtgacttggcccttcacctcctgactgcttgttttgagtcacatgtaaattatacttatatttgca

SEQ ID NO: 42285 - DNA, 2300 bp, Homo sapien
atcgctgtggggcactgacacaaacatagtttatatcataataggcgggagtcactttaaaatataccataataaggctgatagcctattttaaataataatgtgaatttgagttcgttttttttttttttttggagacggagtcttgccctgttgactaggctggagtgcagtggcacgatcttggcttactgcaacctccgcctcccaggttcaagcaattctcctgcctcagcctcctgagtagctgggactacagacgcccggctaatttttgtatttttagtagggatggggtctcaccatattggtgaggcttcccttgaactgactcctggttatccacctgcctcggcctcccaaagtgctgggattacaggcgtgagccacagtgcgcagcccaatttttttttttttttctttgtataaatcgggagagtatttagcatgtgaccaaagcccatttagttaccaaaggtgggttggaatttgcatgtgagccgtaacttagttgttttttttggataacagaagatggtattttggtatgtattcctattgcagagatgctctttcttatgtgaagaacacacttacatatggaagttttgttttggtttttaatcctattaatagatttttttttttttttagctcgtgtgaaaatattttcatttgattatttggtaggaattttatgctaacacctatcacattctaaatttattgggtacttataatcattttattttctacgagttgaagaattttttggtattgagtctttatgtccaagatgtcatgcttttccaatgagttgggactttttaatgtcctttttttggcttaatattttttctttagatcttatacatttcttaagttttgttcctataaattttatcctttttgttctgctacaacatgagctcttctaattgcttggttttctaggtatattaatgtcatctgtaaataattttttctttttccttccagttttcatactgctcactgcttttgctaattgctttgactaatgaatattagtaaatcaaagtgaagattttgggcttattttcttcatatatataaagggagtattgtaatgtttcatcattaggtgttaagctggtttttagactgaaaaatattcctattgtatccacagatttttaaaaaacattaagagtacatgtcagattttatttgatgactttatagcattaatggatattatttgccttttctcttatttttttttttgagacggagtctctctctgtcgcccaggctggagtgcagtggcgcgatcttggctcactgcaagctccgcctcccgggttcacaccattctcctgcctcagcctcctgagtagctgggactacaggcgcccaccaccacgcccggctaagtttttgcatttttagtagagacagggtttcaccatgttagccaggatggtctcaatctcctgacctcgtgatccgcccaccttttctctttagagctactaaaatgaataattatattaatagatttttaaatattaaaatatttttctatcctggagtaaaccccactttttgttctataaggtttttctttgttaattttaaactgggtttttaaaaaaagcatctatcacatgatataaatttttagtcttaagtacactaatatttttcattatgacttctgcttttatgtagatcttttcaaatcatttgttgtatgtcttttccttacttacagctaggatatttgagaagttttttttctgtctgttggctacctttaaaaatataacttttacctaatccccttattctttgtttttcctcttcttttgtttttttagggggcatgtactgaccccctttgaacaatgatgaaattagaatgtttctacttcttcctgtcttaacttaaattttttttgatatatttaagtatacatacatatacaagtatacttatttcttggtgcgtaatctttacatgatgtctttggctcaggtaatgaaagtgaacatacactccctttcccttgggtcattaaaataatctttttataggtggtattttgcgatgatttctgtgtctggagtcttctcggtcacgttttctgttatatttgcctatgtagctgatgtcactcaggagcacgagcgaagtacagcttatggatgggtaagataatagactatatatattttttaaccagaatagtaattaacattgtattagaaatttactggaaagtgagtttattagtcctttcttgcactgctgtaaa

SEQ ID NO: 42286 - DNA, 2300 bp, Homo sapien
agtagtgagggacagctttcttctacagcatgggaaatacctgttgagatactcatttttctgcaatatttgatttttgtttctcgctttcagctgggaaacccttcacacagctgttgtgctgagcagtagtgctttcaggaaagatttaagagagttctaaccagaagcgcctgtgacttaattaccctctccagctcagctcctcattgtataatggcagttagggttaatatctactcacaggggcattgagagcaatcagtgagcgcacacatccagactgagacggcacttagctgaagtgtgctcccagccagcagaagcaactcagcatgcaaggctgcctggattgcagtctacctatcttctagatataggagaatttattgccaattaattacagaacgtgtcagtcaagttctaaggagcattttgagacccattaaagaacagtataaaaatgtgtacaccttccttactcagacttcttcagtaaaccaagaaagtggtaattctttcagggctacggcaatgattagtcatgttaataagtgagttaacacttactaagagtttgttgtggggaagtcattctttagatttattcatcagagttgtattgaatgttaagtgaaagaggagtttagataaaaacacagactaagcaagtaggctactttaggctttaagatagacacattttgcatagagtttcatgaggccatagaccctttaacacctgaagatgctgcagcagtgcccccttaacacctgagaagagtgtaggaatgttcccataactgtttgcttgtcgttgcagtttataatgcagttatttggttgccctgatattcttgaataaagtgggaaaacctgagggcaagagctttgtcttcttcatctggtacatagtagattctcagtaaatattgaacaaaggattcctattccccacattggaattttccacattcttttttcccctccaaaaatacttgagttttagcttttatagtacttttagtataatactaatttcagatatactgtgttttttaattcagttgggagatgatggatgaaaaagaattttttattgccagaaattttgggatttttaataaaatccattagaagtttaaaaagctaacttatagatatgcatttgacatttagtgtggttataatttggagtttgcccgataagcatctgaccatccagattgtgttctaaaataaagtggacattccacatgcttataggagtgcactgtgaaggggctcaaggtggcttcaggttgtgggtgtgcttagctggctctgtggtctctatactggatagggtcaggtggtgacagagagacagaaatctacagctgtctagtcaaaaagcttcaacttccacctcaacaaattctttgttgttgttaatagtttttttctaagaatagcagagggttccccctgaccccaggcagtgctaatgaaatgaccaccaaatgataaaatgttcaaacagtgcagtgtttttagaagattaaatcaagcacagtacttgagtagtttgtaagttttatcatcagccctgcaggaattcttttcataccatctcacatccccggtccccagttaaagaagaccaaagagctaatgttttatttgtggggaaggtttttacaatttttgtttgtaataagataatccttttttactcttgtagctctgcagggtatctccagttaatagtttatgaacacattcttaaatcactttaattctctttcattcttaaaatttatatgcaacacatttcttttgtcttacttaaagccagggaagcatggctgcaggtatgcacctgtgggaccctggttgagtgtgctttcctgaaggtgtgcacctgcagcaggcagacctgggtaaggatatgctttccccagaggtgttcacctatgggaccctgggtgagagtgtgctttcccacaggtctcagccacctttgcggctagtcttgtcagcagcccggccattggagcatatctttctgccagttacggagacagcctcgttgtgctggtggccacagtggtggctcttctggacatctgcttcatcttagtggctgttccagaatctctgcctgagaaaatgagaccggtttcctggggagctcagatttcttggaaacaagcagacccttttgcggtaaataaaaatatggaaatatttactttcctaaatgtctttctaagccaagcaaatgaaagtatgtatgtgcagcctcaaggatcctagca

SEQ ID NO: 42287 - DNA, 2300 bp, Homo sapien
ctccttaccctacatgcacctccaccactgccactgaggcccgcattatagcaccttaaggttcgtccccaccccaggacaggatgggcaagtgagcgctcctactccccttcccagcccccagacttgccgctgctaccaacgctagcgccgatgccagtacaaccgctgttgccctcaatgcaccagcccaccctacaaggctcctatcacttggcccccacgggtgccctcctaccactctggtcaagctgcagtctctgttgctgccaccaacctcatgaggcaagctgcagagccacgccatctacaggctccagcataccacaggtgactcctcctcctcctccagcctggctgggagcagttgcgcaggcaaagccagagaaacctagaacaggatgcagggagtggaagtgttagagcttcaccttgtcacgctggccactgggcggcagggaccatttcattaaaggcactcacacccaccttccaaagtccagcctctctttctggcaaaagctggccaggaactggggcctgggctgggtgtgagtgccttcactgaaaccggctcctggccaagtccagctggccaggaattgctgggcccatcggcactgcgctcttcggggagcccgcgtaggagaaactcagacccagccagccctctccacccaagtgctggttcccattcctcacgcctccacccacagtgccctgtccccctccctcccccgtggtgccctctattccctgcccggtagtcccagatggtctccacaacacagagcgtgcgtgagggcgcgggccagggaaccacagtgggtgtgagagccctgcggtgctcaagattgcatgagcacgaagagatcaccctctagagtctggagtccgggaagagaagaactccatccttccatggaggccaccagaaagaggaaggaggccacagctgtcgctgccgctgctgcctctgcagcccaccaaccccactggcagtatagcccccgatagcacccctaacctgccccctgtaaccctgggatagcacacccaacagctgcaggcaatgtaaccaatacccccccaaaccatcccaactcctcggccgcaggcagtgttagcacccgatagtgcccacctgacgcagccacgggtattgctgcactagacagcgccccaaacccgccccaccctcaccccgccatgggcagtgcagctcctgatagcgcacccccagtcacaggcagtgcagcaccggaccacgcccttaaaccaccccccactgccagcattgtagccccagataactccacccaacccgcccctgccacggacagtgcagcagaagacaacgcccctaagccatccaccgccactggcagtacacgttagtgtacacaacctgcctctcccgaccacccctgccacctcgggcagtgtagccccccattccaccaccagcaatgcaaccccagagagtgcccccaaacagtccaatgccacaggcagtgtagcctttggcagtgagcccctatagtacacccaacccttacccccagaagagggcagtgcagccctggataactcacctaccctaccacatttctaccactgtggccgagctgcggtctctgatttcaccaccaaccgcagcgaggcgagccgcggaggcgcaagctccggctccagcctccagcacgcggcggtgcctcttctttctgtcttccagcccggcaggagaagctctcgctgctagcctccctcctaccgctccgtcaccaccaccaccaacagggagggagtgccccaggctccaggctccaagctccaggctccagggggcgaaaagtgacggagccttccagttctttaagccgggtacgtagtagctccccacacccacacataagtgccagaaatgacgcgccgctgcctcagcatgctttatatactgaggttaggagaccctggactacatgttctgattggatgagagaaaaacctctaggcctactctgattggactttattttcatgctgtgattggttgtcttaagacttgctctcatccaatcagaacatgcagtctaggaaccggcatgcgcataacctcaggatataaataatgctgaagcagagttacgttttttttgttgttgttttttttgtttttgtttttttaggtttccgtgtgtttctattgagctgctcagtgcccggcttagaagaccaggaaaaggagtcacaggtcgtatgctggaggcttgagccgcggcaccgtggcgcggctcgcc

SEQ ID NO: 42288 - DNA, 2300 bp, Homo sapien
gaggagccaacttacctaaattatctgaatgtccgcaagctggaatgatccaagcctctgtgtgctgacttggacatcttcccataatatttgctttctggaactaaaaacatatataaataacatatatatatatttgggatcttaaacctgcatattaagatctactggtagatgttagttttatctgaaagtttccacataaattgtgagcaccaatgcccatctcaaccatttggttgccctcctcaaccagtttggttgatccaatgccagcgcccagctcccactgcaggcatcaccacacgaccctgatctggcagacgctgtgcacagggacgtctacgggggtgggaggatgggttccagggaaactgttctttcttaataaaaaggaactgatgtggttggagctgcccttgctcccctctttgcatcttcaacgtgggccagatgttcagaactgcagtgacattttgtgcccccaggatgccaagcaaggggcacaatccagccgaccaaggatgacagagacgagacagagaggggtcccagtggaaccaagaacagctgaatgaacaccagccaccacctcctagtgcactcctggtctatgaggaaataaacccccacgtgtaaattgctctagttgttctatttcttgcagctgaacacattctaatcgacataactgtcaggggaaaagaccttcagagaaatgtgcatgttgtactgttttgtgaaatgagattatgtatgattgcacaatagttgtgagcacattgaaagactggaagggcggctgggcgtgatggctcacgcctgtaatcccagcactttgggaggccgaggcgggcggatcacgaggtcaggaaatcgagaccatcctggctaacacggtgaaaccccgtctctactaaaaatacaaaaaattagccaagcgtcgtggcaggcgcctgtagtcccagctactcgggaggctgaggcaggagaatagcgtgaacctggaaggcggagcttgcagtgagccgagatcacgccactgcactccagcctgggcgacagagtgagactccatctcaaaaaaaaaaaaaaaaaaaaaaaaaaaaactggaagggcaataataggtaacaaagtactgagcacctactatactaggtacatctcattgcagccactctataagatggatgcttcacggttatgctcatttaagagtgagacaactgaggttccaaggggtttaataactttctcaaatcatgcaaccaacagatagctagcttgggactcacagccaggtctggctggccctagagaaagtgcttccaccaccatatgcaccccaccagtgcctactggctgcacagaccgccaccagccctagcagcagtgatttctggagagtgggatgggagaatgggctggtggtgaggaggtttgtctttatccacttctttagtgtttcctttttaacaagcaatttttgttacaaaagtggacatccagagatattgacaaaataacactggtgccaggaactgtgctaggaatataatagttttcttccggatctggatctctactgtggatatccactggtcatacatgcctactggaaataaaaagcattctttcctaacttattccaaaccctggctaaaggaattctggggttgccattatgttactatgtgacctacgtcccagataaggaacctgcgaatctgccacctccgccctcgggagagccaggccctgcagtcactatatgtgaagaatcctttggagcctggaataagagggttttatgcatcattttttaatcaactggatttctcacctcccacctgtgcctaaatggtggcttcttggtatcttgaaagggggtgctcagcaggagaaagcagctccatgtttctgggcagcccgtcctatttacagactgctgcggctccctggcagctgccacagtccccgaggccagagggagttccttgagggccccagcagttgtttgagtcatgtgttttgggcccttttccttagagatcctggcagggccagcacagatttcttatcggcttccacactgcggagctgcagccctcagaagtaagcaaggtttcctgccgggagaaaaggatttgaagcattccagccaaaatgacggacagaagccccttcgaaaccgacatgctcaccctgacccgctacgttatggaaaaggggcgtcaggccaaagggactggggagctcacccagctgctgaactcaatgctgacggccatcaaagcca

SEQ ID NO: 42289 - DNA, 2300 bp, Homo sapien
aagtgctgggattacaggtgtgagccagtgagccgggcctatttgagtttttatgtttaaggatgtatttctcttactattttttttaacacagggtttttcctgaaaagttgcctgaggaacaaagagttaaataagacccttaaaggatcaactctctttgccaggcatctaagtcccctctggggctttgaggagacagtcgctgtctttcctggtggtaccaccaccttccttcattcaacgccgccgcatctgacaaccctgggcacaggaatctgcaccccaggtctccacggtgaatccagcagtcaattttcagagcttgtcctgcctgccccatccacaccgcttggcacatgggtcagcccgcctttacttaccttcttcatctggcttcccggatgtcacatctcttggtttttggttggtttttccagttggcttttccaatttatacctgcagcatggatctctcctctgaactccagatacataaatctgtctatttgacattgccttggatgtctagaaggcatttcaaacttagcaggtcccacacttagctcctaattgtcagtcctgcctccagcacacgcccctctcggtgttccccatcgcagtcgaggacaactgcattcttctagtttctcaggcctcaaaccttagaatcatccgagactcctgtctctcacatatctcatctgtcaacgaatcccatcagctctaccttcaaaatatgtccagaatccaccacctccactgctaacacctggctcactatctcctagtaacctggagggcactgtcttcagtctgatcttcacacagtagccgcagtatgaagacacagggtagaccatgcctctcttcttctccaaactctccagtgggttcctcctagtcaaagtcaaacctcacttggccctctagacctcacctctgcatcctcccgctggccttatctcctccacctctgacccttgctagctctatttcagctccaccggtctcctggccattccctgaacctgaaacatggtctcctaccccagggcctgtgcactggctctcccggtgaggaaaccgctctccttcccatctccaccggcgcgttgcatccttcacctctttgctcacatatccctttctcagagaagcttttactgaggcctctgctcaccctcttctcccctccacattccgtgtcttccttttctatttcgtttctctctatggtacttatggcttatgtaacaaactaatctattgtttatatatttatttttactgtttctctgtgaaaacgtacactcgaaaagggcaggagttttgtctgtttggatcaggctccacccctggaaggtaggacagtgttcagcacagcaggtgctcaataggtgttgtttcgtgaatcagcacatcaattgcagcattgtggctaccagggggtcaggatgcgggcggtggagccctctggcctttgtgtggtagccgaggactctgtgtcagcgaccgttttccgggaaacttccgggcgagactcacatcttggaaattcaaatactcaatagctctcgaattctaggaatcttgagaagaggcctggattaaggattcagacgtgggccctcagatgggtgagaaacggggactctgtgtctcctagcggggacagaagggccaggtgacaggccaggcagagtggacggggcttgggcagggggcgggggcaggcagccacacggggcaggagctgcagagctaaagccaggccatgtggactggctgcgggtttcgctgcctagctggtggcattgagcaagttacttaacctttctgaacttccgttttatgattttggaggaaacagtcatagctttctctctggcagagtccgatggcccgagtcccgctccacagtgcgggtggagggcacggaggggtgtgtgtggggggcgacagcccaggaagactagggggcggcagggcgcgtgggggcgggggttgggagaccgcagggaggatccccgaccttgtctgaagatccaagcaggcggagccgcggtctggtccgcggggtaggcggggcgcaagagtgttcccgggggcggggggccgacccgcgtctaaaggtttccgcgattcacccgccggcgcctggcctggcccagttgcaccacgagcgctgcggacactcggggcggcagtcggtctgtcagtcctcccgccaggtcccgcggcccgcacctgccgcccgcacctgcagctccgcacctgcggccagtgcctactgccct

SEQ ID NO: 42290 - DNA, 2300 bp, Homo sapien
accaccacgcccggctaatttttgtatttttagtagagacagggtttcaccttattggtcaggctggtcttgaactcctgaccttgtgatctgcccgcctcagtctcccaaagttctaggattacaggcgtgagtcaccatacccggccctcgattatcttttaagcaggggatctgacatcaccgggtcagcattcctggttggcaaaaatcaacagagctgtggtagggaccacgagctccagatcaccacagtctctatccctgggcttcactcctttgtgttaactgcccggctgctgtaggctttggggtttgcagcctctgatggagcctaagaaagccaagggaaaaaagagctcaggaaaagggaaagtggaagccagtgatagaaactgaggaaagataggtgacaggagaacctagaggactgacttggaaacaagcaaagaaatcaagtttgaaaggaggtgaaacaaaccttgttttagctatatgatccagctatttgcttaggccccaaatttaagaattatttttgacacttttcttttccttatctcccttatctaaactcatctccaagtctgtcacatctacctcagaattattcctgaaatttgtccatttctatcatttcttacctgctcattgcaaaagcaactcttctctttgcatccttttaaattgtttctcaaaagtttcatgtatacacagcagctagcagggtgatgttataaaactagatcctgtcacttacgtgttgataactcttcactagtttccccttacacttcgaataaactcgtattcctcacaggaacccagagagtctgtgcatgatggggactctccttgccttcttgatctcatcctctgttcttcccatgacctactttctcactttctccaaggcaccacattctgccccttccctattgcttgctcacatgtagattcttctcttggctgttctttccttagctctccacagagttggctgcttctcagtttactgaacctcttcagagggcactttcttgacatctcaaatcaaaaggtcacctgtcttcctttaatttctcagcaacttattttccttctacttttttttttttttttgagatggagtctcgctgtcgcccaggttggagtgcagtggcgcgatctcggctcactgcaggctccgccccccggggttcccgccattctcctgcctcagcctcccgagtagctgggactacaggcgcccaccacctcgcccggctaattttttgtatttttagtagagacggggtttcaccgtgttagccaggatggtctcgatctcctgactttgtgatccgcctgcctcggcctcccaaagtgctgggattacaagcgtgagccaccgcgcccggcctttccttctacatttaatgtttgctttctcaactagaaagtaatccccatgagggaaggcacagcgtctgtcttgttcctggttgtttccccagcttttgttaagggtgcttgcctggcacacaggaggaccttaaattgtggtggaattaatatgtgaacaatagtcacatgcagcagaggtgagactaggctaaggaataaaattgcacatctgtatttcagtaactttttttaaattttatttgaaacagggtcttgctctgtggctcagggtggagtgtagtggcacgttcatagctcattgcagcctcgaactcctggacctaagcaatcctcctgcctcagcctccatagtagctggaccacaggtgcacgccaccacactcggctaattttttaatttttttgtagagacggggcctccccaggttgcccaggctggtgatttttttcttaagcttcataaagattttgcaattaggaatactagggtaccagggcaactctacaagccctagccagccaagctgctcgcgccctcctatgaccgcggcagctccgcgcctgcgcagatctcccccgggcggtctcgccctctcatcctaagggggcgggcctagcggaaggcgggtcaggcagaatgcggccccgggcgcgtgtggatgacgtcacccggcgcgtgccggggtagcccgtagtaaccccgagtctgcggaagtggtgacccgtgggacgcggctgagacaggtaacctgttcgctccctgttgggtccctgccttcctctcctccggcgtcgggatggcggcggggacagcatcattccgttctgaaggcgacggggaaccctcccttaccctcacttttgctcgaccagcgaggacccgcatcccctcc

SEQ ID NO: 42291 - DNA, 2300 bp, Homo sapien
gggttagtccaaaaggcactgaggcctagagtcaagtcctcttcaggaagcagtgttttgagtaggccctttggctagaggacaaggatgcaagggaatgttgtctccatgactggaaaagtagctagaaactggattgtacaaggctgcaggaggcaggattttttaaggttaggtgagattttgaagaggaaatagtctgtggagagaggtagaaactgaaatcaatgggatattaacctagaatgagattctagaaggaaaggaaataaaagggtctagtagagatgcagataaagctggcagggaagtgaggaggagttaggatacaaagggagggcttgatttacttgaaaattcaagcaagtaatgatgttttgcagttgttgaaagaatgcctcctgatatttagaaatacgaaaattattttaaacatatctgctctgtcagagtttttctttctgttctcctgccatttcttttttgattttggtaaaagaataaaaaaagaacagcatatgctgaaagaaactaggtacacaacggggactgaaataatttcaaataatttttcttttagccagattgctagtatacaataagaatatattttgattcagaacttttatgaagaacttgtgcattttattgtaacatctgtttctacattttaatttctctccttccttttataggtatttgcctgccttttttttttcaagtgagaagaccttttgtttgccacaagaaggctattatccagaatgttaatgggttttcagctattaagatgtaatgatataccttgagtatttaactataaatttgaaaaatctccgtgaacaatctcaaaggaatacttagaatgcactcctggtaaattggctcattttcctgtaatttactggaagtgctgatatgagagcagtcctaatgtgaaaagtacattaatccctggagttacattgtatgtattaaattattactctcaaggaataaaatgtgtggggccatttagccttcattcacacttgttacttggaatcacagtggaaaaacaatcacttatcttttgatgcacaaaattagaagggatacatttaatatcttttaagactagaggcacagtgatgctgggttacacttttgcataacacttgctgttttctaaaagaaggacagttctcattggagcgtgcttcttctggctttgtggaggcccatgccatccagttggtaattgaaatatttttagaaacccataatgcagctttctttcatgtcagtagaaaagataagtcagccttctagccatgagcatctaccgcttgggggattatttaaggatggtggtcaacttgcaggagcagcagttgcaggagcacttaggtcttatttggaattttatctaattgtgctttccttttttgccaggagactgaaaggaaccataatttgtgacatcagttgttttctttgataagcagctatttatgattctggaagattaaggcagataggaaaccccatctgagattttaataaatccctcaaacaataaaccacatcatggacatacagctggaccctgccagagatgacctgcctctcatggccaacaccagccacatacttgtgaagcactatgtactggatttggatgtggattttgaaagtcaagtcattgaggggaccatagtgcttttcctcgaggatggaaacagattcaagaaacagaatagctctattgaggaagcctgccaatcagaatcaaacaaagcctgcaaatttgggatgcctgaaccctgccatattcccgtgacaaatgcaaggaccttctcatctgaaatggaatataatgattttgcaatctgtagtaaaggtgaaaaagatacttctgataaagatggtaaccatgacaaccaggaacatgcttctgggatttctagctcaaagtactgctgtgacacagggaatcatgggagtgaggattttttgctagtgttggactgctgtgatttatctgtgttaaaagtcgaggaggtggatgttgctgctgtgccaggtctggaaaaatttacaaggtctcctgagctcacggttgtttctgaggagttcaggaatcagattgtacgtgaacttgtgactttgcctgcaaatcgttggagggagcagttagactattacgctcgctgcagccaggctcctggctgtggggaactcctctttgacactgacacttggagcttgcagataaggaagacaggggctcagacagctactgactttcctcatgctat

SEQ ID NO: 42292 - DNA, 2300 bp, Homo sapien
aggaaccgtaaagtatacatttcttgacttgactactatgatgtctgtatgaagatatgcatgcatttaaaatgcatctctgaagtacacacagctctcttcctgttggtttaattaatattctactgttttcattgtgtcctcgtatgttctcagagtctctgctggggattgactggcaagcctagtttcttaattttgagaaataatgaaaggagctcatcatcacacttacactctctgttataacagcagtaacgttaatggaatcatattctagaaccaggcatatgacagttgcttaaaaattaacaccttaatcttacctttgtatgtgtgtataggaaatgctttgctttgcatttgtctctcagcagttcacaattacatgtcatggcatagttaggttggcagaactacctagctgtcgtccatatatgttcttttttttccttgtatttgaatttcaagaatctcttgcaacttatttcagagtggttttctgtgaagagcactgaagttaaaaaaccatgtgctgtgtagttctgcttcatggctcagctgttcacatgcatcttcacccttcatcccactgggaaaattgaggggaaaaaaatgactatagtgtggccgatgacaggtgacagattgtttgagcttttccccacctgttctataccagataatcttgataatttggttattgtttatttattcttgcaataaatatttatcaagcgtatactgtgtgccagatagtacttacgatgcaaagcctacaagggtgaacgagatagaggaggcctctgtccttatgaaatggacattctagtcaggggagaaaattagtgtacgtgaaacaagtaattaagatgtatgctatgaagaaaataaaatcaagtaagtgtcacagtgggagaatcaatagcatcgttagggtgagagggaaaagcttccttaaagggtgacatttgggctaagactgaagaataaaaaggaatcagctttgtgaccatctggtggaaaagcactccggtccacaggcctcaaggtgggaaccactctcatgggttggaggagtagaatgaaggccaggatggtggcaggtcagtgaggtcttaaaatggctttccttagccccgttcttagtgagcttgggtgccaggagcaagtgagtcactaagaaatggcaagattaagtcaggtccatcattctaggcagacgggttatgggaagagatcaaatttttttttttttttcttgggaccgtagatacctataccatctcccgactggctaatgagaacctgattggcttagcagctgctgttcttgagcagaattctccatggctgaagctatcagaacacctggcacccagacgggcaaccgtccctttgtagagaagggagaagtctcagatcaccacgttttcttcccctggcagctgttgattgattctttgcaagggtttttgacatcgttggtcacagagagggaagctgtgtctcatcctagttttatttgctcatcctagtttgaaaggttttttgttttttgttttttgtttttttttttaaaaaaagcaacaacaactgaatgaaaataggattgacaattaaagaccatagaaaaaattatcaattattaaaatcttcacaacatgcttcactatgaggaaaaactataaagctccctattacacaaggcttattcttaaaaggtttgattgtgcaataaaagacttctgaatgtttatactagttcctgactattgcatgcacaattttcttaagtacctcaatttgcaaataaacggtatgcacgtacatgcccaagaatgaatgtaaccagccttttcctccactccctcctcccgggttagacagggtgttgtcctgtttattcttatctcccagccaatgtgtaatagaataagcaaaacataacatgctggtacaaagggcctgttgttttcagctttctaattatgctcctttctgctggggaaggaagcagtcataaatttctgtcattatcttaagtagcaaggtttcacagctttgagaatttttctttgtttgttctttgttggctttacttgaatttttgatccctcaaaccaaaaccaccctacttttaaacaatccttctttagatttcaggggatgtgaccccctgatttcaaggcaagatgcagccatagtgattctttgcctcaggaatcagattttgagccttaaattagtatgcctttgaattcaccatggctgccaacttctctactttctccgatgtg

SEQ ID NO: 42293 - DNA, 2300 bp, Homo sapien
cagacagggtttcactatgttggccaggctggtcttgaactcctgaccttgtgatctgcccacctcagcctcccaaagtttttcagaatttttaagaaaacacttctaaccttaagcctttctttcaaactcagatccccttacacattgatcagacgtagcaagtttgcttcaagtttttggaactggtttccactttaggctactgaaggtcccatatccccagaagactatcccctcatctcctcagcctcccgtttaaagatacacactgcagtcgggtgggtgccagatgaggaaagcggaagatgctgattccctcccacgcagtctcagggccagagggaaggagggtcctgccaggctgtctgggccacccccccactttggcttcaggactacagaagcatctcctacgttaggctgcgtccaggagagagggactaagggatttcgtttagaagaaggggcaggggctgagagttcggcttgtaaatgtgtaggcgagagtgttgacatacatcacttcacacctgatgaaggaaagagaagacaggctatgaacctaagaggggtggagcgacagtttgtctccctttcagatggccccaggctactacgagtctacggtttcacttgtccagtttaaattagcaagtaatgaagtcacacaagcagaagctgctgctcatgattataagacccttagaactatctatcctgctggactttagagggcaatgagcctggttcccccctctctcgggtcttcctttgtctctatcatgggatattgggctgcacatgttgaaattgtgaaaagcgttgaatccataagaagtaccagcttgataaatgtaagtctgtatgatgcctcccaaggatctgtgtgaaaagtaaacttgcggccaggcgcagtgactcatgcctgtgatcctagcactttgggaggctgaggtgggcggatcacctgaggttgggagtttgagagggggcgggcggatcacctgaggctggagtttgagaccagcctgaccaatatgaagaaaccccatctctactaaaaatacaaaattagcagggcgtggtggcgcatgcctgtaatcccagctactcaggaggctgaggcaggagaatcgcttgaacctgggaggctgaggttgtggtgagctgagatcgtgccattgcactccagcctgggcaacaagagggaaactccgtctcaaaaaaaaaaatgtaaacttgctctccatgaggggaattggggtctgctcccgtaaaatgggaggggtggcctgggggctcttcttgtccttaagggcaatcaatttcccgtcctctgggttccttctacccctgcagcctgctggaacctgctgtggcagcagcatctagccagggccgccaagtgctgggtcgctccacccacagcaagatgggccgtgctggtcagggctccacggaaaaagcacaaataaatcaaacaccagctcctacttaagatctgatgaaattctccatttccgctccaaattgaattcctcccgaaggatgggagcagctcctgggagtaatgaaggcactccttcctcctctgctagaaacatgttttagattaacagacgcagtcttctaatctgggtgggtaggtagtgttcaggaacagccttgagaaagtgttttcagaccagacatgatatttttaatctcgaggggcaaggcggcagacatgcaatacgcttggcctctgtggaggaggcagccccagaggtggtctgctggggaagaatgacaacacgggagtgtggctgcaagccacccctgcctgccacctccttttcctccaccacttggagccaaaaagaatttatggtggggaatagaagcaagagggcttgtgttttttgagatttgaaatatcactttcctgcccatctcttatttgggaaaaataatcaactctgtgatttaaaaaaaaaaaaaaaagacaagaaagaaacgtttttaggatgaagatgtcattgaagtgattatcttccattctctgtaatgatgatgaatcgacagtctggcatttgtagaggcagttgacacagaccctttcaaggggaaaaaaagaaacagttttccagtgaggcttgtcagggggaagactgatcgccggcaggccggctcggaccatgagcacagttccaagaatgcagggatgaggaggagccgggctgggctgttgagtccaggctgaggtaggagtgcagtgttttacaggtccgttctgttttgtgggtggacatgggtag

SEQ ID NO: 42294 - DNA, 2300 bp, Homo sapien
ggctcaagtgatcctcccacctcaccctcccagatagctggtaccgcaggctaacaccaccatgcctggctgattttttttttttttgtagagacaggggtcttgctatgttgcccaggatggtgttgaactcttaggctcaagagatcctcccaccccggcctcccaaagtgcggggattacaggtgtgagccaccgtgcacagcctgtttataaagttaccctggcaatataactaatatcccatggtctcccttttgtaaaaatgtaaaattctagcctctttacaaattaagcattttagtggtgaaacaaacaggaggtaattagaaagatattcattttaagacttctcccccttgaaattttaggtgtccttcatttgttcctttatccttccattcactatataacatatttattgaatttctagtatatgccaggcaatgtttctggtggactgaacaaaaatcaagaacaaaagatacgggatctctttcttcttggggcataaaatccagctggggagagagacgttcagtacatttttaaaagagctataataactgaacatcacagagtgagccctaatgtaaatttgactttagtgaataataatgtatcaatattggttcctcagttataataaatatactaatgcaatatgttaaatatggggaagctggtgagtgggtacaaatatgggaactctgctttctgctcagtttttctataaacttaaaactgctctaagaatcactctaaaggaaataaacagaatgttattagaaagtatagtggagtgacataatttggactggggagtaaggaaagacctttctgcaaaagcgctgcttaaacccagaactagaggataagtgggctaccacgcaaagaagagatggaaaagcattctcagtgaagcaaagtggtatcatttgaattacctttggacgtaccattctggcttctctgtggaggatggattctgggatggcaattgggaggagagttgggggacaaaggacaaacgagacaagaggcaattaggatgggtcacagcttttgcttcctacttagcaaaatcctagaagagcagagtgacagtaggctgtttcctttgttcagctcatgccggaaaccgttaggttatccatgatctgggtgctaggaagaaaggagactgtgtcagtagcagagcaagacagggtttccaggtctcagtttctaagatctttccagtggttcaatgggatttatagaattaagaatgtgtgtgtgtgtgtgtgtgtgtgcgcgcgcgcgcgcgtgtgtgactgcaaccagttaaaaactgcaaagggaaaaaacttttcaaataactagtacccagctgttaacaacagctttcatataagtctgtaagatttaatttgcaatagttgtctttattcctgttactggactattggaatttattttggattttgtttcttccaagactgtatgttgaaaaactgtatttaagcagagcactgttttagtacatcaatattgaatggctcatatcacagtttctggggatcgtgaactcccaaggaaaaaaattctagtgggtaaaaggaagtgcctgccaagatagatttctattgattgtggaactcttattagcagcataaaaggttgaagagtttaaagttctctttccctttaaaattaagcagctcagaataatccacttcaccatttataattatttacctgcctatgtgcaagatttccaaaccattaactatttatatatatttcctttacagtaaaaaattgtatatgatggctgtacagtctatactaaaagatataataacacattgaaaaatctctagcaaatgagcacacatttcgtagcacttagctattataataatgacgcaaaatggttaacacgtctatttatattgctctctagatttcaacttttttgtattcctggaaacagtaagaatccctcatttgagcagacttgttgtttgttttaggaaatagacatacatcatccgtgtaattttaagtagtccagttatgaatatggaatgaagggataaattcctgatgtctccattaagctcctctgtgtaaaatactccatggcaaagttgctgctatttaaagtagtgagtttgatcttggctttgatctaaaccttttgatcttgaaagaaggatggagtagcaataaagagagggcaagacagattttctttaaagaaatgtgataaagttaaagggatggtcaagacccagcaagcaacaggacaaccc

SEQ ID NO: 42295 - DNA, 2300 bp, Homo sapien
agacaagaggcaattaggatgggtcacagcttttgcttcctacttagcaaaatcctagaagagcagagtgacagtaggctgtttcctttgttcagctcatgccggaaaccgttaggttatccatgatctgggtgctaggaagaaaggagactgtgtcagtagcagagcaagacagggtttccaggtctcagtttctaagatctttccagtggttcaatgggatttatagaattaagaatgtgtgtgtgtgtgtgtgtgtgtgcgcgcgcgcgcgcgtgtgtgactgcaaccagttaaaaactgcaaagggaaaaaacttttcaaataactagtacccagctgttaacaacagctttcatataagtctgtaagatttaatttgcaatagttgtctttattcctgttactggactattggaatttattttggattttgtttcttccaagactgtatgttgaaaaactgtatttaagcagagcactgttttagtacatcaatattgaatggctcatatcacagtttctggggatcgtgaactcccaaggaaaaaaattctagtgggtaaaaggaagtgcctgccaagatagatttctattgattgtggaactcttattagcagcataaaaggttgaagagtttaaagttctctttccctttaaaattaagcagctcagaataatccacttcaccatttataattatttacctgcctatgtgcaagatttccaaaccattaactatttatatatatttcctttacagtaaaaaattgtatatgatggctgtacagtctatactaaaagatataataacacattgaaaaatctctagcaaatgagcacacatttcgtagcacttagctattataataatgacgcaaaatggttaacacgtctatttatattgctctctagatttcaacttttttgtattcctggaaacagtaagaatccctcatttgagcagacttgttgtttgttttaggaaatagacatacatcatccgtgtaattttaagtagtccagttatgaatatggaatgaagggataaattcctgatgtctccattaagctcctctgtgtaaaatactccatggcaaagttgctgctatttaaagtagtgagtttgatcttggctttgatctaaaccttttgatcttgaaagaaggatggagtagcaataaagagagggcaagacagattttctttaaagaaatgtgataaagttaaagggatggtcaagacccagcaagcaacaggacaacccgactctccgccccggcccgccctcaccggcaggcgggttccagcaactgctgatgcggatgagaaggcctttggcgggtggaggaaaatcttggggtatcgcacatttttataaagtaagtgtaaactttctccctaattatgaaaacagattgaccccttctttttaaattctacccagtggttctgggggtccacggcagtctgagggctgcgggtccacactcgcgggagcgcggggctgggtttctctgcgccctggcctcgccccccgggaggtcacctgccgctgcccggagccccgaggggccactgggaaacgtctactcgagggcgtagaacccggtcccggagaaaactccactaggaaagttactttccctgcgcgaaagccaccgggaccaggtttccgactccaggagcgcgctacgctggctacgggcggggttccttccccgccaccgctccctccagcctgcggcgggcggcgcgggcccctctcgctgccgggaagccgctcgcagggcgcggagccgggggaggggtggcgggggcaaggtgcgcgggggcgcggggcggccggagcccggggaggggtggcgggggcaaggtgcgcgggggcgcggggcggccggagcccgggagcgggagcacgccgttcgtggggagaacaatacaatgccggcgcgggcgggagggcgacctgcgggaggcggcgcggccgctatacctttaaggcaggccccgcccccgctcggtgcccgcccgcccgcccgcgccgccgcccaggccccgcgcccgccgcccgcgccgcgcctgaggtgatgcggaccccgggcgggcgcagggcgcgggctccggcgccgccgctgcgtcctccccggccgcgggcgaggtacggggcgggcacgccgagttagcgggcgcggggcagggaggccggggccgctcccgcggtaaacttgactgtgtcctcttcccccgcagccgctgcagagggagcgtcgcgccggggcggagtgcgggcttgcgcg

SEQ ID NO: 42296 - DNA, 2300 bp, Homo sapien
agactttaaagctaaagaaagccaagaaaaataaaagtcattcttaacagaactcttctgaaaggcaaaatacaccatgcatgttctcttacaacacattacatttttattttgaaaatatgagtacttcttgggaaatgcattagatttacagacggcaagagacgaggagctcacagccatgaagctgagatgtggctggcagttagtgggagttttaaccatggagtactaagttagtgggagtactaaccatggagtactaagactggacgcccctggggagcttgtcacctgggagtgtcccagcccctcttccaggggagcccatatcagctctctctctagcccctcccacctaacacacagcagcagaggctgcagggcagactgcagactttggggaaaggaatttttactgtgacaataactcaccagtagtcagaacagtgttgggggtttaaagctagcaaaatttgagagtttttttgtttgttttgttttgttttgcttaaacaaacataaagaaaaattaattgtacaataatgcatggaagcgaaaccaggtacacacacattattttcctactttgctgggtggatggacgaggccattttaccctttgagcagcttcgtctccacttgtgaaagcaaaatgttgatgttgcgtgtccaggcatacaatacaaaaatatttgtacagagtatgcaagcctgtgtggaagggatttgcattgcttaataatttaagaaccaagaaagagagctctgcacgttgcaattttaaagaaaatataacagggagcgacaaatttatcctgttttcacacaaggactgaaatctgatgagttgagatactgctgaagcttatggcacaaaaaaagtgtttctacttttcccttatacagtgcaggttttcatgtttgccggattacttgttaaacgtgttctgatctgactttgcattgttcaggtgtgcactcctggaaaccgatggggccctggaaatcatagccactattcaggtgtttacgcagtgctttgtagaagctctggagaaagcaagcaagcaggtttgttatatcacatatattactcattcatcccagagaataagacgctgttgagagtattttggacaagagcactttattttcaataattttgatggactgttttgctcacaaagaaaggttcctaatgagtgccccaacaaaggttaagccattttaacttaacataaatcaagatctgtctgccccgtgccctgatacccagaagcatctgtctactattatgtctgagaactctgtcatgccagcatgcatggccctggaggacggctcttcttggccctgtgttgtgcactgtctgccgagcaggacactgccccctggctgcatctgagcctcccaggtcagcaggaggcaccctggggtctatatggcatgtgatgaataggaaagggcacttattacaaagcactcctggacattcttaattattagcatcttcattcttatcagagacccaaatgtgaattggcttccaggaaaggaggtggtaagagtgactgggaaaggcttgactaactagaaggggagtgaggaagggcagtgagcgggaggtgtgtgttagacacagtcagtaaaccaaaggccaggcccgcaccctgcagaagattgtgctccacgtccccagcagcagaggctgggcaacagctgccaagagtcaatgaccaattagagggacctcgtgaaacagggacctttgctaccagcgagctttcacctttcagcatatatatttggccttgatttctaacggccacagaagtaatgtttatgggacacattgcctgtcgagagtggtgctggtccagtgcatctcatctgtagagtatgtcacggcccctgtgaagctctccgcagtttgacttccgagaggagaactacaatgcttggctccaccagatcacaccccccgccaacgtcaaatagatctctcaggttttagccgatatttctacttttttttttttttttttttttttttgagacaaggttttactctgtcacccaggctggagtgcagtgatgtgatctcagtttactgcagtctcaaccccccaagctcaggtgatcctcacacttcagcccctgcgtgtagctgggaccacaggtgcatgtcaccactcatggctactttttgtattttttaattaagtacaatttccattttatttttctcaagagaatagtccgtcttcagactttaaggactcaactccttacgtgg

SEQ ID NO: 42297 - DNA, 2300 bp, Homo sapien
aataaaaaataatataccttttgaactaagtttgcataatcactcaacacctggggaaactcccagttttgggtattcttttagatttaagcttcataaactcataaactgacatttcctttctttttttttttttttttttttggtggtgaatgtctggtttttggaaatgctctccatcagattacattctttttaacaccctgctgcatgcgtaaggatgccattggatgcatctgtcacacttactacatgaagctaggtagaatttcttctaatattgaaactatgggaagcataacagtcacatttttaattagtggcattggttaaacctgaagaatcctagaatctttagtggttaaattatacgactcttgaaatgaactgatctcaggcaagccagtgctttataatgctttatttgagctcataaaagctaggggaaaaaaatgaatggcctcagaataacccctgataaagttttttcagagatgttagttattggaaaagcataagctatgtatgttcacagggaaaaaaatgggtttaaaaattactgttagcattatttagtttgtggataaaaatacagaagtcgcttactagagttggtattgttcttatttctttgttaatgaagtccttagaaatgctgggttttggccaggcacggtggctcatgcctgtgatcccagcactttgggaggccatggcaggaggatcacttgagctcaggagtcggagaccagcctgggcgacatggtgagatccagtctctacaaaaaatacaaaaattatccgggtgtggtggcacacacctgtggtcccagctactcaggaggctgaggtgggagaatcgctggagcccgagaggtggatgtttcactgagctgagatcatgccactgcactccagcctgggtgacagagcgagaccctgtctcaaaaaaaagagaaagattgggtttattagattgcagaagatgaggtggcagagagtactgattccaggcaccggctgtcttagcctcacctccatggccttgtaaagtctgaagttgctttgccctagctcgggtactgacatcttcagtttctaggccccatttttgtttcttaattgtgttataaaatcatccgctggaatagactcagtcaccacaaaaggagaaagaaagtagctcatcaagtagatgttcctgcaaaatgtaagatttcaaagttcagattttcattgcatgtttggtaaagttttataaagatttacattttagagtaaaagagcatgtaagagacttctattttatccaaagcacttggtactagaaatatattttaaaacaatcctttttattaaatttctttttaacaagtggagctattttggcaaattaaaaaattaaaagattaaatcacaaatactggctaccaactgcctataaccattaagttgccttagaaaggtcgaaattactaaccatttgaaatgtgaaaaaactgatcatgaaaaaagcccagttctcttagttctttccatcattctcgtttggctttaaaaattgatactgttacagaaaggaaattgaccacacaagagttaagtgatcccaaggccacaagaaggacaaaaccccacaaagttaagtttagggaattctgaaggacagctaggagagcaaagatagagtgagggaaaatattcccatcagcagaaagagaatgtgcaaagtatgatggcgagaaagcaaatgttatattcagggatacttgttctgtgaacttagtagtttgagattttcctaaatataatgtttacagtgtttttatattaatgattttttctgcttgataaaacttattaagttttcctttttgtagatgaaagccaaaaaattctaatatggtgcttatgttgtctaattaacaaagaaccacagaattctggacaatcaaaacttaactcctggatacaggtaagagagtaaatcttgctctgcacttctttgaattaaattgattatttaaaagtgctgcttaaaaaaattttggggtggggtggaatccagttctatgatgttttagaaactttttcaaacatacccttcactgttacattatcttgctgagtaaaaagtttttcaagagatttcaattttgcttgactgtgaattccaaaagataccagtctttaggatgaagacctaatgttgagtggttttgaaaagtttctttcaggtgattaaaataatgtattccatttcactctagcaattgctatccttcaaaaaattgtttttc

SEQ ID NO: 42298 - DNA, 2300 bp, Homo sapien
aatatacctatgtaacaagcaagcacatgtacccccgaatctaaaattaaaaaacaatcaaaaagcaccgacttccttaactggcatggaatagtttcgagaatggatgtaaacaccgaattccttaatgtagttgcagattctgccagttttgtctcaacctctggatcggttcctttttttaactacctttaattcttaaacagattgttgctattgctatgctatatacttattgtatcacttataaatgtataacctctgcaaattagtctctgaattgaaagtattcattggtaaaacgggtatttcttcaccataggaatagttggacatgtttaaatacttgagagctatttttattacaagcacacacagctttgtggtgttttttgttgagacagagtctcgctctgttgcccaggctggagtgcagtagtgcgatcttggcttactgcaaccttcgcctcctgggttcaagcaattctcctgcctcagcctcctaagtagccgggagtacacactaatttttgtatttttagtagagacgggtttttgccatgttggccaggctggtctcaaactcttgacctcaggtgatccacccgcctcagcttcccaaagtgctgggattagaggtgtgagccaccgcgcccggcctgtagtgtgtttttgaacgtatatgtgaagttgtagcttttttttttttttttttgagacggagtctccctctgtcgccaggctggagtgcagtggcgcgatctcggctcactgcaacctctgactccctggttcaagctattctgcctcagcctccagagtagctgagattacaggcgcccgccaccgcgcccggttaaacgttttgtatttttagtagagacggcgtttcaccatgttggccagaatggtctcgatcttctgacctcgtgatccgcccgccttggccttccaaagtgctgggattacaggcctgagacacagcgcccgacctaagctgtagttttatgattatgatttatggttgtgaggcattgatttaagacattttaaagcttaagtcgtcagatcctagaagaaaaaaaaattcaccaagacaagctaatgccattgtcataaatgggagtttggagaaaattttattaatatttgtttgggtggtttatgtacagcgttgaactgatttgaaccccgaccaaacactgtatggaactaatgtacggtaggggaaatcattaactgaagatgccttttttgttgctattgtttagaacgcagttagaaaatcttattttagaggttttaccccgttgacaaagcctcaacttttcttcaaaagaactaatttccattttacctcccctacattttgaacagaatatggaagaagccagcgccccttctccgcgggcgctgctgcaaccctgctcccgccggggcttccgcgcgaaaccgggaacactggagcagtaccgactccgctcgcctagaacccgccccagccgggcccacttccgccagagccctggccgcgcccgccccgccccacggacccgagattcgtcggaattttcccgcgacgccgcgggagcgcgcggggccgctagccaggccccagaatgcactgctgacacgtgtgcgcgcgcgcggctccactgccgggcgaccgcgggaaaattccaaaaaaactcaaaaagccaatacgaggcaaagccaaattttcaagccacagatcccgggcggtggcttcctttccgccactgcccaaactgctgaagcagctcccgcgaggaccacccggtaagcggcaggccgcagaacgcagcgagggcggaggcttccctcgggggtctggccgacacgtcagcggcgagagcgggaggaggaggcgaggggcaagagggaaggctcgcgagagcgggtgggccaggcgcgccttgcggtgggcgagaggggttcccgccggcgcagggctgtggctaaggctgaggcgggaggcgggaggcgggaggcggaaggtggcgggcggtgccagcccgcggggcggggccagggcggggaaagcgggggcgggagccggcgctggggtcgcgcggaagggagcccccggagaggcgggagccgggtgttggcgttttggttctttttgttcattgagcgcaggcagctatgtcttcttcaaaggagaggagcaaaggtgaatttctctgcctcggactcgtgggagccgtgaaaagctcgcccctttgagccggtcgccctctacagctggcctcgtcctccccgtccctcacacccct

SEQ ID NO: 42299 - DNA, 2300 bp, Homo sapien
tactttaattgctttctttgctgataaatgcagaacttaaacgtcaactcactctcgatttgttaccacagaggtgactttctcatggtcaaggtgccacgatgagtgcccctcaggcatgtatttccctacccaggacttgcttttgatttatccatgtcacactatgcacacatcaaaaacacatcgacctctctgctgtaaaacagaacgaaatcatgtcctttgcagcaacatggatggagctggaggacattatcctaagtgaacaaactcagaaacagaaaatcaaatattgcatgttctcataagcgggagctaaacaataggtatacatgtacataagaatgggaataacaagacactggggactccaaaaagggagagggtgggaagggggtgagggctgaaaaattagctattgggtacaatgttcaatgtttgggggacaggtacaccagaagcccaatccccaccattacacaatatacctatgtaacaagcaagcacatgtacccccgaatctaaaattaaaaaacaatcaaaaagcaccgacttccttaactggcatggaatagtttcgagaatggatgtaaacaccgaattccttaatgtagttgcagattctgccagttttgtctcaacctctggatcggttcctttttttaactacctttaattcttaaacagattgttgctattgctatgctatatacttattgtatcacttataaatgtataacctctgcaaattagtctctgaattgaaagtattcattggtaaaacgggtatttcttcaccataggaatagttggacatgtttaaatacttgagagctatttttattacaagcacacacagctttgtggtgttttttgttgagacagagtctcgctctgttgcccaggctggagtgcagtagtgcgatcttggcttactgcaaccttcgcctcctgggttcaagcaattctcctgcctcagcctcctaagtagccgggagtacacactaatttttgtatttttagtagagacgggtttttgccatgttggccaggctggtctcaaactcttgacctcaggtgatccacccgcctcagcttcccaaagtgctgggattagaggtgtgagccaccgcgcccggcctgtagtgtgtttttgaacgtatatgtgaagttgtagcttttttttttttttttttgagacggagtctccctctgtcgccaggctggagtgcagtggcgcgatctcggctcactgcaacctctgactccctggttcaagctattctgcctcagcctccagagtagctgagattacaggcgcccgccaccgcgcccggttaaacgttttgtatttttagtagagacggcgtttcaccatgttggccagaatggtctcgatcttctgacctcgtgatccgcccgccttggccttccaaagtgctgggattacaggcctgagacacagcgcccgacctaagctgtagttttatgattatgatttatggttgtgaggcattgatttaagacattttaaagcttaagtcgtcagatcctagaagaaaaaaaaattcaccaagacaagctaatgccattgtcataaatgggagtttggagaaaattttattaatatttgtttgggtggtttatgtacagcgttgaactgatttgaaccccgaccaaacactgtatggaactaatgtacggtaggggaaatcattaactgaagatgccttttttgttgctattgtttagaacgcagttagaaaatcttattttagaggttttaccccgttgacaaagcctcaacttttcttcaaaagaactaatttccattttacctcccctacattttgaacagaatatggaagaagccagcgccccttctccgcgggcgctgctgcaaccctgctcccgccggggcttccgcgcgaaaccgggaacactggagcagtaccgactccgctcgcctagaacccgccccagccgggcccacttccgccagagccctggccgcgcccgccccgccccacggacccgagattcgtcggaattttcccgcgacgccgcgggagcgcgcggggccgctagccaggccccagaatgcactgctgacacgtgtgcgcgcgcgcggctccactgccgggcgaccgcgggaaaattccaaaaaaactcaaaaagccaatacgaggcaaagccaaattttcaagccacagatcccgggcggtggcttcctttccgccactgcccaaactgctgaagcagctcccgcgaggaccacccggtaagcggcaggccgc

SEQ ID NO: 42300 - DNA, 2300 bp, Homo sapien
gcgggaggtgggatgagggctgggtctgcatctccagctacctccctgcaatgtccatggagctagacttctcagcacaaactactgctaagccagcaagccagttcctaaattcctgtttgccaataccaagtagagagttgcccaactgagttaaatgttttggtctgtgttttattttagttcttagtttgattttagcttttcctttgttcttagtatacactttttcaggcactaacgttatcattatgatataaaagctcaatgtcaagtagagtttcttttgcatatttactttctcgtttaacacaaatataacaagcaccccataagtgccatttgcacaacagcaaataatggggacccccatatccctctgtgtagcctaaggtcttttaggggagagacaagttcacaggcaaaaccaggggaaatgcaaggtgtgctggggtctcatgagttacaggagggtctcgctcagccttgtgggggatgctgaatgaggaaacttagcctgaattagagcccccagctggaaacctggcagctggaatcccagcgctctcctctcagccggggttgttcccgcccagaaatatcagggttcctctttcaagcacttaaaagggcttcccattttctaggatgggatggattaacctgataaaggcctcaccaaggtcaaataaatgagcagacactgtatatgctaagccgtcagaaatctaattggcctgtttatgcttcagctagatggatgggatgcaaatgtcttaatgtggctgctgatacatgccccagccgaaagttccagcagtttacattagaccaagacattggctgcttggtttttactaatgtagttcagaagtttctagtgtttacaatagctgtgaggtatttgtatttttatggggattctctctcctttcatctgatgtcaaaacatatatagacatggcagcactggttgcctgttccattttatgaaccagaggaccattaacagatagatatcttgccccccccttcccagaacatcctgagcctctcccctaccccagcccacttccatcagagttgccctagaaatcattagttccagaaacgcatccctgcgtggagtctgtgccctccagccatgcagagtgtctgccagaggctgtccctggctgacaggtttaccttggtattcatgaaggattccagaccttagccctcaatggtgggaaagcagaactacttctgcactctcctcctctgccatggtgctgcggcctttatgtttgaattggctgacgcaaaacaagagtattcagagatgctaaattgttcaacaaaagattggcccgcagagcagccccgccattgtggagtgccctcacccagcacaatgccccagctcccacagaatgggcagcattttctttgcagaaagctggttcctgtgttctaaaaaggttgcaattggagctatttggtaaaactggaactcacagaattctaggcagaaagttgtgattaatgaaaggccagggaaagccttacctgatatgctagagacttaattagagattctgccgtaagatgcagaagcatttcacagtggattagcagcctgcagaagtgggctgcttttcctcctgggctaaattgtttaaattctacacccttcacttcatttgtttgcttctgctgggttttcacgagcggggcccctcggcattgtgtttgtgctttcagtctgcccagccattcaggtcgcattccatatttttgtgtttgtgtaacacattcataaataacattacatgccatcagagttcagcaaattaacaaactaattttttttttcttcccttcatgaactaacactttgggttgtggaatgtagtcctcaaagtcataaggtaaagaaacaaaaagcaaaaactcaccttgtgttgaatgtgaactgcggttggataacagccttttcagtggggtgggttttgttcatttctggcgttgccatgctgctgtgtcgggcacacggagggtggcgcgatccaccctgtcacagcgcgtgttcccgtttcctcttgatctcccaggtatttctttgctgtgctggcgatcctcaccatcctcggcgttctcaatgggctggttttgcttcccgtgcttttgtctttctttggaccatatcctgaggtcagtagtgacacggggatgtcccacgtgtaggccggctgaatgctgtgtttcctgtgccgctcttcacttcgatacttaggtgcctccccacttgctggtgg

SEQ ID NO: 42301 - DNA, 2300 bp, Homo sapien
aggtaccgagtcctagaactgaaagaatcacacgccgctgcatttctaacattggaaagagcctgcactctcttggctgcactttattctgacaattgttctggtggtaggaacacgcctgtcccatttgacagatgaggaaagtgaggtgcactggctggcctgaggtcacacaattagctggtgggaggaggtgaattagagtcacccaatattctttctaccagctcccagtgccttaggtctccagagagcacagggtggggtcacacgctgtcaagcagcctccaccagggcagcggccccgcagccctggaagcgccctcagtgcccagcagctggagtacctggctgatgtcgatgggcttatcgcggctgccggtttgcaccaggagtttgtaggcaaggactccatcgtctgatccattcttgtaattgtttggcatgattttcccggtttcccagtcactgtcaaatgcatcctgaagtcctagaaatggcaaatgattgtaacacattataactcgcagccagaaggaccctggtcctagcggggtgggctgaggagactgagcagggcagggggctcttagacgtccatcagaaacacaccctctgtgtcccacatccactttgactgaaagcactggatctttcatgaatgaactgcagctgctgccagccactgctcaaaaggggggaaggagattatctgtttctatgaaacaaatactcatattttatcttaagaaaaaccactctcctcctttcgccccatgacaattacaaaagaaggcaagagtgcgacggaaagacacgcaccagggtcattaaccgtttcgtgccactcggggtgctaagtcatgagttcttcaatacaaccagaaattccacacagaggggaaaaagcacattcaaactcccccaacttcaaacagcagctcagctgcttctggagcccagggtgagcgaacacgattctgtcaatttgttccatctgttcgacttgtggagctaacacaagctgtgggatccgctgccaggttgtgtaaagatcacagccaacacctattcactctcgactgctctcttcctctctgccacccttcctcaggagagggggtggaggagaaggaagggaaggcgctcgtgtgcacgcagggaaatacctcacagggtaaatttggatccgattgagaacaggaagccacaggccaatacaaggaggctctgtgagaacagatgacaaaccacaagccggggagggggaggaaagagctttctgggcctgggggatgggcgagcccgccagcacaccacacacagctgcgcttggcctcagtaatcaaaaccatcattacagacctgacggtttggctgcagctgtaaagagataagcatgttggaagagaaaacagggccccggtgacccggccttagggtctgagcgctggctggtgcgcacgctctccgggacacccccctccccccacccacccttgcccctcccagccacctcccaagtagagctcccaagccccagcagctcaggaaaccacagcttttgaacaagctgtacatgtatgggttggacacggctagtaagaagggagaagcgtttatttcatttcgggacatgccttggatgatttcaaaggcttcaaaaaaaatctggttgcgttagtgctcagaatggttaagctcttggggtctgaagtgtggggagggagggggagcacaggcccccttctgtctctctaagaagcgaaaccctccttctgacactactggctagaggaacaatttggggatgacagtgggctcggtggtgaaaggagtctgtgtcagggtgagcgtggaggggagacgggacaggagaccaccgggtgggccgtgcacctctcagacagacgggttttcatagggaggcatgcacacacagggtactgagcagatgttattttattactgaaagccctttctttctgtttttgaaaaacaataaacagcagaagaaaaattactgcgcctcctttcccctcaaaaagggaggcctcgtctgttttcctcgctgtaacaattttcatgatgtcatgacgtgtcctgggctttaagcccctctcccttaaccagctaatcctgaagagaggctcacacttggtgagtgtggggtggcgctgggcatcccacggcaaccaagggacagccccgttagagttaatcactccggcttcacagatggaggaactgagtcttggaaaggggagactggagggggccacccagcaggtgagtgttgg

SEQ ID NO: 42302 - DNA, 2300 bp, Homo sapien
cctttttctctttcgctcgctctctccccctccaccccctcccctcccctcctcctcttctttctccaaatggagagagttcttttttttcttcttccatctcatctattgaatcaaggagctgctgcggccgctgcccgctgcacacacacagagcggagtccccaggtcccgggagcgagagaggcgcgctgcacggggacagaatggtccagcgggttgccgaggagcacaagaaagcagagtccgggaccgagcagccaccgcgaacccagcagccagagcccgagcagcccgagcagcagctcctggagccgccaccgccagcagcagccaccgcgggagcagcggcagctgcggctgcccgggcccggcagcgctgagacccgccgggcaccctcggaccccgcggcggcggcggctctgcgcttgccctccgcggccgctcgggcgacccgggaggcgccgagagagccagcgcggccggcgggagcagcggggattcgctggctctttctgcagtgaaggggtcgcggcgcggggcggggggcgggtagggggagttggggaccgcaaggagtgccgcggaagcgcccgaaggacaggctcgctcggcgcgccggctctcgctcttccgcgaactggatgtgggcagcggcggccgcagagacctcgggacccccgcgcaatgtggcaatggaaggcgcagggtctgactccccggcagcggccgcggccgcagcggcagcagcgcccgccgtgtgagcagcagcagcggctggtctgtcaaccggagcccgagcccgagcagcctgcggccagcagcgtcctcgcaagccgagcgcccaggcgcgccaggagcccgcagcagcggcagcagcgcgccgggccgcccgggaagcctccgtccccgcggcggcggcggcggcggcggcaacatggcctcggctggtaacgccgccgagccccaggaccgcggcggcggcggcagcggctgtatcggtgccccgggacggccggctggaggcgggaggcgcagacggacgggggggctgcgccgtgctgccgcgccggaccgggactatctgcaccggcccagctactgcgacgccgccttcgctctggagcagatttccaaggtgcatttcagactctctcctcccactttctcttccctcctctaactctttgggatcgcccccgccacacacaaacacacacactctcttcctctctctctcacacacacacacacactcactcacacctctccaggaaaagcagcagacaaatggggattgaaaaattcaaaccctccctctggtcctgggaggaaagggctgtctgaggtccgcagggggtggaggtgtgtgtgtgtgcgtgtgtgtgtgtgtatacacacgccctccctggtgtgccttttccggagcactggaaagccgtccacggcggaccacctcaagggcggccgcggcactgtcctgccccgtgccccctgccctgaacttcttcctcctgcgcccctgcccctatttgcagcctaaactcctgtacggctgccacatttcttaacatcttggagggggaggcggagtggagagaggcggagagaggaaggggggagggagccgaaataaaggtggtttccttttttggcagccagttttggttttgttgagcatgaaatctctgctcccttaaaaaattattctcggaaaaagatatcccccccgttttccaggttttgagccgcctctccttagggcctggtcgggggaggaaaagttgtaaacaaattgccaccttaaattcgcggtgcgagtctgcggagctgccgggttcattgtgtttacgaggctcgctgaaatgtgtggaatccagggaaggcgagcacccagacgggggcccgccggggccgcggccagcgccggggaaatgccgcgccggggagcagcctgcgccggcctgagcccttccctttgcactcggctgttttttacgtttaaccagaaaggaagggagaggagggaaagatccatgtggctgccctcttccgatcacaaatattgtcgtaagttgcagctggctgccccacttcctaattcagctcacacagcctctccccacgctatggaaatgcgtcgggagtgaactccggcggccgcgctcaccacgtggatccccacttactaccattctcggcgggggtccagttgggggaacccgcaatatgttgttccaaagagcgctcgcccctagcgcccgtccccgagggtgatggacagagcaggactggtttg

SEQ ID NO: 42303 - DNA, 2300 bp, Homo sapien
tggaagtattgcatgcgagaaggttggcgctctcagaggctgccccgaagccgaggatgcacacactgggttgcctacctgggtggtctctctactttggtgagctgttgctaagcagctaataatagtcatgtttgctgagtaatttctgccctccgcgagccaatcgcgtcgcagaaacccaagccatctgacagccccgggggcgggagctccagcctttttctctttcgctcgctctctccccctccaccccctcccctcccctcctcctcttctttctccaaatggagagagttcttttttttcttcttccatctcatctattgaatcaaggagctgctgcggccgctgcccgctgcacacacacagagcggagtccccaggtcccgggagcgagagaggcgcgctgcacggggacagaatggtccagcgggttgccgaggagcacaagaaagcagagtccgggaccgagcagccaccgcgaacccagcagccagagcccgagcagcccgagcagcagctcctggagccgccaccgccagcagcagccaccgcgggagcagcggcagctgcggctgcccgggcccggcagcgctgagacccgccgggcaccctcggaccccgcggcggcggcggctctgcgcttgccctccgcggccgctcgggcgacccgggaggcgccgagagagccagcgcggccggcgggagcagcggggattcgctggctctttctgcagtgaaggggtcgcggcgcggggcggggggcgggtagggggagttggggaccgcaaggagtgccgcggaagcgcccgaaggacaggctcgctcggcgcgccggctctcgctcttccgcgaactggatgtgggcagcggcggccgcagagacctcgggacccccgcgcaatgtggcaatggaaggcgcagggtctgactccccggcagcggccgcggccgcagcggcagcagcgcccgccgtgtgagcagcagcagcggctggtctgtcaaccggagcccgagcccgagcagcctgcggccagcagcgtcctcgcaagccgagcgcccaggcgcgccaggagcccgcagcagcggcagcagcgcgccgggccgcccgggaagcctccgtccccgcggcggcggcggcggcggcggcaacatggcctcggctggtaacgccgccgagccccaggaccgcggcggcggcggcagcggctgtatcggtgccccgggacggccggctggaggcgggaggcgcagacggacgggggggctgcgccgtgctgccgcgccggaccgggactatctgcaccggcccagctactgcgacgccgccttcgctctggagcagatttccaaggtgcatttcagactctctcctcccactttctcttccctcctctaactctttgggatcgcccccgccacacacaaacacacacactctcttcctctctctctcacacacacacacacactcactcacacctctccaggaaaagcagcagacaaatggggattgaaaaattcaaaccctccctctggtcctgggaggaaagggctgtctgaggtccgcagggggtggaggtgtgtgtgtgtgcgtgtgtgtgtgtgtatacacacgccctccctggtgtgccttttccggagcactggaaagccgtccacggcggaccacctcaagggcggccgcggcactgtcctgccccgtgccccctgccctgaacttcttcctcctgcgcccctgcccctatttgcagcctaaactcctgtacggctgccacatttcttaacatcttggagggggaggcggagtggagagaggcggagagaggaaggggggagggagccgaaataaaggtggtttccttttttggcagccagttttggttttgttgagcatgaaatctctgctcccttaaaaaattattctcggaaaaagatatcccccccgttttccaggttttgagccgcctctccttagggcctggtcgggggaggaaaagttgtaaacaaattgccaccttaaattcgcggtgcgagtctgcggagctgccgggttcattgtgtttacgaggctcgctgaaatgtgtggaatccagggaaggcgagcacccagacgggggcccgccggggccgcggccagcgccggggaaatgccgcgccggggagcagcctgcgccggcctgagcccttccctttgcactcggctgttttttacgtttaaccagaaaggaagggagaggagggaaagatccatgtggctgccctcttccgatcacaaatattgtcgtaagttgcag

SEQ ID NO: 42304 - DNA, 2300 bp, Homo sapien
gttgtttctcttttacttatgtcacattcgagattcaaataaaaacgcctctgcctctacaagactgcttcggtgtctggattccacgtttatagaacactgactccttcaaaccaagactgtgttttttttttttttaagttggggggagaaagcggctggggggcagacggattttaagaaagatggcttttcccaacgtccttgctttcctctttaactttccattctgtttatcttaatgcgaggcgttgttccctgcaagagcctaagtcttccctttagttataaaagaaaagagaagaggaaaaaaaaatctggcacacactggcgcactatccagcacgctgtcattattggtgcaggcctgggaatgcgagccggacctcccagtatttgctgcagcttgaggccaaggtgcctctgaaaggcttttctttgaggaatttcagaaattgtttaagcgcttaaaaaaatattacatttccccccgtgtctaccgcgaggcaaatgttcgtgtgtgtgcgtgcgcgcgcgtgtgtgcgcgcaaaggcatcccacaaaaagaagacactgttgaaaagaaaaggaataagagagaaaggagggggagcattccttaatggaagtattgcatgcgagaaggttggcgctctcagaggctgccccgaagccgaggatgcacacactgggttgcctacctgggtggtctctctactttggtgagctgttgctaagcagctaataatagtcatgtttgctgagtaatttctgccctccgcgagccaatcgcgtcgcagaaacccaagccatctgacagccccgggggcgggagctccagcctttttctctttcgctcgctctctccccctccaccccctcccctcccctcctcctcttctttctccaaatggagagagttcttttttttcttcttccatctcatctattgaatcaaggagctgctgcggccgctgcccgctgcacacacacagagcggagtccccaggtcccgggagcgagagaggcgcgctgcacggggacagaatggtccagcgggttgccgaggagcacaagaaagcagagtccgggaccgagcagccaccgcgaacccagcagccagagcccgagcagcccgagcagcagctcctggagccgccaccgccagcagcagccaccgcgggagcagcggcagctgcggctgcccgggcccggcagcgctgagacccgccgggcaccctcggaccccgcggcggcggcggctctgcgcttgccctccgcggccgctcgggcgacccgggaggcgccgagagagccagcgcggccggcgggagcagcggggattcgctggctctttctgcagtgaaggggtcgcggcgcggggcggggggcgggtagggggagttggggaccgcaaggagtgccgcggaagcgcccgaaggacaggctcgctcggcgcgccggctctcgctcttccgcgaactggatgtgggcagcggcggccgcagagacctcgggacccccgcgcaatgtggcaatggaaggcgcagggtctgactccccggcagcggccgcggccgcagcggcagcagcgcccgccgtgtgagcagcagcagcggctggtctgtcaaccggagcccgagcccgagcagcctgcggccagcagcgtcctcgcaagccgagcgcccaggcgcgccaggagcccgcagcagcggcagcagcgcgccgggccgcccgggaagcctccgtccccgcggcggcggcggcggcggcggcaacatggcctcggctggtaacgccgccgagccccaggaccgcggcggcggcggcagcggctgtatcggtgccccgggacggccggctggaggcgggaggcgcagacggacgggggggctgcgccgtgctgccgcgccggaccgggactatctgcaccggcccagctactgcgacgccgccttcgctctggagcagatttccaaggtgcatttcagactctctcctcccactttctcttccctcctctaactctttgggatcgcccccgccacacacaaacacacacactctcttcctctctctctcacacacacacacacactcactcacacctctccaggaaaagcagcagacaaatggggattgaaaaattcaaaccctccctctggtcctgggaggaaagggctgtctgaggtccgcagggggtggaggtgtgtgtgtgtgcgtgtgtgtgtgtgtatacacacgccctccctggtgtgccttttccggagcactggaaagccgtccacggcggaccacct

SEQ ID NO: 42305 - DNA, 2300 bp, Homo sapien
ctgcagttcaaccccgtttaaaaaaaaaaataaagtgaagcaaatcaagggtttgcgggtcgggttcctaccgcagggaggaacgtaataacttggaaacgtaagaaaaacacattccactttccgaaaacaaaaatttttttaaataaaaagcctagttgtgtagacgtgtctggctccagaatccacctcaaagggtcgcgtgttttccccctccgcgggaagcgaatccccgggatgccttggtgacactggacgcggtgtcgggacgaatcctcgcgatccgcgcacagtttgttttcaatgaatccagcatcggggcatttataatctcctacgtcatactattattaaatataacatgcataccgagttttgtaaaaaaaaatactgactatataaacatctggttaataaaaaggggtgtacaaatgaacccaaaataatcaggaaaactttactctctcaaggaaacaattccgtttctctaagttgtaaaaaaagattctgttgtttctcttttacttatgtcacattcgagattcaaataaaaacgcctctgcctctacaagactgcttcggtgtctggattccacgtttatagaacactgactccttcaaaccaagactgtgttttttttttttttaagttggggggagaaagcggctggggggcagacggattttaagaaagatggcttttcccaacgtccttgctttcctctttaactttccattctgtttatcttaatgcgaggcgttgttccctgcaagagcctaagtcttccctttagttataaaagaaaagagaagaggaaaaaaaaatctggcacacactggcgcactatccagcacgctgtcattattggtgcaggcctgggaatgcgagccggacctcccagtatttgctgcagcttgaggccaaggtgcctctgaaaggcttttctttgaggaatttcagaaattgtttaagcgcttaaaaaaatattacatttccccccgtgtctaccgcgaggcaaatgttcgtgtgtgtgcgtgcgcgcgcgtgtgtgcgcgcaaaggcatcccacaaaaagaagacactgttgaaaagaaaaggaataagagagaaaggagggggagcattccttaatggaagtattgcatgcgagaaggttggcgctctcagaggctgccccgaagccgaggatgcacacactgggttgcctacctgggtggtctctctactttggtgagctgttgctaagcagctaataatagtcatgtttgctgagtaatttctgccctccgcgagccaatcgcgtcgcagaaacccaagccatctgacagccccgggggcgggagctccagcctttttctctttcgctcgctctctccccctccaccccctcccctcccctcctcctcttctttctccaaatggagagagttcttttttttcttcttccatctcatctattgaatcaaggagctgctgcggccgctgcccgctgcacacacacagagcggagtccccaggtcccgggagcgagagaggcgcgctgcacggggacagaatggtccagcgggttgccgaggagcacaagaaagcagagtccgggaccgagcagccaccgcgaacccagcagccagagcccgagcagcccgagcagcagctcctggagccgccaccgccagcagcagccaccgcgggagcagcggcagctgcggctgcccgggcccggcagcgctgagacccgccgggcaccctcggaccccgcggcggcggcggctctgcgcttgccctccgcggccgctcgggcgacccgggaggcgccgagagagccagcgcggccggcgggagcagcggggattcgctggctctttctgcagtgaaggggtcgcggcgcggggcggggggcgggtagggggagttggggaccgcaaggagtgccgcggaagcgcccgaaggacaggctcgctcggcgcgccggctctcgctcttccgcgaactggatgtgggcagcggcggccgcagagacctcgggacccccgcgcaatgtggcaatggaaggcgcagggtctgactccccggcagcggccgcggccgcagcggcagcagcgcccgccgtgtgagcagcagcagcggctggtctgtcaaccggagcccgagcccgagcagcctgcggccagcagcgtcctcgcaagccgagcgcccaggcgcgccaggagcccgcagcagcggcagcagcgcgccgggccgcccgggaagcctccgtccccgcggcggcggcggcggcggcggcaacatggcctcggct

SEQ ID NO: 42306 - DNA, 2300 bp, Homo sapien
ggaagttagtttttaaaagaaactattatttttaacacttatgatttattctttaacaagaagggaaggggaaactttgaagaggaactttttacattctacaagagagaacatttccaggggcttccctccttcctatacttgtacgttttaacaccagattttctactccctgcctcattatgccactcctgcccaactctaagtacttacactcttgtacaaaacaaacttgtctttgctcccaattgtaaagccttggactaagataagactcatatgaacacattcagtcctaactaagggacagcgtagaccaccaggaccacaaagactgggtagttctgtcgtcctcctgtctgcacactcaagaaaggcgatttcctagaagcccaggtagctttagggctcctccctgcccaggccacttcaaggccctgtacttaattttgtgtttgcagttttgagttgctaaagaagctccccactccccgttcactctgaaagctgcctaagtcctaggccacacaaaactagtgtccactcttgagtatcagccttggccacaactcagcaggagcatgtagccaagtgtgcttccatgagggtcttcattttaactagaaaaagcaaactcctcaagttctgctgtaattttcctagcaactgtatattgtgggccatttaaatgccctttgtcggctgtttctcttttttcttatccccctttctccctcatattctagacccctctatttggagattatgtataccttcctgttcataaccccactcacatttatagataaacagggccctttgatatgacaccaaaagacagggggaagtgtttcgaagggaaatgttgggttttttgttgttgttgttacaactattgtgacttttagaatccatggtcagccaatatgcatttgagtccatttttgactgaagtcactggtatgaaaatgaccttctggaccagccaaattcacagggctgccccccttctaatgcttaattacttaacgtgtctcaaacacatacattctggaaactcaaatgactctgctcaagaatggctacgtcatctttgtgggagggagatcccaaaactcctaggatgattattattatttaataacacatggggcacctcttctacccccgccccgccccccccgcccccaacacacacacacacctaatcacactgtcagcccagaatgaagtgagaagagtctggctttatttcaagaccagctagtcagctcttcagagctgcagtaaatgttctcactccctctaccctgcccttgtatctgtaattcatctttattcataatgtggcccatttaaagtcgcagtgtgtgaaacaccgtctaccagcggcggggttgagcagataaaatgtcagacattgtagcgggggcgctcccgaatagaacgcttcagtcttgagcgagagcagggttatccgcgcgacccaccagctcctaggtttaggccagtcacccaaggccgcctggcacaggacggcacagtaggtgggagcatttgggtggcataccccagaaaccacaggaatcagaagagaaagggagcaaatgtcaatccgtgattcttcggaccaggtacaaatcttggtttccaagggacgccaccttggtctctttcagaagaaacggcttccgagggaccgacacgaatccgcacacatctcgtgctgaaatttccccgggaaggcgctgtgatctgtccggttttcctgctccccgcccctctggcggcccgtaggcctgtcatctagaaggctcccagcttttccgcgcttccgtgggaatgcgagaaggaaaggctttgagaatgcaagcatgaaaggtggtgttcttctgcagtcctctgggaaccccccacttcccggaccgctgaggatgctaaaaggagcttccttgcttccccacacctcccccgaccggcgttgggacaagatggccaaatgttagcaaataatgtgtgcgggggcgggggagccgagcacaaggtggagaagccgcgggagcgcgcggagacccccagcccggcggccccccgcaaacacggccgcggggggcggggagagggtggctaggctcgcgggagctcgccgggcagggcgcctcccaggaaggcggggaggggagcgcctgtttacccaggagggctgtgctgatagcacgttcctcgagtttactttgctttccttgagtttattgtaaaggggtaaagttttcggatccgtcacgtgaccctgacaggtc

SEQ ID NO: 42307 - DNA, 2300 bp, Homo sapien
ctttgtaataccctttataataaaccagtaaacctatgtttccctgacttctgtgagccactctagtaaattaatcaaacccaaagagtgggtggtgggagccccaatttgaagtcagttgggcagatgttccaggggccccaacttgtgactggtgtctgaaagggagatcagtttagggtactgagcccttaacctgtgggatctgaggccatctacaggtagatagcctctgaatttttttttttttttttttgagacagagtttcactctgtcgtccaagctggagtgcagtggcttgatcttggctcactgcaacctctgccttccaggttcaagcgattctcctgcctcagcctctcaaatagcagggattgcaggtgcatgccatcacgcctgactaagttttgtattttttagtagagatagagtttctccatgttggctaggctagtctcacactcctggccccaagcaatcctcccgcaaagtgttgggattacaggcatgagccacagaattgaattgaattagacactcagcttgtgtcttctgcttggtgtctggggaaacccccacattttgtcactgaagtcttctgtgttcactattttttttttttttttttttacgtaagagcagaggaaaaactgtgtgagtttaagtagttgactcacaaaccctaatcttaatttaggttccagaatggcccaaggcaaaggttttaaatagtccttctccatctgccctagagggtttatttgttatcacaggggttgttagaaggaaattttctttgaagaaatgagtgatgctaaggcatgtagttggctgaagagacttccactggcacctcctcccttgatctggcaaacccagcagctgaccacctttggagtgacagaatctctctctctttatggatagaattctgtcctatggtccccacctaatggagagccacctatgtcatctctgtcacctactctgatgttaaaattttgttgtgaccacaacaaagtaaatatttcctgcaagatgctttccaaagtacctaaaaagacaagagaatgagaggaggaggttgcatggctatttttgtacttacctcccaataaatgttcgtgtgtatgaggcagaatttggtctgagacttgctttcatttaaaaacaagtcctggtgaggtagtgggagggaaaggacctagaccttcacctccttctaactgctagaggctaccaatattttttaaaagagcctgatatttgtgaatggctaaataagcccagagattaagaaagtaaatgatgcctcatattcttgctggttacatgttccaacaatctgaacagtaaagatacctgaaaaaaatgattatcaacacattggtttagtgcagtgattgatcataaaagataaatgatccagctgtagaaattgggaatatgatatatgataatgatagcaaggcaaacctaacctgattattctagatattcatttgtcatttacatggtgtctgctactggacttggctttgggcaggctcaggttctagaagagtctttcatgcccccagtgatctgtggcatggctatggacaatccctgggtttaactcctatgtgtgaaaaatctagaggattctagtggccgaacatacagaaaagtaaatccaaaatctaatcttgctttgatttatgtggttggaagcggggaggtttgggaaatgcagtcagacaaaagtcatcccatctaaatattaaatgcaagagaattaaaaggagacagagaatagaaaccactgtcaatatgttgcgaatctgacaactctgggattagacatgattttcccatgttccctcacacaaaccctccattcaggccaggcctttgctctttctatccccaagagcttgcccaccaatttacaccttggctcatgaaacctaggttgccctcctctattcacaaactctcaccacccttcagctatcccatcctcatgtataaaatgcctccccaactcctgttagccagtgttgatctcttcctgtaaactctgttaactttgccacttatatatttcatactttttcttcttgagattctaagtcccacaaacatttactggggcaggcggaccttgtagtcttgtgagactatggacagatgaggactgtccatggttagacatgattagtgaacaatcctatactgggaaaacacatgcttaaatgggacaatactgaagtattatttgctgcattctggacttcttcccttaatctgcattttt

SEQ ID NO: 42308 - DNA, 2300 bp, Homo sapien
taggggaaaaaaagaagcttgattaaaatttcaatttgccattttgattttagagacaatgtgaaaagagatataatccatcaataacaagcagcagatttttctagattttaagatttccaatatcagggtgcatgtcagaatcaagaattacaattataattagtagtgtttttcgctgtgtcgccagattagagtgcggtggcgcaaactcggctcactgcaacctctatagacctcccgggttcaagcgattctcctgcctcagcctcctgagtagctgggactacaggcatgtgccactacgcccagctaatttttgtatttttattagagacggggtttcaccatattggccaggatggtcttgatctcttgacctcatgatccgctcaccttggcctcccagagtgctgggattacaggcatgagccaaccgcgcccggcctattagccaaaatattaaactgacataatggctatgtagaatgcaactttcaagtggatgcattccattgataataatagtaataacaacacatatattccttactatgaccagctactgttttaggagttttacttaattatctaattttttacaattaccatttttaggtagtttactattattagcttcactgtaatggtgataggtgagtacaataaaacacggagaagtgatctggccaacaactcacacatagatggctgagttagatgtttcacttaggcttaaagttattgcctgctggtaagcaaacaagtcatattttaaatgaagcattttatgaacacatactactagtttttagtatctgccatagaattgagatctatttgcaaacagccatattgttttcttaagacactactgtaggcagaataatgatcccccaaagatgtttatctcctaatttccggaattcgtgaatatattagcttacatggcaaaaggattctgctgatgtgatcaagggcagagacctggaaatgggaagatgatcctggattactcaggtgagccctcagaatcttttccagctgcaatcagcggtagacttgaggatggaaggttcagagagatggcatatcactggctttgaagatggaggaagggaccaaagccaaggaatgtggacagaagctggcaaaggcaagctaaggattgtcctgtggagtcaccagaaaggagtgcagcccgggtgacacccaggtagcacttctgatctacagaaccgtgagataataaatgcattgtctgtcagatgataaatttgtgctgtttcaagctacaaagtttgtggtttttggttattgtggcaatagggaacggatacaggccctgtcaggtatttcactcaatccatgaaataccttacagtatacaaattttaacatgcgcgggagccacttacggatccgtctatctgtgctgcctgggagtgtcaagaggccgtgtccttcattcacctcgcgcgtgggcggcgctgccctgaagatgctcccgggctcagtgcagacggctcagcgttctctcgcgttcaacgaaccgccagaaacgtcagatggtacggaggaaaacactttacactttaacagtatttttacgtttatttgcagcaaatgttgttggctttgtatttaaagtatttatgactcactataaagtgtaggatccaagaaaacgcgctagtttcacttggcccccgtggctgtcccggggagctctccaaggaaggactggttcctgaagttcctggggtgctgcaccaccacggaagaaccaagctccacagagaagccagaagccgcgaccgcggggacgctctctgccaggcctccaccgcctcagcggccctttacagccaccgcattctccatgcccccagttatttctagcttcgcacagcgcccggcccaccgagcgacctcaaacctcgcgacactcgcaactcccgaggcccttcctgctactggcctcagagggaagagacatcgggaagattgctccgcccacagaaaggaagatttcgttctcgcgagatcccaatgacaattcgggagcccgttctcgcgggattttccaagaccgggttggaatttgcgggggttaggagacggaagtcagagcctaggaagatttgggggtcgccttgccggcctcctgtcctcctccggcggcggcggagcccgagagaactaggtgaacaccgctttgccagcctcacacagcgtcccctggctctgccgccgctccggacgtcgccctcccgttctgcttgggtccccttagtcgc

SEQ ID NO: 42309 - DNA, 2300 bp, Homo sapien
aaccagtctctctgctcccagtccacctatttagcgtagggtacccattattctctatctcatcattttattgcctctgtagcacttatcataacatttaattatcatgtccactggttttttgtcttttccttccagtagagagtaatttcctttccaagaaaagtttgtactgttataaattttatccccaggaccaacacagagtcacacagcagacattcagtgaacatgcgaatttattacacattcttttttttttctttttttttttagacaagagtgtctctgtcgcccagtctggagtgtcatggcacaattatagctcactgtaaactccaactcctgagctcagccatcctcccgcctcagcctcctgagtagctgggactacaggtgtgcaccaccatgcctggctaaattttttatttttagtagagacagggtctcgcttatgttgtccaggctggcctcaaactatcctcccgcctaagcttccccaaagtactgggattacaggtgtgagccatgcgcctggcctattacaaattatcaatctcacaaatccttgatatcttgcgagaaaactaaaaagtacaccaacatatacataactgtaaaaactgcattggaagaagagtgctatgagaagggagtattgagaaatgtaatttaaaagggaaaggggtctaagaactgtatctcagataagtgtacagcatgtgcaaaaaaaaaaaagccttaagggaatcacacaacttattggagtattttgggtttgagttcggataatttctaggacgaaataaattcagttgagttagaaatggaatctctcagtatccaaactacagaacaactgcttaaattgttaagatttcctgttggatttaacagggaaatgggttaagtgtcctaaaatttaatgagtcgaaatcatttgttttggtttaaactaattaccaactcaactcattctggtgatagggtctctctctccctctttcactccaaaggcctcctcaagcattcctcaagggtgttcccacctcggggccctggagctttctgctccttccaccaatttccctaaataccaagagtgactagatttatcaaaaggaatgagcctcccagtcacaatatccactcggcagcttcatctatttttagctgccagtctcctataggtatttatatgtttggtccctgaattacagcgtcatcaattcctagacctcagaattcaggcttgtaacttgccctctctgaactttagctctgaattcatctatttaatgagatcgatatcttcctcaaaggaaagcaagtaaacaatcagcatattgctgggctcaggaaaatcactcaatacctggtagcttttgttatacagcacaattattaatgaaaactactcatttgggtgccagaaggcatcccaggtgacttgtggtagataatcacaccttctttaaacctcctatttaaggcagaatataatgccctgactcaataggcaataaaactcaactgaactaaatatctcaaccttcatttatctacttacaacaaacttctgccattcactaacaactggggcatacaagaataaagaatgaaaataacatttactgagtgcttaatatgggccacacgcggggtcacataaatactttgcgtattccccacgtcatttaataatcgcaagaacctagtaatgaacccagttttacagatgaggagcctgcccaaagttgctcagcaagtaactgtcagaggcagcactagatcccaggggctgactcccgagtccaggttctcaacactgaatcggagatttggttccaggcctggaggggttcacaatctgcagctgtcactgaagaggatctacagggcaaaaccccaacccgaagggcaccggcaagaactggtccaacgcgacgcagtacacaggcctctgcgtaaggggcgagcgcggagctggtacctttgcctgaggtttccgcgcggggctgtggcgccgacggatccatccggccagggggaggggccgagcccggctgcatgtaacacccggaaggcggcggaggacagcaaggtggctggccggcaggccaatggcggccaacgccacttccggccgccctccgagcatcgctcttcggcaacccgaagccacaggatggaggagggggatcccagcaaaggtagcgactaaggggacccaagcagaacgggagggcgacgtccggagcggcggcagagccaggggacgctgtgtgaggctggcaaag

SEQ ID NO: 42310 - DNA, 2300 bp, Homo sapien
atccctgaggaattgccacactgacttccacaatggttgaactagtttacagtcccaccaacagtgtaaaagtgttcctatttctccacatcctctccagcacctgttgtttcctgactttttaatgattgccattctaactggtgtgagatggtatctcattgtggctttgatttgcatttctctgagatgatgccagttaataagatgcaggaagactattagtcaccatcatttttgacattagttttcttcattttatacccattgtgtggtataatatttggtgaataatttgtgcttaaatcacatatgttgaataatagataataaaataagtcttaagaaatgatagggtaggcaaacacataatgggaaatataagtaatgtgttaagaattgctgtaagggttgctttaggttttaaggtgcaaatagtactgttatgaaaattgggcccattgacctatatgttgttctacttgtacagtggatcgaggctttagtttgacattaaaacactcttttagaatggtgtaacagttgtcaacagtttgggtccagagagtagagtgggagagaaggtttttccctctgtactcattattgttatggtaaaataacctcatcaaagttagtggctttacttttaaggaacaactgatggatgaggaatttaatgagctattcttgctttagatagtataaacatgtcatgttgtagttataaatatctaactggaggtcatcaggaagaccctaggaaactgccagtggttatctgatctcagtgagaaatgtataggaaaaataattcctagtgttcttatgtttgtagccatagaattatttttggattcttgccataagaaattccatttggaaaattatttttacttagttttctttatttgatactttttaattgtaccaatagtatactgtggactccctcctcattcatagtggtatattttctgggaaaataaaatagctgtatggttagtcacagaataagttcataaagagagaggtaatactctttaaagtgtaataggatctttgcagaaagagatcttagaattcatctcttaaagtaaatattcaaaacccggaagaggaaaagctgtgacatcactgtagttgaattggaggttcccatggttagctgtatacaagcagtggttaaagtaaaggcttagaggcaacaatattgcagtgaaaagaaacagctgtttctagagaaaggcaatggaataactgtaaaaaagacagatgaaccacaaagcattgctgtccagaggattttagtttactcattaccaagtcctattcacgattactctaccatatcatgaaatatatgtatatatatatgttcatgagtcaggaagaatattttagtcagtggctctcaaccctggctgtgcgtcagaatgatcttttgaattcaacaataacaaccaaacaaaacaataaaaccagatgcccgtgacccctatccactgaataagaatcactagaggtggtgtctaagaatgtatatttttaaactccaggggagatgatgacacacagttagggtaagaaccactggaaataaagtatgtaccctttattctgtttattataggagaatatctgaaaatctattttagaaaaatatctatacatgttagaatttatcttgttccagttttttggaaaaggcatttatgtgaggtatatattgtttctcacagctgtgaataaatgaggtgttactttataagctagctttggaaactttattttctttattcttgcagacatatggcatccaggagaaagatgtcttgccccttctccagataatggaaaactttgtgaagcaagcataaaatctatcacagtggatgaaaatggcaagtcatttgcagtcgtcttatatgcagattttcaagaaaggaaaatacctcttaaacagcttcaagaagtgaaatttgttaaagattgccctaggaatcttatatttgatgatgaagatttagaaaaaccttatttcccaaaccgaaaatttccatcatcttctgttgcttttaaattatctgacaatggagactctattccttataccatcaataggtatttgagagactaccaaagagaaggaacccggtttctttatggacactacatccatggaggagggtgcattctgggtgatgacatgggacttggaaaaacagtacaggtatttaattatgttataacagtaaagtcactttactgtgtacatgagtggatactatatgtaaatc

SEQ ID NO: 42311 - DNA, 2300 bp, Homo sapien
aattaataattaaggctgatttaacattcatattataagaacaaattcaggagcagttcaggcatttacagctaaactgaattttaactacaccaaactgtaaatccagtaccacctagataactaacccatcccaaataaataatttttgactaaatggtaagttaaatggaaaaatcaccatcaatgtgtatttaaaattattgaacccaaatatcaaaattattctctaacctgaaagtagatatttgattccttaattttgtgatctttttagtagcttgtcatctcatgtaccaccaaatctttatttcatcataaggccatcttaaaggtaaaaaacatgtgtggaaggtttttttgttattgttgctggttttttcttgtttgtttttagagtcttaactatcaatttataccagtccaatgagtttaaattggggatgaaatttctataaatttagagaaatatatgaatctcaaatattggcaaaagtattatcagataatactttccgcaatattttactagtagagcctcagttttagaaaactaggttatatttaactctgattaatgtgcaaaggttacatattgaatttaaatttgtagcaaattttacttcaaaattctttatttctggtgatcaagatcctatcggcctttttaatcaattagaacaattttccagtcttgaattctttaccttgttaactcctgtaatctgtcttattcttaaagcgtgattggaagcatctgctagatgacagtaaactccagtaattcttaagcagtaagttgtatgcttttcactttcgaggccagaattatgtgtccttgcatcttagaagccaaacactccactttgtgtttttcttcaaaatactttgattatatggtactctagtttaaatttttttattttgcaacaatattcaacatggaaagagaaaagactaccagactatgatattaaatccttaacatttgtttattaaatgttgtacttttagaaaatattaagtgatatacttgtacctaaattacctgcccaaagttgagtacttttcagttgattccacattatatcttgaggttttctgatgtttttgtcattgtttctcctatagcctagacagcctgactgtcaggaatgcagaggtacagaacaagctgcagagccactggcaaaggaagcatgtgatctctgcagtgacttcagtgatgaagagccagtgggagccacaggaataaagactgccaaaaacaaagcacccgattcaagtaaagcttccagctctccaggacagcttaccttactccagtgtggtttctcgaaattgcttgaaacaaaatgtaaagcagttgaggatagtgatggaaatactgcctctgatgatgaaagttctgatgagcagcccacatgcctttcaacagaagccaaagatgctggttgtgagaaaaatcaggactctcttggtacttcaaaacatcagaaattagataacatcctaaatccaaaagaaaagcatattttttataaaagtgagaagattttagaacagaatatttcttccaagtctgacgagaaaaaaattaaaaatacagataaacattgcattttacagaatgtcacagaatcagaagatagtgatgtcatctgtcctacacaatacacaactgagagattccccgacaatagtataaggtttaagccacccttggaaggatctgaggattctgaaacagaacacactgtaaaaacaagaaataatgataatagtcgaaacactgatgacaaaagaaatggaataatttcaaaaaagttaagtcctgagaacacaaccctgaaatctattttgaaaagaaaaggcaccagtgatatcagtgatgaatctgatgacattgaaatttcttccaagtcaagagtaagaaagagagctagttcattgaggtttaagagaataaaagaaaccaaaaaagaacttcacaattctcccaaaacaatgaacaaaacaaaccaagtgtatgcagcaaatgaggatcataactctcagtttattgatgattattcatcctcagatgagagtttatccgtcagccacttcagtttctctaaacagagccacagaccaagaactataagagacagaactagtttttcttcaaaattgcctagccataataagaaaaatagcacttttattccaagaaaaccaatgaaatgttcaaatgagaaagttgttaatcaagagcagtcgtatgaatcaatggataaatttttaggtaactaaagaca

SEQ ID NO: 42312 - DNA, 2300 bp, Homo sapien
agcaattcctatcatcacaattgtttcaagtcttatccaagccctgtatatttcagatcatccttaatttcttgttctgtacccagaggagatcaggaaaacctttaagtctctatgtgaggcaaatacatcctcctcactgccccagccccatgtgattgatgaagcaactgaggaagagaagtagggtgcttctggcactggaggagcgcagtgctgagaaactccgggctccattcggaaatagcactgatttcttagtgtacttttttttggtgttaatatagaaaacatcaaaaacacagttaaaagaatgaagcatgtctacatacgtgtggccagaaagactgaccagaagctggtagcagtgagggatgacagtgcttgcccctgggttgaatagtggaagagttaggggggaaacagtctgctctttgagaccctttcaatttcatgtgatggatttacagagacagatgaattaaacattatataaaaaaggaataaaaccactggtaggatctgtattccaggaagaaaaaagcatattacataataggtcaatgcacagaaataaaaaaaggaatttaactagagcctatgctaatcataaatcccttccctgttccagagtcctgttgtctctggggtcttggcctgtcttatctaggccatggagtggtgggggtgggatgctgctagttcctaggcaggaaatagtggccagttacccttgtggtgtcatttctgggtcctggaaaggagaccactgctgacccctgactcaccaaccaacaattattgatggaaatcccaccggcctccccggacaaaggcagcccagacctggactcattcacatgtaaaggaagtggccagaagtggctgctgttggcaggggtgagggacgggagagcgcgctaagtggcctgtgtctgtgggggagggagagggtggagcagcacaagccggcctgaggttaggagcctgcggtatctccaggaaagcagaggcggctgtggggggcgccggggctgaagagccaagtgtggagactgctccatcttgcccatctccagaaactcagaccacccatccattaaaggcaggtggatgagcaagggggcctcgcaggcattccagatcacactgaacctgtgccccactgcctgacccattcagcatccctattaacagacactcgctgccgtctggcccggacccggctggcgctgcgggtccttccaccccagttaggaagggtcatggctcccgcggaagcccctgccagggtgaataaactcggcgtggggctgacgggctctgaattactccgttgcttacaagccgagtgcccctctgtgcctcagtttctccctctataaaacaatacgaataccggcccagaagcgttgttgggcagattaaacgagaaaatccactggaagtgtttaacaaacgacacacaatacgggcttcatacctgccagccgatgtcccctgcagcctttattccctacccaattccccttagcctgctatgtggagatacaggaggcttgcacccgccgcggtcccggtgtattttaacgggctcccggggaagcggtgtggaaaatggattagggagggaggaggccagagcctcggaacccggggagaggtctgcaggcatccagttgggagctggaagggcgggacagggcccttggcagggggatccaggaaatattttggagaaattctctctaggacttggtaacaggttgagagcggccacttggccgggggcgccggcttcggaggcgggagggaggtggaggaagggaaggcagctgcagggccgacctgcggggtgggcgtgaggccgggggattggggccgcaggggttcggcctggaggagcggcgtgggggcgccggggccctgattccatcctgggcgggtcggccccgcagccgctgcgctcggaaccccctaggcgccccgcagtacccggcgtccttcctgcctcctcctcgcccctgtcctccgtccgagccccagtcccgccgaccctgccggcgcctccgccctcccgccctcccgccctcggtttcccacgacctcggcgcgacgcgcgcgggatccagtggagactgctttcccataggccgccatccagggcggggaagggagcggaccctcccggctccaggtgcctgggcccccggcggcctgcggaggcctcgccccacgccacccgcccactggcctcgtcttcgcgcgggggtgagagcaaaggaggcactcggcccatc

SEQ ID NO: 42313 - DNA, 2300 bp, Homo sapien
gtggcttaagttcttttgagtggggtcttaggaaattcaggccagacgactggactccagtttatgtgaccctgagaacttagtcacaattaagatggttctgtctgcccggagcacacagaggccccctgggaaccaacacacaactccacatcccaccaactctgagtctcaagtcatccaagacgctccctctctcttgtaaaatgagttttactctattgtatcttactgccttgcagctctgaactcccgtgactccccagcaatacctagggggaggaacagcaaagtattagaaaggccttccttggactaactggtgtaactgggaaaaaaggtataaagcctgtgacaattctaaacaccctggctgtatacaataactccagatttggaaatatgacatagcctgtgtttttggctactactagtaattaaacctggatctgtttcacccgaagcaagagcactagtgggcctggaagagtgaatgcagagccgtgtggctctgggctcactgtgcgaaaacccagagccctccttccagcaagggagctttgctgcaccagcactcatgacacccagggctttagccagttagagtcacattgtgcaactgacatgcccattctcccaggccagagtgactgctggatgtatcacttctctactgctatgagagaaaccacctcaacgcctagagacttaaaatgacgacaatcgattatcgctcttgattctgaatgttggtttctccactggttcacctgggctcgctcacatggctgcattcagctggagggtcagctgggctgaaaggtccacttggcggtcaagccttggagatcacataaccccacctctgatgcagtctgttggtcaaagcaagccacatgtcatgccctaatttaagaggaaggaaaacagattccacctcctgatggaagtcgtggcacagtcacatcacacgagatcatgggctaaattgatgcagccatctttggaagtggttggagtagcaacacaggtgtgaagtcctcctgaccactcctggctttatggggaagaccttgcaggagaggcctacattcctctctggacaaaggccttctttgtaggaagaaaaaaaaaaaggaaaaaaggactctgacatctttggtttggggctcagaatggagtttctgcctctaactagttacaactatctaggttgcaagtgacagaaaccccattcaaactagcttcagccaaaaggagaaacattactgtgatcgtggatcccagtggcaggaaggcagcagccttgggcactataggaagcagaggctccatgccccaggactctccttgcctctgcttcctgtttctctggagccctggcttccttctctctggctgtggagtgcattcctccctgtggtgacaaatacagctcccaacagctccagattttacaactattggcgagaaatagaccctgtctcctgtgtagtttcaaattcaaatatattggggaaagaattcactaacaatgagttcagggcttgtctgtagagcagtgaactatgggcaggggcagggccaggcgatactatcaaagctgccatggagccatgttggtggagcgtggcagggcatctcgagggaaggtgtgagcaggcaaatccatgggcatccactcaacaacctcagagtggacaggcgggagtggctagagggacaaagcccaggggcaggctgcctgtgctggggtctccatttcaccactcgttagctgagtgtcattactaaatcctctgtgcctccatttcctcatctctgaaatgggcataagagttcttatacagtttggaggataacaatgcattcatagttcatatatgtgttacagttttgatatgtgtcccctccaaaactcctttttaattgaatccccagtgtggtagcattgagaggtgattgggtcacaagcgctctgccctcatgaatgggttaattcattcgtggatgaatgatgaatggattactgggttaatggactgatgggttattagggagtggaatgggtggctttataagaagaggaagagagacctgagctggtgctctcagccccctcatcatgggatgccttgcaccaccctggggccctgcagagtccctgccagcaagagggccctcaccagatgcaccccctagacttggacttcccagcctccagaaatgtaagaagtaaattccttttctttataaattacccagtttcaggtattctactacaagcaatagaaaacaga

SEQ ID NO: 42314 - DNA, 2300 bp, Homo sapien
agtggattgaaagggctgggaccctggacccaggcttgttcttggatcacaggttacctttggggcttgaggcctgggagggaggatgagacacgggctgttggtaaacttgtccatatcttcagcaatctttcttgtagaaggtgcctgcaagaaccttgctcaccatgagaaaacatatgtgctgcctccgtgtagttcttgcctgagttttaacttcattaacattttcccctgttctctcccactacccttcccacaaaggcaaagacttaaggtattgatgtgtggctgtagggagaatgccactgctttgtgtgccacagacggcacttccccatcttcaatgtgcccacctgggcatcctgtccgcagattcagattcaggaggtggaggcagaatctgcatttctgcctgtgccactggcgcccaccctcacttacagtgacaggctctagactgcgtttggcttctgccttttcactctgaactgctacaagatcaccttccttgctggcagtacacctcgtctgttgcctttaagtgccgtaaaccgctctgcttcaggcacctctcacatgcagtccccctctcctctagagtgtgctgcaatgaagcacacagttgagggggacatgacccccatgacccgtgagcaggtagaagcagaattgctgcatgcgggcttcgtgtgttcgtaagtgctgcctagccgggcatggtgctcatgcctgtaatcccaacactttgggcgggcagatcacttgagctcaggagtttgaggccagcctggccaacatagtgacaccacgtctctactaaaaatacaaaaatggtggcatgtgtctgtaatcccagctacttgggaggttgaggcaggaagatcacttgaacccaggaggtggaggttgcagagtgaaaataataataataataataataaaagtgctgccagattgcttttaaacaagccctgcctcctgttaaaatagtgttgctaagactgttcactattatcccaaataaaacttccataatagtaacagtaatattcaagataggcaaacatggtggaggggaggttcccacggatggcagcctaagggaaatgtcaaggcgaggacagacatggctaatgaggagactgccttgtggcatatcacttaaccacattctcttgtctccaagaaacctagaatgaaatctgtgctgcctgctacaacctgtggctttggattttctcgaggccccagagcgtcaggtaatatcttggagccccacttttcatgtttcagctcactggttcccacctcacctttgagagggctattagccacccgctttcacagacgagaaagcaaaggccccgctcctcccccactcttatctctaggctgtaccggctccctggggtggtgataaagtagtgagttccatttctgggtgagacttcccagggagtctcaccttgtaggaggaaatactttcataacacacaggagaggaaactgaggcacagaggaattaaaagtcactcacctcagtcacactcatgagatggagaggcagtgttgcttggctctgcagcccaggtctggaggcggggggagcacactcatcacccctctcatgtaccccctgcagaagtcacttgattgttttaccgaattgcagaacatccatttaactcaggattcaaaatgagagctcacaagctttgaaagggcagaaagtgagaccattttctgccccttccaacctctgccttctgcttgtgagtcaggcactgctggtttcatcccacaacctggaacacggggaagccaacgtgcatgacgtccatgcgccatgggctccatccaaactctccccatttctttccacagaggaagttttccgaatggcactctgcgtgggaaggagcttgtgcacgtgcacgctgccaccatctgccctcagcgctgattcaggaggcgcttctcaactatagcccacagtgtgacaactgaacgtgtcccctcacgtttccaaatacggggggtgcaggaggcactgctcactgttgcaccccctgacccacgctgccagtcctgccctcactgctgggtgctcactgggaccctggaaaggtctagctgagccttttagggcatgaggatgttgggagaatagaggtggctcctctgagaagcctgagaagtgtgagtgtataaatgcaggctgaggtcgtgtctccctgggattgaattcacccaacctcaccctccgtgtagcgcaaatgcccagctcctccagggaa

SEQ ID NO: 42315 - DNA, 2300 bp, Homo sapien
agccatgataaccccactgcactccagcctgggtgaaaccacaagaccctgtctcaaaatttaaaaataaacaaacaaacaaataaattaggttattggaaactctgcatgcaaaggtttctctttcagtaggacttcccagaaggaaactggctattttgttgaggaactcttaaacattattatctgcaaatcctatctctgggattgatgagtttccccagagaagaattctctaatttcctgagcctggcctagttcacagccaagtgaggaaaggggatgccacagggcttgatttttattacactccactgttttcacctagacctgggtcctgagcctggactccctttcctttgtcttctctagaaagtgacaacaactccccccatccacttgtcttcttctggatgagggaggggtggtcccagtcctgagtgaggtaagcaagggaatctctgacttcttcttttatagattttcaattaatcctctcatttttagcccactgggatattccccatgagcaatgccctatgcttccacttcccaagactccctgggttctgcgttgtgaatctgcccagcagctcctgccccagcccttgaagtgctagctttctgcatcctgtggtctgttcacttactcactgctagatctgacttcctcttgcagtcattcagttgacctctctctgctgtgactcctttcatgttctcttcgcttttgtgcgccaatgtctttttgtccctttcctgtcactttcatggagggttaggagggaatagagacaaatggctgtgtgcaattcatcatgcttacataaatttccataaagccacagctcctgatgttgttaaccgtcccacctgtgtgtttcttatccaccctcaccccgcactggggacaatcccattgtctgctaactgcttaccacatttccagtgaaatgaccttgcctttcatttggatttggggaggggcagagtgttaggatctgcataacaagatcccccactttcaatgtagaatcaagaatgggaaataaagcaacccttgctagtttccaaagtattagataccgctcctgggtctcagtaactctgaatatgccagacttttatcaaggagtaaaacagtcacccacgcctttgtgaaagctcgcaagtttgaaattgtgccgaatgaggaaaagcttccacaccagacagttccaggtgcccctctgaaagagttatccctttgcctcaaaaagaaaacaagacacaacaaaaaacaaacaaaaaaaccccccaagaaacaatgacaacaacaacaacaaaaccctctgtggtcacaatggagaaaaggtaggactagggggcagcggggcttgagaaccctgccctcaaatgtttatataaaaggaagagctgcctggcacggtggtaactgagctgtgtcccttccaggctgagctctgtcttcagctggacaatttgagccagctgtgcctgtttcttccccagggctgagaaggcttttattcacaggcagtttcctgggattgccattagtgaagacagggatcaaggactcacagacaatgccctgcaaagacagccactcccttggcaattggggcagagtttgcatcttggagctggaaccttggcggcccctgagcacagtgttctggaggagtctgtgctgaagggcagcctggaagcctgtgggacattgggaacggtaccagctggggcctgggcttgcccctgggtacagaatgttttattcagtgggcaaagcagtgccagggtggatgaataaagccttcagattctgcatgggggtttgtttaactctcccccttctcatcctctgaacacagccagaggcatttggaacatggcccatatgatcatatcattggtgacaatggaatccaggccacccaaaatcaatgagtctctaacaaggcacaactggctgctgggacttgtctccagcattgcaacattgccagctattctttgtctaagtgcactcatgttaatgtgtaagccatttccttcccagtgagaaggttctttgtgagattgctctgtatgctcacacttggagactgaaagttggactcgtaggtactgagcgtcttgttgtggagaccagatgcaatgcctgggcctcctgctccagctcccatccagccctgggtcaaagcctgcaggcgaaggacaggacagcagagtgagctccaggatgtggaggaaggaagatgaggtgtggtggggaaagggtaagtgggtgtggaggg

SEQ ID NO: 42316 - DNA, 2300 bp, Homo sapien
aaaagaaaaggaacttttagaaatgaagttaaggtcattaaaataaaaaccacaatgggctgacttaacaatgatcagacacacctgaagagataatcaatgaccatgaaggacagagtgagcaggtcgaatttctgactaatcagagtcctgaaaccatctctaaatacagagaagggaaagaccaaaaaccacatagaaaaacgggcaggagagagaaaattcacaaagaaaacagtgaaaatagctcttaggcttaagaaaatctctccaacctggctgataagataatttaaacttaaaacaacattggatgctacttcttacctactgggtggcaaaagtcccaaagcttgacaacatgctttactgctaaggcagtgggaaaacgaacatgctcacgtgttgttggcgtgaatgcaaaatgaaggcaaatctgacaatatctagcataaagacgtatgaatctatgttctggccagcaattctgcttctagggtgagcgcaaggctgttgattgcagcacagagtgagctgagagtgagcacaggcagaaatgagagaaggccaaggactgatcctgtggcctctgcagggatgacttcagtatcctggctgcccttgcttcagttgtcacacccaccctccatcccacccccagaaggacatcttccctcagcatccagtggccttttaaaagcataattcagagtatagaactctgtttcctaaatctgtgcaatggcttctggttgctctgaaagtccacactcacccgtagggcatggctcctccctcctgctctggccttttcctcccttactctctgtggccagtccctctgctgtgttgtcctagtgttttttttttttttgagatggagtcttgctctgtcgcccagactggagtgcagtggcacaatctcagctcactgcaacttccacctcccaggttcaagcgattctcctgcctcagcctccgaagtagttaagattacaggcatgctccaccacacccagctaattattgtatttttagtaggtctcaatctcctgaccttgtgatccgcctgcctcggcctcccaaagtgctgggattacaggcgtgagccaccatgcctgtcctgtcctagttcttattcctcaaatacgtggatttttctcacttcaggcattgtactagccgttccattagcctggagggggaaactcatctttgcggagctggctccttttcattcaaatttcaactaaaaatgccacctcttcatggaattccttcctgaacaccctctctgaagcattccctgagtagctactcaaacacatcattcaatagtgctttttcatagcactgatgttatcttttttttttttttgagacagaatctcactctgtcacccaggctggagtgcaatggcgtgatcttggctcactgcaacctccgcctcccaagttcaagtgattctcctgcctcagcctcccaagtagctgggattacaggtgcccaccaccaggcctggctaatttttgtattttaagtagagatgaggtttcaccatgttggccaggctggtcttgaactcttgacttcatgtgacccgcctgccttggcttcccaaaatgttgggattatgggcgtgagccactgccccatctgatgttatcttatttatctgctcatcatctgtccctgctaccagaatctaagctccaaaccagagagaccctctgtggtcactattaacttcctaatgccttcaagaggggactccacctggtaggcagtcaatacatagtgctaaatgtatgaataattgccttggattctgcatcctttttaactttcccaaattcagggagagaactgtgggctgccattttatatttgtccaggctttgtttttttcccttcatgtccaccttttactttttcaccagctcctccacagtaacaaaagccttattcaaaggcctgtgagtcagaggattatgtaaagaagttactttaatctagatgcccctgacttgatggaacacgtccagtgactcctggaagaagatctggaggtctccagagcagcgtggtcccaggaggcatacacagagagccacggccagggctgaaacagtctgttgagtgcagccatgggggacgtcctggaacagttcttcatcctcacagggctgctggtgtgcctggcctgcctggcgaagtgcgtgagattctccagatgtgttttactgaactactggaaagttttgccaaagtctttcttgcggtcaatgggacagtgggc

SEQ ID NO: 42317 - DNA, 2300 bp, Homo sapien
cccttgtggaggtgtatgctgtgtggtgagatcatgagctggtgggttggtgtgtgggtgtttgcttgtgtggatgcatctgaatacacacacatgcacatgaatgaatagggggagaggtgttctggattctattccataattgcttcatttttctattcacatgaagtcctagagtgtgtgaaaacactgcctgcttcaagagtttacctgtcccctgggtgcccagaggtctcctagaatgcactgggcagagcacggcctggaatttgttgactgtctccactctgctcaagtttacgatcaagataattaactcactacttggccctgttgtgtccacagattgcagtgtagtgtgggagcccaaggttgaaaaaaaaaaaaaaaaagaaaaaccaggcacagtggcttatgcctgtaatcccagcacttcgagaggccaaggcaggcggatcacctgaggtcaggaattagagaccagcctggccagtatggcgaaacaccatctctactaaaagtacaaaaatgagccaggcgtggtggtgagtgccctgtagtcccagctacttgggaggctggactggagaatctcttgaacctgggaggcaaaggttgcagtgagctgagattgtgccactgcactccagcctgggcaacagagtgagactctgtctcaaaaaaaaaaaaaaaaaaaccccagaaaacctcactacccaatgatagtaaagagataggaacctggcaagctgatgacagccccactcttcctcttttgcctgcatgccaactggatcaagagagagaataatgcaattttctgttgttatcataccataatttactgcatttatttagtaagccccatatgtaatggcttatttatttatttttctgaggcagggtcttgctctgttgcccaggctggagtacagtggcatgtagctcactgcagccttgacttcctgggctcaagcaatcctcccacttcagtccgtgtggagtagctgggattacaggcatgtgccaccatgcccggctacttttaaaaaattttttgtagagatgggatctcactatgttgcccaggctggtcttaaactcctgggctcaagtgatcctttgactttggcctcctaaagtattgggattacaggcgtgagccatcattcctggcctgtaatggtttttattttgttcaaccacctgtgaatatccctatgtacaagtctctatgcaaagtaactaaaatgtctagtttcaggttttactatttatattttcccctaaacagtttacttttaaaatgacgaatcctctctctttttctgcagaatgtatccgttgcctacattgggatattaatcggtggagactacattttctctttgttaaactttgtagggttaaatatttggtgagtgggaatttttaatggactcgctttgggaagacaagaaccttaaacactctgattaatatgtaataagcaaaagagcctggagaagtctttcacgttaagccaggaggcgttttgacattctaatttctaagataattttacttcatcactgggttcatcctcatgcagatccatggggacacgtgtgatggcagtttgcggggctgggatcggaatttaactcacctgtcttcctcacagcaggcccctgcgttctctgccctcctcctataaagtggagggtgttaacctttgtgcccactaggctcggcatgcagggggtgtggactaagccagctttgaaaggcatttggggtctcagcagtgggatactatttaaggctaagggtatgtagtttattcagtagaaaccaagtgcttattttctctctgaggttctgcattagatttgatgactctttttctgcctccaaaggcttgtaaataaggggaaattctcatcaagcaatccacaaacttgaggagaaacacagatattggaataattccctccgcatgaagcaggtgtattgataaaaacgccagcaactgctgctggagcccctgtgaaattcccagtcatttattttcacttttttttctcctttcagcatggcagggggcttgagatattcctttttaacactgagcagccagttaaaacctaaacctgtgggtgaagaaaacatctgtttggatttgaagagctaaagagtctgcagcaggattggagactgacttgtgactgcgggctgggggggcattcccagtaggaatgtgaagccagaggtttcggattcgtgacatccaccccctgggcaagtgagagcatctgcaa

SEQ ID NO: 42318 - DNA, 2300 bp, Homo sapien
tacatgaatctgctctaattgattaaacaagtaaattcttcagaaatgtctgtgctgtcaccactggcctaaacaaacagtgggtaagctgcctgacagtgacccaggcttccgggagtgggaacagcgctgctgggaactcttggtcccctgagtaggagttcccctgcagctctcccaggaggtgggcagcatctccccccatcccctttccactcacttggctctgctgtctcagggggcggcagactctgctcttcttcacgctgaatcacatgtgggtaggtaagaaatttggaagacccttattttgaagaaaatccttttgagacagagtttcgctcttgttgctcaggctggaggcacgatcttggctcaccacaacctctgcctccctggttcaagtgattctcctgcctcagcctcccaagtagctgggattacaggcatgtgccaccacgcccagctaattttgtatttttagtagagatgggatttctccatgttggtcaggctggtttcgaactcccgacctcaggtgatccacccaccttggcctcccaaagtgctgggattacaggcaggagccaccacgcctggccaaaaatccttttttttttttttttaaattgtgactgagggagaattctgacttatgatgactaaaattaatttcccttctcacaaatatatttgtagataataatgtgtggaggcgtcaagcaaaaatccaatttaatttgcattcagattttggtagaatttttgctctgtgtttcattctctttggttagaaataatcttattttgacattgaagaagattcagggtatgccactgcaaactgtgccactgtgagatcaggattattttgagccgagaaagattgagaatcaacagatcaggaagtttgctgccttctcctttctgcctaaaaaccagggaatcaatttcccattgtgaagaggaccgcttctcccatcccaggaagaggagagcaattcctatcactggacggagggtcggccctgagatgcatctgcataaacaaaccctaaaagaacccttctcgttcatcatttccaccataggtttcctagttactttctaacaattacacaatttatttgttccttgaagcccaaatcctctttcctttttaaaacgtaagtccccaagtctaactgtttctttgagtttcacttcttttctgtgaacttcagggaacatattaataagattcgtattctctttctcctgttaatctgtcttttatcagttaaattagcaggcccccagacactgaatctaagagggtacaggaaaaggttttcctccctggcaatgtgtatttctgaattatgacatggcctagcactgtctgcaacgatcaagtgcaggtgggtgggccacatcatggctcagctattgctcttcctcttgttcctgtcatagatccccaaacgtatttatgctggtgctatttataatggaaatggaagagaagctgtttcaaaagaatgggaagaaaggagccatagaggggtcacatagaaggatggatacctgccttgccattttgatggacggggtgcggtttgggcaccagatggaggtgtggctgcctcatgcgacccctcttacccagcctctgcccagctgcccctcactggctgcaccctggaggtggccctgttcactacaataagcagagcccctgggtggatcggggcgaatcactccccttaggaaagtcagggctcaccagttattatgtggattcatcagctagcgaaagaaaggggttgcagttgaaggaagatgcttaatgtcgctctggttttaagccattcacgattgagtcgaagccatctgatgggctggtttggtttttgtctggaggcaaagcagaggaattaatcattcactaccacaaagcggggaaagtgtgccacagaaaagtgggtttgattagggaaaggtagatcaggcgggcttggaggccaagttgtgagtttttgagtaatcattctccctttgtggtctccctcccaggtctgaccttgcttttaacttagaaggctatatttttgtattcctgaatgatatcttcacagcagcaaatggagtttataccaaacagaaaatggacccaaaggtaccagaccttgcctatggctttttggctctgtcatctggcccctagaattatatgaaaaatgaaaatgaatgtgtacagttggaatgtaatttaatttatataatatgacctgtaaattccttattttcaattatcttgt

SEQ ID NO: 42319 - DNA, 2300 bp, Homo sapien
aatacaaaaattagtcagaaattgcttgaacattcactgggaggcagaggttgcagtgagccgagattgcaccactgctctctagcctgggtgacaagcaagactccgtctcaaaaaaaaaaaaaaaaaaaaaaatcagtgataaggtgtcctttgtagtctctaagtgaaataaattcattactctttaacccagtggcttatactcaaaggtaaagcctttctgatttgcaatttgttgagggaagaggccagttagatctaattttaaaagtctgaattacatttaagtgttagtatatttattttattttatttttattttcttccttccttccttttttttttttttttccagtgtctggctctcttgcccattctggagtacagtggtgtgatcttggttcactgtacccttcacctcctgggctcaagtgatcctcctgcctcagcctttcaagtagctgggactacaggcatgcaccaccacactgactaatttttgtattttttgtagagatagggtttcgccatgatgcccaggctggtcttgaacttctgggctcaagcgatctgcccaccttggcctccaaagtgttgggattatgggcgtgagccactgcgcctggccaatgttattgtatttctttaagaattataatgtgaggcgtaagtacaaagtacagttataattcaggatgggcttaattacataaatatattataagttttaagtttgtaaactcaggagcaaggtataggattataatcgtgttgaaggagtcttaaattttcacatcctaaaatggagagaattgagtaagttctaaaacttgcatgaaagatgacattaaatttttatttcataataatgatatggagtatttccagtatacctagggtactccagattaagaggatttgaaggagacatttttgctataccagctagattgaaaagtaaatctttaaaagtaaagtttaaagaactttttttcctctttgttggtcttctgttttatggaaataatggactttttaaaaaatgtgcttaggtgtggagtttcttttaaaagaatgttcccgtgcctttatgggggaggatgccatatgcttagtatatgggaaatatggtccaggatcattgtgtcatctcactggctgtgatcacttttgcacatttgtcactgtcagggagaccattccctttctccctctgccacagttcattcctagagccccgtgagataatgtgtgtgtgtgtctattggatattacacttttttttttttttgagatagagtcttgctctgtctcccaagctggagtgcagtggcatgatcatagttcactgggctcactgcagccttgactttccgggctcaggtggtcctcctacctcggtatcccgaatagctgggaccacagatcaccaagactggctaattttttgtatttttttgtagagatgggttttcaccatgttgcttaggctggtctggagctcctaggctcaagtgatcttcccacctcagcttcccaaaatgctgggattacaggcatgagccacggcacccagctgatattaccttttttttttttttttttttttgagacagtggtgtctcactctggagggcagtggtgtgatcttggctcactgcaaccttggcctctcaggttcaagcgattctcctgcctcagcctcctgagtagctgggattctgcgtctgccaccatgcccagctaatttttgttttttagtaaagacaggatttcaccatgttggcctggctggtcttgagctcctgacctcaagtaatccacccatcttggcctcccaaagtgctgtgattatagctgtgagccaccgtgccctgcccgacgttacgttttttgcctggagttctgatggaatctgtactgtggcaaggaaaacaatgttaatattctaagaaatagttatttttttctggaacctagaaaatgaattttttgctatatttctttttgatgaatgtgttttcttttgatgatgtcattgtacctcaagcaatctttgcagatattttgctgaagtttctctctccccttttcttcagatggcagccaccataatgatactatatgtgtccaagctaaacaaaatcattcacttccctgattttgataagaaaattcctgtaaaggtaagtaatgaaaagtatgtatgactgtgatagaagatgtgaaaatacacattgattttagagtacaggtcaatttctatacacactgtacttcctgcctgcactggatag

SEQ ID NO: 42320 - DNA, 2300 bp, Homo sapien
ttcagtacatgtttgcgtagttgtaagtacagtgtggattgctttttcttactttaattatggcttttaaggttatagatatttaacttcctcatcgggttcattactacagtgttaaaaatatactgctgtggataagtattgaactattgccaccccatttccaggccttaaattagggtaataaggaaaagggatttcatttcacttacatttaggatgggttgtctctggggtcagctcctcaagaatccatttaaagcctgtgtacttttctaagagtctagcaaattggttttcttttttcatcagttatttttggtagatctttagttgtgtatttgcagtggcaagggtcagcctgtcctacccttgtgcagaagaatatcacaagcaactccttagtgtgagttgctgtttaaacagggtaaggatgggattttgacagcgaggtaaggtcctggaagtatgtgtatacaatcaaactaaatgcaattatgatgaaggtcatcattaaaaataactttaaaatattctttttgcagtcaaaacatttggagactcacaagaaaattgaatgttctgaggaaattaaccaaaatgaccgatttcctgtttaacttgaatatggattcattttctcttttaaaacggacttaacatgtcttttctttcttgttttgggtaacttgggcacttctggtctttttaatgctagctaattttcacgagttctgctttagttcttatcagggctgaaaatgtttcccagttttcattctcctggttgtttagtgcctaagggtagaaaaacaattctctgggcatctatatagttaggccccaacttttatttaacttgaaatcttaagcttttctaagaagctaaaagttcatatatatatatatatataatatacattatatattaaatatataatatatatatttttgagacggaggcttgctctgtcgcccaggctggagtgcagtggcgcgatctcgcctcactgcaagctctgcctcccgggttcacgccattctcctgcctcagcctcctgagtagctgggactacaggcgcccgccaccacgcccggctaattttttttgtatctttagtagagacggggtttcaccgtgttagccaggatggtctcgatctcctgacctcgtgatctgcccgcctcggtctcccaaagtgctgggattacatgtgtgagccaccgcgcctggccaaaagttcatattttttaaagactgacaagggtaggcggttctgggaagctgtccttcaactgacctgacccgaaggcaaacggccctccgcgaggaatgcacctaccacaaagcacccagaggacacccaagtcccaaggcttcacccaccttactcctagccactccactcctagatatttatttaagagaaatgaagacacaggtcccacaaacgcccacgaattttcatggaagcatttttcctaatggtcctaaactggaaacaaccaatggatacacaatttgtgatactattcaacgattaaacaaaccacatggtcgagtccaaagcatagagtgaaaacccctgagaccacatgctcattcataaattctagaaagcaccctgtttatttgaaattccggaaaaggcaaacctaacctacagcaatagtcatcgatgagatgcgggcgttaacttcaaaggggcagcaaggggaatttttggggcgatggaaatgttgttttgagtagttactcctgtggatgcctttgtcgaagctcatctcaaactatggactggcaagatgtgtacacttcattgtatgtaaattatacactaaacaaaaaagttgtagggaaaaaaaaaaaaaagcaaaacaagccctgagacttactgaagcgtttctttccaggaaagcctggaggaaggcagcgcttttcaactccccagcgcattgccggccctggagaccgaaggaggtgcctggaaccagggtgaagtccagcgcgcagggtcctcccgcgccggcctcgggcgctcgcagggggcgggtcgggacctgggattgcgccgggctcttcctgttcctgccgcgccctcttccccggcccggccgggcgggaccagtgcgcagccggggctggcgggcggcggggtccgcggggccgcaggagatgacggccggcggccaggccgaggccgagggcgctggcggggagcccggcgcggcgcggctgccctcgcgggtggcccggctgctgtcggcgctcttctacgggacctgctccttcctcatcg

SEQ ID NO: 42321 - DNA, 2300 bp, Homo sapien
tttttttttttgagacagggtcttgctctattgcccaggctggagagcagtggtgtaatcatggctcactgcagccttgaccttgcagggtcaagtaattctcccacctcagcctcccaagtagcttgggagaagtgccaccatgcctggctaatttatttttattccttttagaaagggggtcttgctatgttacccaggcttcttgttctttgtccatcatttccattagctcactgaacacatttaagacagttgatttaaaatctttgtctagtaagtccagtgtctgttcttcttctcagactctttgtgttaatttctcctgtgtatgtaccatactgtttttatttcttcacatgctttgtaacattttgttgaaaactggaggttttgaatattataatgtgactccggaaatcagacccttccttctgagtttttgttgtttgctatgagttgtagttgtttagtgagtgttctaaactctttctaaattctgtgttctttgttgtgtttgttctctaaagtctctttcttagcctgtgttcagctgatgctttgtttgtttgttttttgtttttttgagatggagtcttgctctgtcacccaggccaggatgcagtggcgcgatctcagctcactgcaacctccacctctcgggttcaagcaattctcctgcgtcagcctcctgagtagctgggactagtggtgtgtgccactatgcctggctaatttttgtatttttagtagagatggggtttcgccatgttggccaggctggtcttgaactcctgacctcaggtgatccactggcctcagcctctcaaagtgctgggattataggcgtaagctaccacgcccgacactttgttttttgttttttagagatggggtctcactctgtcactcaggctacagtgcaggggcatcataactcactgtagccttgaactcctttgctcaagtgatcctcccacctgagtcactgggattataggctgagccaccactagtgttttgacagacttttttgaatacctagagcttccctccaccatcccccaaaaaagagtagacagaaaggaggacaaccaccttctcccagtctttgcagaatggctgtgttgggggacactgtggttgcttagccctgctgtttacaactctactgtagcctcatttcctgcttgtgctgagccgaaagttcagctaaagggtcttttcagatcttttctgagcatgcttcctgccctgggcatatatgcatgactttctaaattcctaaccttagtataagtggacattgttgaatgcccaaatttccaaaagaaactttctcccagcttttcctctcaggctgttggtgtgtctgtttgcttcaactgaaatcttttgccccaggtggctgcagattatttgccttacaagttttttgagcaataccctctgaagagacacctctctgccctgttccaagttagggaaagcaaagaccaatgtcttgtgtcagtcctttaggtaacccgcaggctcaaaacaggcaaacgcaattctttcagaatttcttcctctggaagcagggactaaaggagtaggttcccagactgagaatgcaggctgctgtcttcaagactgccactggggaagggaaagagagagggcaagtcaaaatgctgcaaagcttttctactgtttcaagttgcttttttattcagtttgctgagttgctataaatgtattttctggagttgtgacaaagctgatctgacagtttttgcttgattttttagtcatctgtggagggatgggccattggagttacctgcctcaccatttttactgatgtcccttaagaaaggcttttgctttgtttttagagacaaaacaaaaatgttttgtgctatgttgcttcgaactcctggcctcaagtgatcctcctacctcagcctcctaaatagctgggactataagtgtgtgccgctgcgcccagctcccaagaaagatttttgaaagttatattatgatacgttgctttaatgagtagcgttaaataaattatattaatgtttataaaaattatcaacaggatggaatccgacgtggtaggcccagagcagatactgtccgcgatttaataaatgaaggagagcattcatccagcagaatccgttgtaacatctgtaatagggtgtttccacgggagaaatcgctccaggctcacaaaaggactcatacaggtaagttgagcaaattttatagagactgccagaagtaacacttttttttttttttttttt

SEQ ID NO: 42322 - DNA, 2300 bp, Homo sapien
gtgtccatgatggatagatcacttttttctttacactacttgtcaagtataaaacagatggataacatttcccttccaactgattcagaaaaatatgttttttggtattaaactgtaaaaacaaaatgtatgtttactaaattaggtgaaagtagggctgaactttcaactttctagatcaaccattacaatatgaaatttgcccctaaaccctgaaagttttggaatatgagaaacgggaccgagaaatgtgtgagtcccatttttcagccttttcctccttttgctcagcagacactgaatataatccacaggcagtacagacttattcttccaaaggatttattatgtaatcttgtacaagcctcaacttttctcatttataaaatgggaaaaatatcttccttacccaattgttgagtgaactgtgaaacatccatatgtattattgtgtatcagtacatatatgctatttttgtagtaggcctccagaaaatggaggctatatactgtttcatttcttaaaaggatactttcacttggttcaaagttcaaaagatagttatatattgtatttcttgaaatcttttcacttctgttcccagccacacaatttccctccatgatccatgtttcttttgcatcttgccagatattttatgtacgtctaaaagtaaaaacgtattttccccactttaacaattttacataaaatcacactattgcttgttttgccttttaaaataaaaatacatttttgaaattgttcatatcagtacagtttcctttatttgtttttaaacaattgtggcttaatttagtcatagctgtgcatttgtgtgtctttcacagagagaaaagctattcagcttagttatctgttattatacagtcgtgttctaacttaattaccaatcctaacccttaaccaatggatattcattcatccattcagcaaatatttattgagcccctaccgcgaatcaggcggtgcctgggaatctgtattcccaagaacaaaacgcagctccccaggccacatctagcgggtaggaagccgggcaacccctccgcccggtccttcctctgcagcctgcgagccccacccgggccgcggtcggcgccagccaggcggggctggggcggggcgggcagaggacgttggggctccgcgcgtcccggcgcgagtactaggacgcggccggggcaggtgggggccgagcaaagtagggcgctgccccgactcccggagcagccgctcggtagagcggggtcgccggggtggggagatccccgaggcaacttcggggcatcagtccagggtgagagtgtctactctcgcccggctcttgtggcctccgcgccgcgagcggcccgcagggacttcggaggccacttcctggactctcccctttccacagatggggaaccggaggcccacaatcggcccggaggagtcagggcggtgctgacagggctggttcacagagcgtgcaacagctgagcagacggaactcgattaagaaaccaggcacgccgggtgcccatcaggacctcgggcagcagagactccagccgccgggcgggtggtgggaccgagggcggggcgggcggcggggccccagccctttaaactccctgcgcgcgggaaccgcggcccaacaaccaacggcgggcggggccgagcggggcgcgcgcctccaccgcccaacgatcaccaccccccccgaccccgccccgccgctgtccaatcagccgccctcttgccgccctccccgccgcccttgtctccctggcccggactaaccacgcggagggacggcggggcggggcggcaggcgggtgtgtccgggcgagtggagacgccgcgcgctccactggagtttcgaacgctgttggccctccagacagaaaaaaatataagagcggcggccaatggcgaggtgggaaggacccgcgcgcagacccggccccgccccggccggctggaaagaaggccaggcctggccattggctcgcgccgcctgtcactcgccggtgcggccagcgggcagcggcctcgcggtgactggttccgcccaggcgcgaaatgtaacgcgggaaaagccggggcaggcaccgcggcggcaggttgttatttttgggggctcagcgccgcgcgtcctgctttcctgtcaccgcaagggccgggccgcccgctgcttcccacccctgcagcctgcgctgcggagtacaaagagcggagggcgcgcttgacctggggctggggtccagccctgcccgccggtgccgtctgctca

SEQ ID NO: 42323 - DNA, 2300 bp, Homo sapien
catacaacgtgtggccctttttgtccgtctttcacttagcacaatgttttcaagtttcatccctgttgtaacaagtatcaatacttcctttttgaccaaataatattttttgtaccacattttatttatccattcatcgggtgacatgtatattatttgtttctgtcttttggctattgtgaatagtgctgctatgaatactcatgtacaagttttggtttgaacacttgcttttaattcttttgggtagaaagcgtaggcattaatctttgctcactcaaaaggagatgaccaaatatcttaaattcttcaatcattcaacaaatatttactgaaaacctactctatagctgcttagaacgccaagcactgggaatacatactgcagtgaataagacaggcatcatccctgtcctccttgggaataacacaaaattcaataagtgagtaacacacagactttacagcatttaggattaggaattcctttgctattaaggaaagtaaaagctggtcacagagcacctggcaagatgctctaactggatgctttcggatgaaacaagcaaacacaactaagcgcaatcacatctgtcaccttacatcataagcctcaagtagggaggttcccaagtgggtccagtcggcagctcaacctcatcaaggatctagcctttctctatcctgctctgccatcctcatggccacgctaaggaacagccacccgaggcatcatgtcttctcatggaacaaagaccagggaacagaagggggggagatcccttctcaatcccttgttaggtgcaagaaaaactttcccagaatacttctcagatctgttctgcccgatttgccccacagcctattcctaagccaattactggcaaggaattggaatcaggtgcaatgaataatgtatgattaatcaagtttgaggctggaaggggccctcttcccctggggaatatgatgcctgaacaaaatacaggctctggaaaaatgtaagagggaaagaacggctgtaggataggcagccaagcgtgtctccaccgctgcctatgcaaagatttcctggaggaagtccagtccggcgttctctaagctccaggcctcaactgaatatctcaaaagaaaacaaatatccaaacctcaacgtgtcccagactgaattaatgattcccgttaaagtagtgtcttccagtggtaactaatactatcattcagatgctggagccaggaaaataagagtcaccgtatcttcttctccctcatcaccacctctagcgcatcaccaagtctttgaatccatctactctcttcgcctccaccgccaccatcctaatcccagtcactatcaactcttccctggagctttgcaacaatcatgtttggcttcccagcatccatttgtatttccctccaaactattagttcacagtgcaggtagggtggccttttcaaacccaaatctgctcatgctcaaaacttgcttcccactgctcttagaatagagaccactttgagcttgaataggctgtgcacatcccacctcaagactgctgcacttgctgttcctcctccaaccccttgtcacccctctccctcggcttaactgtcatttcccaattaggtcagatccctttgctgcagcccgtagagagctctgcgcctgtccttcagggcactttttctccatctacagactcagatctgtgacaacacggagctagtatttcctacaacataatgcctggcacacggtaagtgcgcaatatgtagctgttgcacggctaaatgtatacataagcttcaaagcagagtggcccatagcaaatacggtcgcagtcccgggagaaagcacacacagccgagaccccaccgcttcgtcggcgccgcctggaccagccagtagctccgcccctgggccccgcccctccctgctgagcgaacggggcggggcccagaggtcgcgtgacgtgacagcagccggtcggtgattgggtctccaggcgcgccgtgtcggaaagggggcgcacccgcgcgcgctgactggctgtctggcgcagcggggcggacggcggcggcgccgcgggggcgggcgccggtaggggccggacagggtagggcccggagggcggtggcggcggagcgggcggcatgggtcctggccgccggcttcgctgagacgcgctcgcgtgggctgccctcccgggcccgcagtggtcgcggcggcatgaagggcgctctggggagtcccgtggctgccgctggcgccgcgatgcaggagagtttcggctgcg

SEQ ID NO: 42324 - DNA, 2300 bp, Homo sapien
gtttttttatttttatttttaagacaaggtctcgctttgttgcccgggctggagtgcagtggtgccatctcggctcactgcaacctctgcctcctgggttcaagcgattctcctgctgcagtcccccaagtagctgagattacaggcgtccgccacaacggccggctaatttttgtatttttagtagagatggggtctcaccatattggccaggctggtctcaaactcctcacctcaagtgatctgcccgtctcggcttcccaaagtgctgggattacaggcgtgagccaccgagcccagcctgctttagatatttgctatagtttaggatcaggttttgctttagatatttgctatagtttagaatcaggttttggttacaggaggtgggagacagaaaagccaacttggagaatttatttaagttgtgtttcttataagagactggcatgacgttaatgatcagtacttctgtatttctttattttttgagtaaggaagattgcgagttttgtatacttttacccactattgtatagcggtttcttaatgtaacacttttagccataaaagtagattgtaacatacctctactgctggtgtttgagctactaatgccactaggtttcttgatgccaggacctccattaaataagtaatttcttgtgattttaaatgtttttaaaagcctttccaaattagaaaacatttattaaactattgttacaatggtgaaaaagagcttagagcttagtgaaggagagacaagtcctcagaaagagtgctggtgcccagcgacggtgcagggaggagtgggtgggcaatcaggtcctgggtccaggctctgatgtggcagaggaagaagagggaggagtggcttgggctctcgctcgtattgtgagttgggaatcacaggaggaataagggctccgcgttgggcatgtgtgtgcctgacttggggatgtccgggtggagatgtctaggaagtaactggcttcatgtcctgcaatcagatgagagacacagggccagttagcattagcatggggggccaggcggatgtggcatgagccgagatcctgccactgcactccagcctgggcaacagagcaaggctctgcctcaaaaaaagaaatctaaagtaaggttctaataaaagaaaagtgagagtgcccacaaggataaggacagatgggtatccgtatagagcaccaagacaagtggttaggcacgagaggcagacggagaacttttcccttctgtgaatcttgaattggctgcctctgagaagtggaattgcgtggctgaggaacaatgtgagttttgtaccatgtttgggtattatctattccaaaaataattttctaagggcaggcagaaaaagagaagccagaaagtcaggaagattggtggccaggagtgtcatatgacactggggtcaaatgacatgaagacaaaagttgctattgggcttaaagaggtcttcagctgcccttggccgtttatgtggagtaatgaggtggaaggcaggttaaggttttcacagttccaaatgttaccggctggttgtgtgtttaggagggagatttggaaaggggcataatttgaagtttaaccatttttcttacacaaaacattccaaatttaacttaaagatttggtattagaacaggaatgaacgttagaatttatttatcaacattctcattttttgagtaaggaaactagatccagagagagaaaggaatgccccattcagattagtactatgcctgtctagcacctgcttctcctggactggccccaccacttagcctactctctgcttccgtttcctcatctataggcaataattgtatattaaagatttgtttgtgagaatccagttactatatgtaaagtgctcagaacaatgccaggtatatagtctatagtatgcgctcactaaaggttaactattaatttgtgattcaagccaccattctttccagtatactataaccatgattttcttttagaatttttttctggagagaccttagacctttaatttaccagtttttattatatccactccttcctagaccaggtgataggtttgatcgagacagaccgttgagaggacgtggaggcccgagagggggtatgcgcggcagaggcagaggtggccctgggaacagagtttttgacgcttttgaccagagaggaaagcgagaatttgaaagatatggtgggaatgacaaaatgtaagtttctttgtaaatgctattttcactttaagatggtgtcagcacgtggta

SEQ ID NO: 42325 - DNA, 2300 bp, Homo sapien
aaacaaaacaaaacaaaaaaactatctatctctatcggtgctatgcatatatatttgtgtggctctccaaggtactgtacacccctccttgcttttttctcattcactctggaaggtgctccatagcagtatatacagatagtcctcattccttttttagctgctatactatagttttttcaccaagttcttttctagataggtttgggttatttccattaatttgctgttccaatgtcttagtatcttttaatatttttgccaatatatatttgagatctatattttgatattggtatttttccagcattttattgtgaaaatttcaaaacacagcaaagtttaaagaattttatagcgaacatctatacttaccactacctaaatgctaccatttatatcttatatattcattttacataagtattcattagtccatgttttttgacacatttcataataaattgtagacatctgtacacttccccctaaatagttcaacatgcatatcactaaatagaattaatatttgtttacaattttttcttctgatataaaatgtatatactatgaaatgtataaatcttaagtgtacattcactgttttgacaaatgcatgtacttgtggaatccaaactcctgtcgaatacagaacattaccaatcacgccagaaagttctttcatattccttcatgttatctttgctttgatgttttttctaccatcagcttggtattgtagagtcactgcaaatttgtctattttggatgctctgtggttaggtttctctactgattttgcttatatttttcataacattgatctgtgtatttctataatagaaccttaaattacatcagctcttcagtgaagatacagatttgattccccactccccacctactgttttgttttgttttgttttggagaaagagtcttgttctgtcgcccaggctggagtgcagtggtgccatcttggctcactgcaacctccgcctcccgggttcaagcaattctcctgcttcagcctcccgagtagctgggattacagggattacaggcgtgtgccaccacacccagctaatttttgtatttttagtagagacggggtttcaccatgttggtcaggctggtcttgaacacctgacctcatgatccacctgcctcggcctcccaaagtgctgggattataggtgtgagccaccgcgcccggcctgttttttccccttaaacacttttgagatataattctcgtactatagcactcaaatctctaagtatataggccaggtgtggtggttcagatctgtaatcccaacactttgggaggcagaggcaggaggatagcttgaggccaggagttcaagaccagcatgggctacatggagagaccccgtctctacaaaatggttgtaaaaattagctgggcctgatggctcgtacctgtagtcccagctactctcaggaagctgaggtgggaggatccttgggctcaggaggttgaaggtatggtgagccatcatcatgccactgtactccagcctggccaacagagtgaaacccagcctgtatcaaacaaataaatgagtaaacgactgaatgcatggatggatggtttggggtatgttacattattaattttttaaaattgcagtaaaaataacataaaaattgccatttttaccattttaatatatataatttaatggcatcagtaacattcatattgtgtgtaaccatcaccaccatccatctctagaactttttttttttttttgagatggaatctcactctgttgtccaggctggagtgcagtggtgcgatctcggctcactgcaacctccacctcccgggttcaagcgattctcctgcctcagcctcctgagtagctgggactacaggcacattccactacacccggctaatttttctggtattttttagtagagacggggtttcaccgtattggccaggctggtctcgaactcctgacctcatgatccgcctgcctcagcctcccaaagtgctaggattacaggcttgagccactgtgcctggccttgtagaactttttcatcacaaacagaaactctatatccatttaacactaactccccatttctcctcagcatgtagtaatctctattttactcgtgtttatgaatttgcctattctaggtgcctcatctaagtggaatcgttcaatgttccttttgcacctggcttattttaactattagcatcaagttttcagcttcattcatgttgtagcatgtgccagtcttcatttctgttttt

SEQ ID NO: 42326 - DNA, 2300 bp, Homo sapien
gatttgattccccactccccacctactgttttgttttgttttgttttggagaaagagtcttgttctgtcgcccaggctggagtgcagtggtgccatcttggctcactgcaacctccgcctcccgggttcaagcaattctcctgcttcagcctcccgagtagctgggattacagggattacaggcgtgtgccaccacacccagctaatttttgtatttttagtagagacggggtttcaccatgttggtcaggctggtcttgaacacctgacctcatgatccacctgcctcggcctcccaaagtgctgggattataggtgtgagccaccgcgcccggcctgttttttccccttaaacacttttgagatataattctcgtactatagcactcaaatctctaagtatataggccaggtgtggtggttcagatctgtaatcccaacactttgggaggcagaggcaggaggatagcttgaggccaggagttcaagaccagcatgggctacatggagagaccccgtctctacaaaatggttgtaaaaattagctgggcctgatggctcgtacctgtagtcccagctactctcaggaagctgaggtgggaggatccttgggctcaggaggttgaaggtatggtgagccatcatcatgccactgtactccagcctggccaacagagtgaaacccagcctgtatcaaacaaataaatgagtaaacgactgaatgcatggatggatggtttggggtatgttacattattaattttttaaaattgcagtaaaaataacataaaaattgccatttttaccattttaatatatataatttaatggcatcagtaacattcatattgtgtgtaaccatcaccaccatccatctctagaactttttttttttttttgagatggaatctcactctgttgtccaggctggagtgcagtggtgcgatctcggctcactgcaacctccacctcccgggttcaagcgattctcctgcctcagcctcctgagtagctgggactacaggcacattccactacacccggctaatttttctggtattttttagtagagacggggtttcaccgtattggccaggctggtctcgaactcctgacctcatgatccgcctgcctcagcctcccaaagtgctaggattacaggcttgagccactgtgcctggccttgtagaactttttcatcacaaacagaaactctatatccatttaacactaactccccatttctcctcagcatgtagtaatctctattttactcgtgtttatgaatttgcctattctaggtgcctcatctaagtggaatcgttcaatgttccttttgcacctggcttattttaactattagcatcaagttttcagcttcattcatgttgtagcatgtgccagtcttcatttctgtttttctttttttgtgtgtatttttgtgatgattttcaaatctacgattttaatccttttaaagtgtacaattcagtggcatttagtacattcagagtgttatgcaaccatcaccatgatctggctccagaaggttgttatcatcccaaaaggaaaccccatgcccattcagcagtcactccctatcctccctccctgcagccctggccaccactgacctgcctcctgtctgtgtgaatctggctcctctgaatatttcatgtaaatggaatcatacacagaagtcttttctgcctggtttatttcacttgcatcattttttcaaggtttgttcatgtcgtaatgtgtattaatactttgtttctttttattgccagataatattccaaaaaatgtgccatatttggtttatccactcattagttaatagacatttaggttgtgtccactttttggctattatgaatagcactgcagtgaacacttgggtttaagttttcatgtggatgtgtgttttcatttctcttgggtataaacccaggagtgaaatttccgggtcagaggctaactcagcttagatttttgaggaaccgccagactgctttccaaagaggctacaccatttcacattcccactggcagtgtatgtgggttccagtttctccacatcctccccaacgcttgtcaaatgtcgttttggttctaaccatcccactgggtgtggactggtgcagctctgtggttttgacttgtctttctctaatagctaatgatgtgcaacatcttactgcctatttgtatatcttctctggaaaaatgttcactcagatccttgccttttttggggggagggtggtcatttgtctcaactaaagaggacttgt

SEQ ID NO: 42327 - DNA, 2300 bp, Homo sapien
gtggaatcgttcaatgttccttttgcacctggcttattttaactattagcatcaagttttcagcttcattcatgttgtagcatgtgccagtcttcatttctgtttttctttttttgtgtgtatttttgtgatgattttcaaatctacgattttaatccttttaaagtgtacaattcagtggcatttagtacattcagagtgttatgcaaccatcaccatgatctggctccagaaggttgttatcatcccaaaaggaaaccccatgcccattcagcagtcactccctatcctccctccctgcagccctggccaccactgacctgcctcctgtctgtgtgaatctggctcctctgaatatttcatgtaaatggaatcatacacagaagtcttttctgcctggtttatttcacttgcatcattttttcaaggtttgttcatgtcgtaatgtgtattaatactttgtttctttttattgccagataatattccaaaaaatgtgccatatttggtttatccactcattagttaatagacatttaggttgtgtccactttttggctattatgaatagcactgcagtgaacacttgggtttaagttttcatgtggatgtgtgttttcatttctcttgggtataaacccaggagtgaaatttccgggtcagaggctaactcagcttagatttttgaggaaccgccagactgctttccaaagaggctacaccatttcacattcccactggcagtgtatgtgggttccagtttctccacatcctccccaacgcttgtcaaatgtcgttttggttctaaccatcccactgggtgtggactggtgcagctctgtggttttgacttgtctttctctaatagctaatgatgtgcaacatcttactgcctatttgtatatcttctctggaaaaatgttcactcagatccttgccttttttggggggagggtggtcatttgtctcaactaaagaggacttgtatctagaattcataaagcattcttttttttttttttaaagagacagtgtctcattctgttgcccaaggtggaacacagtggccattcacacgtgtgatcatagctcactgcagcctcagatgcctggcctcaagcgatcctcccacctcagccccctgagtagctaggactatcggcatgagccaccacgcttggctgttcataaagaattctttatgtattctagatacaagtcccttgtgagatatattatttgtaaatattttatcccattttgtggactgtctttttactttcttgatggtgtcctttgtagtataaaagtatctgatgatgttcaatgtatgtacttttgttgcttgtttttttggtgtcatgtggaagaaaccattgcccagtccagggttaagaaagtttctgcctaggttttctgctaagagttttatattttagctcttgtatttatggtgtgaggtaggtctaacttcattctttcttttggtgtgtgtggatatccagttgcccaagcaccgtttgttgaaaatacttttcattctccattgaattgtctttggcaccacggttggaaaaaaaaaatcagttgaccgtaaatgtgagggtttatttctggactctgaattctttgctctcaatctatatttctgtcttttgttttctttttaaaactcattaaagaggatatttgcaaaagtatgcattcatgagccactgctttaaaacttgtttatggtttcctgtattttatttcaacccattgtccataattacctcattttgtctgtcatgctgtctggaagggagtgccagtggtgaagtgtgatgttaatgtcatcaggatggtgatgttcccatttttcaaagattgatttgaacacagataggaagtatcttctgttggcagtgatgacataaaatgttgaaaatgaaatatggaagcttgtgagtcaaagatttccttaccttatttgcatttgaaatgcagtaccacaaaaatatgttgaattaatggttataactttttctttataaagtagacattttagtaccatcaaaaagtattctttatgattatatatctctttatagagttcctgagttggaggtagaagaagaaacccaagttcaagagatgactttagatgagtggaaaaatcttcaagaacagaccagaccaaagcctgagtttaacatccggaaaccagaatccactgttccttccaaagccgtggtgattcacaagtcaaaatacagagatgatgtaagcattgcatttcgtatgtagaggtaatcttt

SEQ ID NO: 42328 - DNA, 2300 bp, Homo sapien
gggttaagaaagtttctgcctaggttttctgctaagagttttatattttagctcttgtatttatggtgtgaggtaggtctaacttcattctttcttttggtgtgtgtggatatccagttgcccaagcaccgtttgttgaaaatacttttcattctccattgaattgtctttggcaccacggttggaaaaaaaaaatcagttgaccgtaaatgtgagggtttatttctggactctgaattctttgctctcaatctatatttctgtcttttgttttctttttaaaactcattaaagaggatatttgcaaaagtatgcattcatgagccactgctttaaaacttgtttatggtttcctgtattttatttcaacccattgtccataattacctcattttgtctgtcatgctgtctggaagggagtgccagtggtgaagtgtgatgttaatgtcatcaggatggtgatgttcccatttttcaaagattgatttgaacacagataggaagtatcttctgttggcagtgatgacataaaatgttgaaaatgaaatatggaagcttgtgagtcaaagatttccttaccttatttgcatttgaaatgcagtaccacaaaaatatgttgaattaatggttataactttttctttataaagtagacattttagtaccatcaaaaagtattctttatgattatatatctctttatagagttcctgagttggaggtagaagaagaaacccaagttcaagagatgactttagatgagtggaaaaatcttcaagaacagaccagaccaaagcctgagtttaacatccggaaaccagaatccactgttccttccaaagccgtggtgattcacaagtcaaaatacagagatgatgtaagcattgcatttcgtatgtagaggtaatctttacttttaccttactggaagtgaaatgtacctttccacttctgtcttgaaaatggaacattagtagttggcagtctttgtttctaatcagagatgatgcatgcctaattttactgtattgttcattaagaaaaggaattgaaacttgaggtattgacagatgcacagagcagttagagtgacagtgcatcttctgctcaccctgggactatgcgggtactgtacacatactgtgtattaactgtatttcatttttctcaagggagagttacagattgtgtcttgtacaattcagagttaatcaaaggagaactacactctgtgtcccctgagtaggttactttcaactctgtttcttgataagagcatttcactgagtagttgatgacttttttttttttttgagatggagtttcgctcttgttgcccaggctggagtgcagtggcgcgatcttggctcaccgcaacctccgcctcccgggttcaagcgattctcgtgcctcagcctcccaagtagctgggattacaggcatgcgccaccaccccggctaattttgtatttttagtagagacggggcttttccatgttggtcaggctggtcttgaactcccgacctcaggtgatccaccagcctcagccttctaaagtgctgggattacaggcgtgagccactgcacctggccgagtagttgatgactttttaaactgtggttgaggttccatgcacttctgacgcctttcccatgttggttcagcagctttgcgccccctgcctaactgcagacgtggcgggagatgagtccccgaacgcttggctgctcggtcaggcactgccacagcggccagcgtgctgcaggggttgctcagggagctcctccgtgttgtgaggccttattgctcacggcttacgtccagctcttctcagaagcttcagttttgcagggagaggtttcggggaaacatctagcagcatatgttgatagggatgccatggggtcatcaagtccccgacttgttactgaacttaaggctaggtccactgaagcattcccattatgggatttagaatctgtatcattccatctacagcttgataccagtcactatttcgaggtgggagtgagcaggtagcaggttcttcctctctgtggggtattagttattgattttcatgtggaatctcaggaatgttatgctattgtagagttgtcatttacactttggttagtttcattttctgagtgagtactttgattaggtgtcatttaagatacagggttcttgggaggccaaggcaggtggatcacctgaggtcaggagttcgagaccagcctagccaacatagtgaaaccctgtctctactaaaaatacaaaaactagccgggcggt

SEQ ID NO: 42329 - DNA, 2300 bp, Homo sapien
gtatataggatttaaactcacacatagaagtggtagcgcttaacagtccatcttggctatctttagttttcagttttcttttttttttttcttttgagatggaatttcatacttgttgcccaggctggagtgcaaaggcgtgatcttggctcactgcaacctccacctcccgggttcaaacgattctcctgtctcagcctcccaagtagctgggattacaggcatgcaccaccacgactggctaactttttgtatttttagtagagtcagggtttcaccatgttggccaggctagtctcgaactcctgacctcagatgatccatcctcctcggcctcccaaaatgctgtgattacaggcatgagccgccacgtctgtctagttttcagttttcagtcttaaacatttctcccaaacttcccatttgttggctccatggaggtggcccagtttatattcccacccacaggtgacggatgtgagtgctctcaacctcccgacacactgcagcaccttatccaactctcttgagttttgccagtctgaggaaaaaatagtacctcatagtggaactttgcatttctgttacttttgtgataacaaattgaggttaggtatcttctcaatgaatttaacatatttttccagtttatctcttgatttcgtttatgtatcttttgccatgaaaactacttaaaaatgtgtttatggcttttagattttgtatcatttagcaaggtcttccccagttggagagtataaaaaagaattcatggtttaaaaaatgtattttaaaaagtctttgatccatctggaattgtagaataagattaggaggtatgcaggtttacttttgaggcaaaagtatgtataaagtaacacttttctatagaaaacttgggaaaatacaggagggaatgaaaatgaaccccaatcccagcaccttcttatctataacaactgagatcatgcttatgctgggatttcaatttttttcacttgagattaaaatacaaacataggtttagaatatattttaatttatttaatgtttttatgggtacaagtaggtatatatatttatggggtacgtgagatgttttgatacaggcaggcaatgcacaataatcacatcatggagaatggggtatccatccccttaagcatttatcctttatgttacagacactccggttgtactcttttagttatttttaaatgtacaattaagctattgtggactgtagtcacccacaccctattgtgctgtgaaataataagtcttatttatttgtactatttttttgtgcccattacccccacactacctttcccagcctccgataaccatccttctactctctatctctacaataattttaaatggttgtttaaaaagggtgtcaacatttttgtttttaaaccatcccaaaccgtccctttaaaggaatgcatgaccagagggttgcctttaaatcttgcacaattaaaagcgttttctctgaggcagctgatctcaggaaatcttgcacgattttgaagatgcccgtttcccataagacccggccctgcgggggcacttggcgggtcttggcagagctaaggggctgggccctgctccgggagggcgcactgcaggggcccgggcctggcgcggctgcagcacctcctggcagcaggagtgcggcgggggaggcgccaggaggcccctgccccggctgccatcaccctcgggtctgtccctggcctggggcagagcccttttgctcgaagtcctttaatcgctaaggagctttcccagactcttccctctgcaggcccgctggcctctgacgcatgtcccctctgcggagcgtttgggcactggaggagccctggttggcacaggccgccccgcgttcccagctggggaaggaaggcgggcggccaggcggggggaaagaaagcgggaggtggggcggggtgctgtccgtccccacggcctcgtcgcgcgcggggctttttccaggacttggggacttccggggttgcgctgtcgtgtcaggccgttgggccgccgaggggtgtcgctgcgcccgctgccccgcgcggccctttaaactttgttttttaaacttcgggggtgtggtcgcggcgcctcccctctcggcggctggcagtccttgcctctgccccgccttccagatgctttggagtcatgagccgggagggcgcgggggcagctttggtagccgaggtgatcaaaggtgagccgggagggcgggggcttcccctgggggctccggcacccgcgctgggaca

SEQ ID NO: 42330 - DNA, 2300 bp, Homo sapien
ttgatttctagtgttataagaagaattgacgtccatattaggcagggattacttttgaaaacattttccaaaattgattgtaaccttcctaaactcaaggatattgaactggaatgtgtagatctcatctggactctctagtttatatgaaagttttacgcccttttctctctctcttttttttttttctatagcttttcatggatactgctccaacaaaggtattcagatcattgactactttgcagttcttttatatgactttaaactgtagaatttaatctgttagttgtcattcttggttccgtcctttcctgtttgctggtcttaatcttaggtagcagattcagttttctgtaactgtagagcagcattggtatgtttatgacttaagttgaaatttgtctttatatgaaaggttttgttggtttctgtgatagttaatactgaaagtagtttctgcgatatttcattggattaatatgaatgccaggttttgggtggtagatattttttggtaatattcagtttttctttttaaattgaatttcactttcataggctcttgtggaaagggtactcacaatgagttgttataactataacagctactcctgtttttttttttttgtggtcatttagttctttctagacatttatttgactaatagacagatttatatcctatttactgaatttggcaagagggaaatgtcatgaaatgctaacttgggaaacagggaagtgcttctatattctttttttaatttaaaaagtattcttgccgggtgcggtggctcacgcctgtaatcccagcactttaggaggccgaggcgggtggatcacgaggtcaggagatcaagaccatcctggctaacatgctgaaaccccatcactactaaaaatacaaaaaattagccgggcgtggtggcgggcacctgtagtcccagatactcaggaggctgaggcaggagaatggcgtgaacccctgggggcagagcctgcagtgagctgagattgcgccacttcactccaccctgggtgacagagtgagactccatctcaaaaaataaataaataaataaatgaagtattcttattcacgttgactttcaaatgcctcagatacgggcagtaagcaaaaaacaaatctgaatgggtgtgtgtgtgtgtgtgtgtgtatctatatatctttccaatttaaaacaattctaactttaatctcttggtcttttatacagcttctttaatctcagcattatttatattctagaggagcagttctcttagagaatgcttcattcaccagttggctcaaaaatttggtcctattcattgtctttgagtctgaaaagctgaagaagctaggctggataaattaattctagttgcataagatcacatatcaacttcatttctcaggtagttcagttttataccattaaaatttggttggcagtgtactttttacaaaataaaaacatcttgttcctgatgtctgtgatatttattgttctttcaagttctcatttgaaagtaacattactttcttggcactgctttgcaatttatgacattgatctttttatatccaatccataatgcaatactatcattacaaattctgaattctgcaaagccttctctcaattttaggaccatctcagctgaatcattctttgcgttttgctcatttattatctatatttatatgaatggtgctatggaattaattaatgtatccattcaacaagtatttattgagtaactacttgaattgggccaagtgttattaaagaatggaggggcaagggatgtgaagatttataacatgccccttttccctgaagactgagaaagaatacactcttaaatcatcatctgaatgaagacaggtaatgaaagaattagtcattatgtagttttgctcttttcatcatttaaatagcatcagtttgaaagaattgtgtgttggaaatgtcactcgatcattcctatacaaaatgaataatttggtctgggcgcagtggctcacgtctgtaatcccagcactttggggatgccatggcaggtggattactggaggacaggaattcaaggccagcctggtcaacatggtgataccccatctctactaaaaatacaaaattagccaggcgtgttggcatgcacctgtaatctcagctactcaggaggctgaggcaggagaatcacttgaaccagaggttgcagtgagcagagattgtgccactgcactccagcctgggtgaaagagtgagactccatctcaaaaatatata

SEQ ID NO: 42331 - DNA, 2300 bp, Homo sapien
agctttcaagctctaaaattctatgatgagtcgtcaagcaatgaacaacaaactaaccagggaagcaaactaaaatacatttcctgtggccaaattctcagagcccaggagtcaacttatcaaagagggggaggagtcaaacagttcaagagcagtgccacacacacaaaacaagtatcagctaggaaacagcacttttctgcctctatctaaacatgacctaaaaacaaaatataaatagggtttaaaactttaatgtgtatactcagcacacagacttcctattcacaagaagggaagatactttcgcgtaattacaaagtgtagtcctatactttgtctgttcctactatacaaagcataaaattatatacttgcaaagtatgaaaatatttaaatggtataattatctgtatttatgacacttttttttttttttttctgagacggagtctagctctgtcacccaggctggagtgcaatggcacgatctcggctcactgcaacctctgcctcctgacatttaaacaaattactctcaaaagatcataatgtcatggaggtagtttctctgtacttccagggagccacacggaccactctcctgtaatatctattcaaaacaagacccactcatttaaaatccctggtagtctgggaaactgggtggctttccaatgctgagcccctaggccggtctgaaaggtctcctcctcctcctccaggtcaaaacaaaggactgtgaccctaccgtttctgctctctaaaacttacttgcgcagcgccgcacagcctcccacgtctctagcttctttgctgcccctacagacagacatgtagatcattttaaatttaaggccttcactgatttccttaggggaaacagaggaagagtgaacaggagaaccaaccttaagaaaaagtgcttacagagttgctgatctctagcttcagacacagcccccctacttccttatttagccgtgcttaaggtaaaagcccacaacaatagaagtcaaagagccccttcctgaggtgctctatgaaaatttgcatttctgagaggcttccaaggggactgactcaaattcatctttcttttccccaggctggcagttaactgcggaactgcaggataaaacgttcaagtgctggtgaaaaatagggacagcttgcagatgttgtaaaatttggggccgtgaaatcttaacactgccctccaatcttctcacccttttagatgctaccatggacgtttgtttaaaggccctccaaaatgacagtttttggttaagttccaggaagatagggcattattttaatccagtagaaaaagaagaggatatgaccctacagtgtgccagataaagaagtttaaggacaaaacttgccccttgcttcaatacttcatgatataatcggacctgtcgacacctcagtatacacagcaatgagtgtataaacttactgaattaatgtgggcgctggattccgagatgagaaactctgaggtgcaaacaaccacggtatattgtggttccacggaagtttcatcgggtccttaagaagcccttgcttggcctgtttgaatgctgggcataggtcgataaatagagcgtagttgtttaaatagttttacttaagttctgaaatcaactctactttaaatctatatagctgcaggtaatgtaatcaggccatcctcttccaagctggcagccatggcaaaagtccctttctcttggcgcgaattacaaggaaattcaagaaatactttaagatatatatatgccaaagacctggagttaagttactagggtggggctgtgtaaatgtttggtgactcactaaagaaagttgggatctggggtgctggcacctggaggacacagaagaaacaaaagttggggggctggcgaaggtcgctagcacactttatctctgattggcggaagccctcagagttttctttatggcgtcaccgagtacctgcctgtagaaaggccccgtctccgtgacgtcacgccgcattggccaatgaaaggcctcagtctgcgggccccgaggagggttgtgggcccttttttgtgaatgaagcgccacggaacagccctcctggggtccccacgagccgcgtcctgctgtgccccggcgcctacgcagcagcggccgcggccgcggtgggcacgcacggttaccccgggcagctccggccgccagctgcagccccgtcgcctcggccgcgccagccggctgcgggcacctgggggcgggctgggggcgccggccgcggcaggagg

SEQ ID NO: 42332 - DNA, 2300 bp, Homo sapien
ggaattgggggcacaggtgaggaattgggctgctagtggagttaggagtgcgttcaagttccagttttcacatcaagtgaggtgctaggttattgctagaacagccaatagttgcagtgttgccaaggaagtgtgtatcctggtaaagtgccagaggcagagccccacccgctaccctcaggaggctatttgaaatccccttcctcctgcaatgtcctgccaacactgtctattgaaaatgcttaatatattgcccattgcaaaggttagatgcttagaggaagtctgtccattgtcacagagtatatagtgaagggttgatttggagctgagaagcaagttgataactgtcacaggcacttcatctctcagtgtctcattcagtcatgtactgatgctccctagacaataccttctaatttctgcatttctgcatggctactattcctcctacaaaactattttttgatgatgtctgagttcatcactctgcaaaaactaagtcatgtggctctttgtatttcaaaatgaaattgtctaacctgtaatttatttcacatgaaatatgacactgaaagcagtaatgtcaaagaaaatttttcattcattgataccagcaattaatcagagctgccaaaataccaccattcttatctgtatatcaatttctgcttaccaaaacactgcttacaataaatttggtgacatctggcaaactgcctgttgtgagtgctattcatcagcctgcactttggtcatgcatttatttccaaaaactcataaagctcctggccaggcccagtggctcatgcctgtaaccccaggactttgggagaccacggcaagaggattgcttgagcccaggagttcaaaaccagcctgggcaacatagggagacccttgtgtctacaaaaacaaatctaaaaaaaaatttgccaggcatggtggtgcatgcctgtgatcacagctacttgggaggctgaggcaggaggactgcttgagctcaggaggtggaggctgcagtgagccatgatcgtgccaatgctccagcctgggcgacagagcgacaccctgtctcagaaagaaactatcttgacttagaaacagatctatgcttaaaattttgtaaacacgctgcagagcttctcaaacagagcacttaatgtgtgctcaataaagtataaaatcttcacacaggtgaaagccagaggatgcagcatccccctttcctgcactttgtggcagagtcacatcagtcacatagacctgcctagcactccgccccagaaatattcttcagctcaacaaaggccatagataaaggatgtactttctgaaccccaaatccatacacaagagtgagtaaacttatgaagacaaagagcctgaatgttatctggtcctgctctggaaatcttggacacacagttagcacccatgagaaaccccagagaaagatgaacctctaaatccagggccagtttggtctcacaaaggctgagatccccagatttccctatgcctgcctacccaccccaggagaaactgaattggaagtgtgggatttctacaaaacagctgctaagtcatctaacttcatcatcctcatcccacccagctcaccttttatttctttatttttattatttatttttttaaaaaacggagatggcgttgccctctgttacctacccaggctggtctcgaactcctggcctcaagtgatcttcccgcctcggcctcccaagtcgctaggattacaggcccggcctgtgtgtttacaaaacgtgggcctggccctagcccaccttttacacatacacccattagttctcgaataggtgagaacatccgctcaggtggccatggagggcgcgggcggctttcttcctcaataatgcttgctcgccgtggacggaccttactttctctctctgtcccctaccctgagagctgagtcagaaccgcccgtggggttcactccgacagctcccaggcccgcgccgcgccgcggaaaccgtgacttgccaggccccacctctgcacgccccgccccgccccccgcgcccaacctctgcgcgccccgccccggtccgcgctgacagagcggacccaggccctcggccgccccgcgtcatggccgcgccggccccggtcacgcggcaggttagcggcgccgccgccctggtcccggccccgagcggccccgacagcgggcagcccctggcggccgccgtggccgagctgccggtgctggacgcccgcgggcagcgggtaccgttcggcgcgctgttccggga

SEQ ID NO: 42333 - DNA, 2300 bp, Homo sapien
aaaatacacaatgcaaaaactgagataactaaaaagagagacaaatccacaaccttgcttggagatttgatatctctcacagtaattgatagaacaaactagacaaaaaataaatccagtaggatggtagaagactttaaaaatgttgtcaaccagtttgacaatatatgtagaacactacatccaaggattgcagaatacacattgttttaaaatgtacgtggaacctttacaaggataacctatgttttaggccttaaagaagttccaacaaattctgaagattgaaatgttagagaataggctgggcgcggtggctcacgcctttaatcccagcacttcgggaggccgacgtgggcggatcacctgaggtcaggagttggagactagaccagcccggctgacatggtgaaaccccgtctctactaaaaatacaaaaattagctgggcgtggtggtaggcgcctgtaatcccaactactcgggaggctgaggcaggagaatcacttgaacccgggaagcggaggttgcagtgagcagagatcgcaccattgcactccagcctgggggacaagagcaaggctttgtctcagaaaaaaaaaaaaagaaagaaagaaatgttagagaataagtgttccgactgcaatggaaattgatttaaaaatctataaacttgtatttttggtccctaggtatcagaggttcaaatgtattctcatgtggtattttatgatatctcccacaggtcgttccttgactgggaatcagtgagataatgaaattgtgttcaagcaatccttatcctattaaggcctaggtactgtgcagatcagttgcttctgaaatggtccaaccacatctgttatggtttggtgcaaaactcttcccaatatcctattgtttcttgggaagtagaaatgctaagtgcatgtgtagaagcttcatccctggggatcaagcttgatctcaaacaataacgatctgttctccacaaggcccaggacccatgatcatagtaaggcagatgagaggacttctggtgccccctcacatccctgtgcatcttgacagtgagctcttacatagggcacatgatgtatatatatatatatattttttttttttttttgactgtggcaattttattttttattgatacataatagatgtgcatatttctggggtacatgtgatattttgatattattaatataagtataataaccaaatcagggtaaatggaacatccatcaccttaaacatttatcttttctttatgctggaaacatttgaattattctctactattttgaaatatacaatagatgttttactatagtcactctactgacttatcaaacactaggtctattttttctatctacctgtatttttttgtagccatttattgacctctcttcatccctccctccccctacccatccctgcctctggtaaccaccattctttatgagatccacattcctaactcctacatctgagtgagaacatgtgatatctgtgtttctgtgcttggtttatttcacttaacagtgaccttcagttccgtccgtgttgctgcaaatgataggatttcattttttttaatggtggaatattccattgtgtatatatatcacattttctttatccacttatccattgacgggcacttgggttgattccatcttttggctattgtaagtagtgctgaaataaacatgggagtgcagacatctcttcaatatattgatttcttttcttttggatatatacccagcagtgggattgctggatcatatgatagttctatttttaattttttcaggaatctccacagttttccatggtggctgcgctaatttacattcccatcaacaacggaggagggttcccttttgtccacatccttgccaggaaccctattccctttttgataaaagccattttaactggtgtgaggtattcattgtggtttttttttttttttttttgttttttttttaatttatttttttattgataattcttgggtgtttctcacagagggggatttggcagggtcatgggacaatagtggagggaaggtcagcagataaacaagtgaacaaaggtctctggttttcctaggcagaggaccctgcggccttccgcagtgtttgtgtccctgattacttgagattagggattggtgatgactcttaacgagcatgctgccttcaagcatctgtttaacaaagcacatcttgcaccgcccttaatccatttaaccctgagtggacacagcacatgtttcagaga

SEQ ID NO: 42334 - DNA, 2300 bp, Homo sapien
acccggtctcaaaaacaaacaaacaaaccaaacctcactgcaaatatttatcagctgcggtggtgctgcatctacacacacagcgccgaacttggaagttggcggagagcagctctttgggcaccaggcaaggtctcagccttcagacagatgtgaagggcgagactttccttggaaaggaattaaagggtttatctttttaaaacacctgtttctcttaaaaacttaagaaatgtataatttaaaaatttaaaactttgatattattaattgcttattgttgaatgaatccttgtgaaaattattgattgtaatgttagtgccatggatatgtcctttgtcccagcacctatctcattgtcctaacaaggttactgaaggttctctttccactgctttaaaagccagctgatacatactacattctttctttttcatatagttgaacttttactgcaccaggataaatttttaaatatttagtgatagtatacatagtaaatatagagatattgctatgcattttcaattcttttctgatcattaccataagtttttattagaatgaaaattggaatagttcctttaggaaaacaggcaaaatatataaatgtcaaaaaaagaaaatatatacttagaaaacatagatgattagaatttttaaaaacaaatgttagtcttttcctccagtatctattaaagtgtttttcagtgtcaacagtaaaattttataccttgattcatatatactgcactagtttactgttgccattaatcttttttcttgctaatcaaaacttatcattgccatataaaataacctgttagaaagtatcaaccgtgtgtgtgtgagtgtatgtgtgttactaaaaagagtgtcataaaatactgtgctgagaggttcctaatttggttcctgatttcagaagcataccacataagatttaagcaagctcatctctaggagatgcataatttgtggataacggttttcttagttgggattgtgtgtacttcaggtattatgtaatgctgaacagcttacttgctttttctttttttccccccagagataaactgaggatcacaaatattattcttttatgttaataatggtttccattttctagtatttgttacattttacggctttattcacaaagctgtttatgtatttttgtggcagctctaagttaaaaggcacacttgtaacattacagtcccaattttccctttatcaactttatattataaaattttccaacacatagtcaataagcatgtccatattctagaagtagatattcttaacattttgccatacttcccatttctaattattttttaaaaagaacttacaaacgggccgggagtggtagctcacgcctgtatacccagcactttgggaggccaaggcaggcggatcacttgaggtgaggagttcgagaccagcctggccaacatggtgaaaccccgtctctactaaaaatacaaaaattagctgggcgtagtggcgggcgcctgtagtcccagctacttgggaggctgaggcaggagaatcgcttgaacccgggaggcggaggttgcagttagccgagatcgcgccactgcactccagcctgggcgacagagtaagactccgtctcaaaaaaaaaaaaaaaaaccaaaaaacccaaaaacttacaaacataatacaatcctaaatacttacatagacatctctttatgaataagcaagattacctacataatcccaatgctgccacaattaattaataattctaatttccagtccgtatacaaattttcccaattgttttcaaacgtcttccgcggctcttgctttctgtaaccacacgctgcatttgctgttatgtcatcaagtctaacccacaacctctggggctctgacagaacccgggctccagttatcaggacggtccatgttattacgccataaatcttgggggaaaaacaaacaaaaaaacactgacagctggcgccgtactgcatgtgaaacgtagtcttgcatgttatgggttaccgcgcagcatgctgggaacggatatgcgcgttttcgtctgcgcatgtgcagtcaaccccactttccggcttctccctgttagtgtttgctggtgcagagggttcgcagctcaggtgagagcgccgggcctccacgcggattgcggacctgcagggagggatgtgctagtgtccagggggcgggaacgcgacgtcccgggaactcccccaaagcaggccgtcgctccctgtgcctcggccggcccgggacctcagcc

SEQ ID NO: 42335 - DNA, 2300 bp, Homo sapien
gtaaaaagcaaataacaagggaatgtagaggagtttatctaaatagcttgttttctcattgttgtcctaagactgacctttgatcattcgcatgcaggactgctctctctggggagggcgggagaaagggagcagaatctctgtaaaatgtgatgttcaataaccatttgtttttgaaaacatttttgaggttggtagcttagatctggcaatgttctcccatctaataaccatcagacaagaaataaacttgcttagaataaacttttttccttttgttttgatttaaagagttcaagtagctcatggatatactcttctgcagagcaccctctgaggtaacaacacctcgcagctcacctttaatctttactcagctgttcactttgcccagagagtgggagaaaatcttcacaatctatatatctgacaaaggactaatatccagaatctactacgaactcaaacaaatcaatctcatcaaagaaaaaaaacaaacaatcccatcaaaaagtgggctaaggacatgaatagacaattctcaaaaaagatatacaaatggccaacaaacatatgaaaaaatgctcaacatcactaatgataagagaaatccaaatcaaaaccaccttactcctgcaagaatggccataatcaaaaaatcaaaaaatagttgatgctggcatggctgcagtgaacagggaaaacttctacactgccggtgggaatgtaaactagtacaaccacaatggaaaacagtgtggagattctttaaagaactaaaagtagaactaccattggatccagcaatcccactactgggtatctacccagaggaaaagaagtcattatatgaaaaagatacttgcacatgcatggttatagcagcacaatttgcgattgcaaaaacgtggaaccaacccaaatacccatcaatcaacaactggataaagaaactgtggtatgtatctgatgatatactacttagccataaaaaggaatgaattaatggcatttgcagcgacctgaatgagattggagactattattctaagtgaagtaactcaggagtggaaaaaccaaacatcgtagttctcactcataagtgggagctaagctatgagaatgcaaaggcataagaataacacaatgggctttggggacttggcggggaatggcggagggcagcggggcaagggataaaagactacaaatggggtgcagtgtatactgctcaggtgatgggtgcaccaaaatctcacaaatcgccactaaagaacttactcatgtaaccaaacaccatctgttccccaataacctacggaaataaaaaacaatcagcaaaaagcaagaaaattcgttaatgcgcatggaaacctaagataattaacattaaatttaaatatgttgaatcaataagagaattcggcaagaagcaatgttaagggataaaaaccaaaagcttttctctaacacctgcagcaccgggctcgacccgccttagaaccctcacgcctgggggcgccaggacagggctcacaggtcaatgggtcgggtaggctgtaaagagacaaggtggaggttccaggttgaaaatgtataaaattgtaaagtaaattcaaagttatatcatttcaatgctaaatacttcagtagtgatccctttttttaaaaaaaaaatttctacaaaattcttaattttttttcacagttcacaaaagtaatggtactttttttcaatatttgcaattcccaatccatattcagcttcccaattgtctccgaaagtcttacggaaaaaaaaaatgttggttcaaccgggaaccaatggagggctactctttgtatttgtcagtagcgtttaagttttaacctttaacttctccctgttcttggagagcctgagcgggagacttcataaaaactccatccccgccaattctgaatcgccgaaacgtgaggagtcacgtcgaaggcggacgcaagagcttatgggaaatgtagtcctgaatgagtctggttcgccgcgcagcactctgggatggggctcctgggctccttctgcgcctgtgcagccagagccccgcctcctcatttgggttctcgagactcccgggaagcggtttgggaagctcgggggtcggctcggaaagtagagggggcgcagctggggcgggaggacagcgtttgtgcccggaagcgggagaggaagcgggaagtttgtgggatccccgccccctgtgtcagtggatgcgaccgggcgggccctcggccttcccggccgctggagagggacttcggcc

SEQ ID NO: 42336 - DNA, 2300 bp, Homo sapien
ggaaaggcaattaagatcccttcagattaaattatgacatagggctggagagttggcatacacctgaggtaggacaacgaaggtgtattgcgagcttgccacctgaaaccaaactgtttctggtggtctctactaacagacatcaggaaaaaaagtatctgccagatcagtaagtgcataccaggtaccaggggatgtattaatttactcaagctatgaaaccacatttggaacagcagctgaaattgatgtccccacctgattaagtttccagtaatttactctcattctccaagatctatctgttttcttcacaggctaaataggggagtagaatgggaatgtgataaaaagtaccacctctgcatccttcaagtccttgatggtggtactaatctctgcaagctctacaagaatgcagtattgtttttggtttgctgtttttctagatagaggcaggtaagtggcttccactttatagcgtaattgccctcactcttcaggtcaggaaaccagtgtagggattctgctaattgttgagtatgtctattccaattattctgcagctacagagataacaagacgacccactgcaagacagacctaaactaaaactccattgatcacctaacctccctaagcccctactctcacttgtgaaccagagtgatgcattagttttcctggggtaccctgagtctgagttcagaaccaatgtccagtaattcccccaaagtctgattattcccttttccccaatgcacagtcaacttggtaaagtgctataggtccctttggggaaggctgagagaaaaatgaacagtatacaattttggtaatgcagtggggacacagcctcctcattatttaaggagatatgggtctgcaaactggcccaagtcttggaattgattcaggagctgtgactccgtttttttgattcgagttagacttttattcacttgattcttctttttatacagaacagataagaatttagtaggctttccatctcttttatttctatggatactatgaccagctagctaatgccataagtctctgtaaatcggactttctaactacagttttgactttactgtccattacagtaaccatgttcaccttgtctttggtgattaaatgctgccacttggcccctgccatcctgggatccagttactctccttatacttaagaatcccattcagtggcagcagttcccactgtaatttctgacctatacagaagagcaaccacagagctctttaaaaatattggaactccctcacaaatttatttctcatagtcataacagaaagtgtgtcctgagctagatgtggtagctcacacctataatcccagcaccttgggtggccaaggtaggagaatcgcttgagctcaggagtttgaagcctgcttgggcaacgtagcaagaccttgcctctataaaaatttttaaaattagccaggtatgatggtgcatatagtcccagctactcaggaggctgaggcaggagggtctcttgagcccaggagtttgagggtacagtgtgctatggtcacaccactgcactccagcctgggcaatagagtgagccctgactctaaaaaataataataaatagaaaaagaaagcatgtcctcttgttaaagatttttcaatgacacttgttcaaggatggtaaggctgactttttcaagatcatcagaatagatacagggaccaatgcaatagcattttacagcgagggagagagattgggctcaactctgaatacagtttgggtaagtgggaatttattgccaaggagtagggtgggggtcagtggattgaaaattactaagaggaaacttcaagagtaaggaaagattctggcttaactgacctaacaggattcttgctgaaaacaggctggggtgttgagacactacctgggagatggtggaggatgaagccctgatcagatatggaggatgatcagatattgagcatggaggttctttttttttttatgctttaagttctagggtacatgtgcacaacgtgcaggtttgttacatatgtatacatgtgccatgttggtgtgctgcacccatcaactcgtcatttacattaggtatttctcctaatgctatccttcccccctcttcccatcccacaacaggccccagtgtgtgatgttccccgccctgtgtccatgtgttctcattgttcaattcccacctatgagtgagaacatgcggtgtttggttttctgtccttgtgatagtttgctcagaatgatggtttccagctt

SEQ ID NO: 42337 - DNA, 2300 bp, Homo sapien
gtgcccatgacttttgacagtgacttcagagcacatctgggagacccatgtggcccaggctccacacagaggatacagaggaccaactgtataccacttcatgtgatgttggagtgctgttctgcacgcctaactttatggcttggtggatcagacaatgcccaatgtatgatggaaagctcaggttgcagggtagctaggtggcccatgcttgagcagtctccactaagtcccaggagcaagccaaaactgcttctgaaaaggagagtagttatcagcggaagatggcatgctccacagttctagggtccacactgatttgcctgtagaggcctgccagtggcttcagatagtatccctatctgccactgacacttcaagcaccattggatctcctgaaacataaagcccaagtgggagagcagcttgcacagcagcctggacctgttgcagagcctgcttttatcctgggcttaaaactagcagctttttgggtcacttggcaaataggtcagagagtaacacactcaattgaggaatatgttgcctctaaaatccaaagagggcctaatggtgttatgcctctttttttggttgtacaaggggctagatgcaacaacttattcttcactttagaagggatatctcgaccactagactcctagaaatttcgctgaagtgaaaggcccttgaatttttataggatttattttccaccctctgacatgcaaatgtcttagtagtaagtctagaatagttgctacttcttactgcttccagtcagcattatgtcatcaatgtaatggaccagtgcgattgatatagaagggaaaggcaattaagatcccttcagattaaattatgacatagggctggagagttggcatacacctgaggtaggacaacgaaggtgtattgcgagcttgccacctgaaaccaaactgtttctggtggtctctactaacagacatcaggaaaaaaagtatctgccagatcagtaagtgcataccaggtaccaggggatgtattaatttactcaagctatgaaaccacatttggaacagcagctgaaattgatgtccccacctgattaagtttccagtaatttactctcattctccaagatctatctgttttcttcacaggctaaataggggagtagaatgggaatgtgataaaaagtaccacctctgcatccttcaagtccttgatggtggtactaatctctgcaagctctacaagaatgcagtattgtttttggtttgctgtttttctagatagaggcaggtaagtggcttccactttatagcgtaattgccctcactcttcaggtcaggaaaccagtgtagggattctgctaattgttgagtatgtctattccaattattctgcagctacagagataacaagacgacccactgcaagacagacctaaactaaaactccattgatcacctaacctccctaagcccctactctcacttgtgaaccagagtgatgcattagttttcctggggtaccctgagtctgagttcagaaccaatgtccagtaattcccccaaagtctgattattcccttttccccaatgcacagtcaacttggtaaagtgctataggtccctttggggaaggctgagagaaaaatgaacagtatacaattttggtaatgcagtggggacacagcctcctcattatttaaggagatatgggtctgcaaactggcccaagtcttggaattgattcaggagctgtgactccgtttttttgattcgagttagacttttattcacttgattcttctttttatacagaacagataagaatttagtaggctttccatctcttttatttctatggatactatgaccagctagctaatgccataagtctctgtaaatcggactttctaactacagttttgactttactgtccattacagtaaccatgttcaccttgtctttggtgattaaatgctgccacttggcccctgccatcctgggatccagttactctccttatacttaagaatcccattcagtggcagcagttcccactgtaatttctgacctatacagaagagcaaccacagagctctttaaaaatattggaactccctcacaaatttatttctcatagtcataacagaaagtgtgtcctgagctagatgtggtagctcacacctataatcccagcaccttgggtggccaaggtaggagaatcgcttgagctcaggagtttgaagcctgcttgggcaacgtagcaagaccttgcctctataaaaatttttaaaattagccag

SEQ ID NO: 42338 - DNA, 2300 bp, Homo sapien
tgaaaaggctggtttccttttcagtagaggaaggagagtagcgcacaaataggaagacagtcctattattattattattcaaactaggatgtgtgtcctgactgatgaggtgcatgcgctgtatcccttattccccttggctagagactgcatgaggtcctagtgaacagggatgagttccagacaactctgcctcacctggcctgtggcccaagaacccctggttcttcgttggtccctatgttcagttactgggagctcaaaggagaaggaccagagatgggctccctgtcccactatttagtgtaacatgactagcagctgtgaaaatccctggccgggcgcggtggctcacgcctgtaatcccagcactttgggagaccaaggcatgtggatcacgaggtcaaggagttcaagaccagcctgaccaatatggtgaaaccccgtctctactaaaaatacaaaaattggctgggcatggtggcgggagcctgtaatcccagctactcaggaggctgaggcaggagaagtgcttgaacctgggaggcagaggttgcagtgagctgagatcgcaccactgcactccagcctgggtgacagagcgagactccgtctcaaaaaaaaaaaaaaagaaaaaaaagaaaatccctagacacctcccctgatagccctgctgctcaccatttgctggctgtgttctagtcatgtgcagctgttgctggctacacaatgacaatatctcaggggactccaccactgcttctcagatctgctccctgggaactgagcttcctgagtggcagctgggaccactgagcactgaggaatgggtggcctgaatctgacccctatttaacacttgtgtgggtggtgccaggacaatcacttgcatgctgggcgttatgtgttatgggttatcttcagggttcctagggcgctggcttgggcgagtttccatccagtggttttttttttttttttttttttttttttttttttttttttgagacggagtctcgctctgtcacccgggctggaatgaagtggcacgatctcggctcactgcagcctctgcctcctcggttcaagcaattctcctgtctcagcctcctgagtagctgcgattacaggcacgcatcatcagctaatttttgtattttagtagagatggggtttcaccacgttggccagactggtcttcaactcctgacctcaggtgatccacccgcctgggcctcccaaagtgctgggatgacaggcatgaaccagcatgcccggcctatccagtggttttcttttgttgtgttgagctaggaaagaaaggggtttacaagagcttcagggaaaggaagactgaagaggagatggggccataatattcggaaacttctggtttcctgtcggccttctgaatgccgagcactgccctggggtaggcccctcacctgctgctgagcacactgagagccaccaagccaccgagagactcatccctgacccacggcttgggagatgcctgtgaggctggtgcagtctgccagggacacccgagggagaccctcagagacagcaaaggcttggctgtttcttcttggcagacaagggtcagggagtcttggtgactggcgccaggctctctagtggagcgactctgccgtggaggaacagagcatctgatgcacactcagggacacttgcaagctgcagagtttccctgtcacatgccctcagctgttgggactcccctgattccccagtgactagagtggacctggagacgccagctcattcacctctttcctttgtctccacagcatacccagtgctgggacccggcgtgaccgtgaaccctggcacctccctgtctgtgttcacggctctgccctttgccacaccctctcccggcccaacacacaggccgcccctcgtgactgcagtggttcctccagccggccctctggtgctctctgccttccccagcacccctctagtggcaggacaggatggccgcggcccaagtggggctggggcttccaacgtctttgtccagatgaggacagaagtggggcctgtgaagccccctcaggcacagaccttgatcctaactcaggcccccctcgtctggcaggctccaggcaccctctgtggaggtgtcatgtgtccacctcccctactcctggcagctgctcctggggtgcccgttacctctgcccaggtggttgggggcacccaggcctgtgagggaggctggtcccatggccttcctcttccaccaccaccaccggctgcccaggtggccc

SEQ ID NO: 42339 - DNA, 2300 bp, Homo sapien
gaatcagaaactgatacccaagctcataagtggcataaacataatactcaaacagcataacataatacatatattccctttgtgttttgaaaactatttgttaaaacaatcattcagaaaagtagacaaatcaggctgggtgtagtggctcaggcctgtaatcccagcactatgggaggtcgaggcgggtggatcacctgagatcaggaattcaagaacagcctggccaacatggtgaacttgtctctaccaaacatacagaagatagccaggtcgtggcatgcacctgtaatcccagctactcgagagtctgaggcaggagaattgcttgaacccaggaggcacaggttgcagtgagccgagatccagccactgatctaggctgggcgacaaaagcgaaatttcgtctcaaaaaaaaaaaaaaaaaaaagaccaggccggcttggtgagccgaggggggcggatcacttgaagtcagtagttcaagaccagcccagccaacatggtgaaaccccgtctctactaaaaatacaaaaattagccgggcatggtgacgcgcacctgtaatcccagctactccgcaggctcaggcaggagagtcgcttgaatgcgggaggtagaggttgcagtgaacctagatcacgccactgatctaggctgggtgactgtagcttgggtgacagagcaagactctgtctcaaaaataaataaataaataaataaataaaagtaaagacttctgcaaagtgtgtgtgtgtgtctgtgtgtgtgtgtgtgtgtgtgtgtgtgtgtttgggggtggtgggtgggaagcgaaaaagaagctttttttttttttttggagacgaagtctcactcttgtcacccagggtggagtgcagtgcaccatctcggctcactgcaacctccgcctcctgggttcaagcgattctcttgcctcagcctcccaagtagctgggattacaggcatccgccaccatgcccggctaacttctgtatttttagtagagacggggtttcaccatgttggccaggctggtctggaactcttgacctcaggcgatccgcccacctctgcctgccaaagtcctgggattacaggcgtgagccaccacgcccaacctgaaaaaattcttaaatgaaatgactttaattcaattaaaattactaatcctgttaatagaaataattttattcttttttctattgatgtttgtaaaaagttttttttttttttttttttttttgtgagacagagcctcactctgtcgcccaggatggagtgcagtgacgctatctcggctcactgcaacctccggctcccaggttcaagctattctcctgcctcagcctcccgagtagcttggattacaggcgtgcgccaccaagcccggctaatttttttggtgttttttgtttttgtttttgttttttagtagagacagggtttcaccgcgttggccaggctggtctctaactcctgacctcaggtgaaccagccgcctcggcctcccaaagtgctgggattatacgtgtgggccaccgcgccaggcctgtaggcttttttatatttcagtattaggtgcatatctttcaaaataaataaacataaaaagccaggcttttccaactgtgtcctacacattctgcaagatattaatcatgtgtcaagaataaaaagtgttgtgttcaagtacgtttgggaaacattgctattatattattttcttcttggagaaccatagaaaaacttgagaggttggcgggttggagcaaaccaagaccaaaactgaactgcaatcactaccaaacccccacgagtttgcccctcctcgcttgctagcctcagtccagattctccggaaaaagaaattagtcgtacgggctctcgaaatgacgtacttcccgcgcgccgcgaagtcctgatgccaaggggccagtcgcgaggtaaaggaggggtctctgaagtgggcgtggcgtcgctggaggctactcaggcgcgggactcgttctcgaggcgggagctgaggtgcggggtggggcctccaaccgtgcagcccgcccctgacgccgccggtaactgcgacagtcggggtcggtgcggtttgctaagtggtcggttcctggagctgcggtcttctgctagcctgatccgcagcttcagcctccgccgcctcctcagccctcggcgccgccgcctgacccgcaggccgccgcgggccgcagagcccatgagggcgcgggcaccgccgccgcctccgcggcgtcgccgtcgtcccggagcgccccgagctggcgcg

SEQ ID NO: 42340 - DNA, 2300 bp, Homo sapien
cgccatgttgcccaggctggtctcaaactcccaggctcaggagatccacctaccttggcctgcaatacaatatacttttgtattttttatataaccacctgacagctttggcccctagttgtatttgagagggaaaagctgctatttatttaaaggaaggacatataattattaataaattgatttttaaaaagatgtatttgcctgatggtgcttctgaaaagttgtcagtttaattgtttttaatttgttaaaagaaaatccatagccaaattaaatttaagagaatttaattgagcaaaaaacaattcgtgaatctggcagcctccagtgccagagtaggctcagagagactccagtgcagccacatgggggaagatttatagacagaaaagggcaagtgaggcacagaaactgcaggattggatacagctccatgtttgccttatttgaacatggtttgaacaactgaacctctttgatttacagaaattcggggataggcacaagagcaggctacagtctgtttacacctccatttagattacaattcgctatgtacagagaaacctttaggccaaacttaaatcacatggggaggcagctttaggctaaacttgatttcacaaattttcaaattaacaagtaaaaactgtggatattattcaatttaatctttaagagtttattaatcaatatgcattataacttcatttttgtaaaaacaaaaaaagatatgcctagaaaagggttatggagagggcacaagggacgtttattttctaaaacatattttttataatggatttttttatataactttaaaaagaattagaaacgtttctgaattattaatgatttccttaaatctttagctacatatatttctccataaagagcagttcctcaaactgcatcacctcaaccctgatattatatatttttatttttatttttattttttgagacagagtttcgctctgtcaccagtctggagtgcagtggcacgatctcagctcactgcaacctccgcctctcgggttcaagcaattctcctgcctcagcctcctgagtagctgggactacaggcgcccgccaccacgcccagctaatttttgcatttttagtagagacagggtttcaccatgttggccaggatggtctcgatatcatgacctcgtgatccgcccgcctcggcctcccaaagtgctgggattacaggtgtaagccaccgcgcccggccggtattaaacatttttaaagtaaatttattaaatctcaaaagaagcacactttgaatactgaggaagagacgttgtaacccataagcagagagtaggtaagtaaaagcaatttccaccactctcagactgggcgtagtggctcacgcctgtaatcccaccacttttgggaggctgagaggggaggatcgcttgaggccaggaattcaagagcagcctaaggaaacttagccaaactccatttctacaaaagaaaaatttttaaagcaatttatttcaccattctcaacgcttttctcttttttattaaccaaatatttctgtaactcttttttttttttttttttttttttttggtattgaaagacatgggagaaggaagaattcctgaatgcaacagactgggaaggacgcaccacaaaacgctccgcggtctctggacaccctatcagctagtcccgtccctcctggtgtccggtctcgaccatccatcccgtgttttgggagtgcctttccttaccagattcttctaaagccctgatgcacccacccttaagtggaaggtaatgcttctgctgggggctgtgcgttcttccactccgtcccacctttgccgtggactaaacaggagccactgaacgagagtaccctggctcccggccctgcagattttcaccaaaaactctaggactaagttaaagtagggactgaaataccacacagagctcgctgtaaaccacccgctcagcgcagtaagtcgggatagtcagtagatctgagcccttgagggaggcgcctccccctcctccgcgcagcccccgggcgcccggcccagcttcccgcagccagggtgtattgaggtaggcgcgcccagacctgagacgggttgggactgggctgcgtcacgcgcgggctctaagcgcccggggccccgcccagtggccggcacagccaatcgcagcgcgggaaggcggtgggggcggggaaggccgcctggaaacttaaatcccgaggcgggcgaacctgcaccagaccgcggacgtctgtaatctcagaggc

SEQ ID NO: 42341 - DNA, 2300 bp, Homo sapien
ccccgaggagaaaggagttctgcctccagactaccttcagattcaagactgcaacatatacacacacatcataatggttctatttcgcctaacaatgctaatccaaagtttgctaccaagaatagctctacaggaaaaaaatcttaagaataaattttctggattggctctgaggtttctggaattggttctctaatctgattagatttaaagacatcaattactctatttccattagtgaagagagcactggcatgatctggcaatagagacacacacaatgtcaccattagatactcttaatcaaaagctcataaaagacaagctactgggtgaccatatatttaatatgttataatattttttcaaactaatgaatagaataaaatttgctaattgcttctaattgcattggggaaagaaaaggatgaactcagggattcagtacaaagggtgacccatgaggaggttcactacagatggatagattgcaaaaaatttctcccattctataggttgtctgttcactctgatgatagtttcttttgctgtgcagaggctctttagtttaattagatcccatttgtcaatttttggttttgttgcaattgctttttgcatctttgtcacaaaatgtcctgaatggtattgcctagatttttcttccagggttttatagttttgagttttacatttaagtctttaatccatcttgagttgattttgtaaggaagaggtccagtttcaattttctgcatatgactagccagttctcctagcactatttattaaataaggaatccttttcccattgctcgttttggtcaggtttgtcaaagatcagatggttgtaggtgtgcagtcttctttctgtggtctctattccattggtctatgtgtctgttcttacaccagtaccatgctgttttggttactgtagccttgtagtatagtttgaagtcaggtagcatgatgccttcagctttgttctttttgcttaggattgtcttggctattggggcccttttttggttccatatgaattttaaaatagtttttttataattctatgaagaatttcaatggtagtttaatgggaatagtattgaatctatacattgctttgggcagtatgaccattttcaagatattgattcttcctatccaggagcatggattttttttccatttctttttgtcatttctggtttcctggagcagtggtttgtacttctccttgaagaggtccttctcttcccctgttagctgtcttcctaggtattttattctttttgtggcaattgtgaatgggagtttattcatgatttggctctctgcttgcctgtttttggtgtacaggaataattgtgacttttgcacattgattttatatcctgagactttgctgaagttgcttatcagcttaagaagcttttgggctgagacaattggggttttctatatataggatcatatcatctgcaaggaaagatagttttacttcctctcttcctattcgaatacctttatttctttctcttgcctgattgccctggccagaacttccaacactatgttgaataggagtggtgagagagagtatccttgttttgtgccagttttcaaggggaatgcttccagcttttgcccattcagtatgatattggctgtgggtttgtcatatatggctcttattattttgaagtatgttctttcagtacctagttcactgaaagtttttaacatgaagggatgttgaattttttcaaaggccttttctgcatctattgagataatcatgtggtttttgtctttagttctgtttatgtgatgaatcacatttatggatttgtgtatgttgaaccactcttgcatcctggggatgaggccatcttgattgtggtggataaggtttttgatgtgcttctggatttggtttgccaatattttattgaggattattgcaccaatgttcattgaagatactgacctgaagttttctttttctgttgtatctctgctaagttttggtatcaggatgatgctggcctcatggaatgcattagggaggaatccctccttttcaaccatttggaatagtttcaggagaaatgataccagctttttttgtacctctggtagaattcaactgtgactccatctggtcctgggctttttttgattggtaggctatttattactgcctcaattttagaactcattattggtttattcagggtttcaatttcttcctagttcagacttgggagggtgtatgtgtccaggaatttatccatttc

SEQ ID NO: 42342 - DNA, 2300 bp, Homo sapien
cctggttagtggggcctggtcatggggttctaatcaatgagggtgtgttctgggaggacctgatgtgtgggatatggtcagcagggacctggtcagtgggggctgctgagcactgctgggagatgtcaggtgcaatgcacgttatggagggccctgtggatagttgggatggcccagtagtgcccaaagtcccagtcaaaagtggacaaagcaggtgtttggatggacctaggagatcttgctcagagatattgaaaggacaaaggtaaaggaagggccagagtggccagatagatggtcacagtctatcagctgcacaggatagaggaagccagggaacaggcagggtgggcagctggggtgcagggagaggcaggtgcatgctgggaggtcagaccttgtgagggctgtgggggtgtcaggtggggtgggctccaggtgcaccctcagtgcactgggcagatctcagcccaggcttcctggaccctggtcgggtgatgtggtcactccctgggggattgctatcaggcactgggcacccaccatgggcagcactgtcccatctcaggactggactttctcagatcctgcagagggcacagcttccagcgcaggaggggcagccccatggtgcagcccgagctctccgtgggcttggagtgtcccctgccagccctgcgctccctcttctcctgggtcccacttttccagtgtcagccagcagagaggctccatcctcccttccctatgtgtctcctgggctgaaacttgcagcggattgggacagggatggtgcttccctcaggcccatttagggaggggactggctcccagcctggcacaggtcctcagctctgccttggttgctttagagtgagatggatcagtcagtgtcctgaaggtaaacgtaagagactgtccttgctgtgtgggaggctggtctagagatgaaggacttaacaggtcctcccagtccgtcaggcctggacagtactgtcgtgtctcaggactcagcccagtcctaaatgggacggtgctgcccagggtgggtggccgggacctgacagcagtaccccaggcagtgaccacatcacccagccagggtccagggagcctggcctgagacctgcccagtgcattgagggtacacctggagcccactccacctgatgcccccacaaccctcccagggtctgacctcccagcatgcacctgcctctccctacaccccagatgtccaccctgcctgttccctgacttcctccatcctgtccagcaggatgtgctgggcagtgggacagcctatgtgcacattttgtggcaagtaggagtgacacaccatccctgggtggcgccatggttcctgccaaacccaaccccagaactctgtccctgaggtggttttacaaaacccaaaacccaaaactgtggttgtggctcaggggtcagcacctgctagtaccaggacactactgggaggctgggacctgaccaaagcccatggtgtctgtggcctgaggacagggtgtcttggggccataaggcccggccaccaatggccattgggtcatagggcgtcagccccagtgtttgcccttccctggctccttctggttcagtcccatcagggccctggagcccaagacccagcacccaaggtcccctccaggaatcctggcgtcttggcttcctttatcatgtttcatctgagagcaaaaatgtcagatcggatgcacagaaaaatggcccaaagtgcttaatgactagaagaaatctagctctccctctccctctccctctccctctccccctccccctcccctttctttctttggtctccctctgttgccaaggctggactgcactgccgtgatctcagcttgctgcaaactccctgcctcaggctcccgtgattctcctgcctcggcctgctgagtgcctgggattgcaggcacgtgccaccacgcctgactggtttttgcatttttggtggacacggggtttcgccatgttgaccgggctgatctccagctcctgacctcgagtgatctgcctgcctcggcctcccgaggtgctgggattgcagacggagtcatgctcactcaatgctcaatgttgcccaggctggagtgcagtggcgtgatctcagctcgctacaacctctacctcccagccacctgccttgcctcccaaagtgctaagattacagcctcttcccggccgccaccccatctaggaagtgaggagcgtctctgcctggccactcattgtctgggatgtgaggagcgcctctgcccggc

SEQ ID NO: 42343 - DNA, 2300 bp, Homo sapien
ggaagaaacttacacaggtaccactttaatttagaatacaaactagaaaaaaagaaaactttactatacaaatttttttaataagtaaagaatataaatttctttttaagaaaaaatttattgaagtaaaaaaatggattaaacttttataaagaacagagttttgctaagaatttcaaagcaatgcattcattgcaaaatatgactttaattgtttaacctttttttttttcttttttttttgagatggagttttgctctctcactaggctggagtgcagtggcacgatctcggctcactgcaacctccacctcctgggttcaagccattttcctgcctcagcctcccaagtagctgagactagaggcacgcaccaccacgcccagctaatttttgtatttttagtagagatagggtttcatcatgttggccaggatggtctcgatctcttgacctcatgatctgcccacctttgcttcccaaagtgctgggattacaggcatgaggtgtcatgcctggccattgtttaacctttgtactaataaaacaccacttttctaaaattatttatatctaatagaccaatattatctatttttgtcagattactctaaacagcattacacagaaacatcctctattatctcaacttaaaataagtagaaattttactttacttatgtgattatttttctatttaagcaaacttcatgttatgtctagtcactaaaaatactaaaggccacattttgtaagtgatatattaatctcatgataatgtctcttgtttaacttaaacattatcatgtttttttacttattttagatggagccggactgtgtagaacaaataattacagaaacaaagaaaagtatgttgccaaaatgtattaattaaatttaggtttattttagtaataaagtgtaaatagcaaatggcattccttttcattgttgggttagtagatactatggtatctttttcttacacatatctaatgaaagatgtgaaaacaaaaactttaacagtgaagagtatacttatgcaccattaattcatagcttaaaaaattcccaagaagtgtatccatctctttttactgttccatagcttaaaaaattcccaagaagtgtatccatctcttttttactggctctacaatttcttcacttttgccatcctcatggaactgtcagctggcacactgaaacgattctccaaaaacaaaggcatcatcaggttctcaggattttggtagagattgaaggccaacaggcctcagattcatttagaaatacttagctgagcaataacccttcataagcagtcacttgacaggtgacattttaaatatcctgtcatttactgtgtcattggcttacatctgttctcaggaaaagttccaaaaatttcaccatgaaataaaaacacccatgtcaatgtaattcttgtcaggttactcagccttgtctcttgccacttactgcactctgccctttgctctagcaccaaagtggacagagtagaactccacagggctctttgttacctcaggctctttgctttcgcctcttccctctatctggcaagattttccttgtccttcaggcatcaacttatccatcccctccaccagaaagcccatgatattgacacaaaagtgggatagatgtcccttctgtgtgttccagtagtgccctgctgtatacctgacatggtatttatgactctatatggacattacctgcctgtcttttaggttatagcatatgactattgggaggtggaccatgccatcttcatcttgtaattccagtgctcgttctagtaccttagcatgtggctgttgagtacatgaatgaagaatgaaaaagctgtgatatttaaccacaattagaattaatgccatgtgtaaattatttaatagtaattttgtattgtaattgtacgtacatatttctcattcttattaactctgataacgttctcaactctttagattttaaacttacactttgttaactgaaatgttttaggtaaagaacataattctttctttttctttccagcttttgctgtgttgaacacttgctcccatctcctttcttctctagaatccactggtaagccacatctaatgaagagaatatttaaccataaaatcttaaggaaaagcatgaattaaaagatcataaaactttattactgggctatttacatgaaattttaattgtttctcataaaatataaaacatcacaatctttactaaagtagaatattttcatatcatgtatgat

SEQ ID NO: 42344 - DNA, 2300 bp, Homo sapien
agagtccacacaggtgagaagccgtataaatgcctggaatgtatgagaagttttactcggagtgccaacctaattaggcaccaggcaactcacactcacacttttaaatgccttgaatatgaaaaaagctttaactgtagctcagatcttattgtacatcagagaattcacatggaagagaaaccacatcagtggtctgcgtgtgagagtggcttcctcctaggaatggactttgttgcccaacagaaaatgagaactcaaacagaggagctacactataaatacactgtatgtgataaaagcttccaccagagttcagcccttcttcaacatcagacagtacgcattggtgaaaaaccgtttgtctgtaatgtgagtgaaaaaggtcttgagcttagccctccccatgcgtcagaagcctcacagatgtcttgaccaggcgagaagctgtaataccaatattaaaaattatttatgtatcagagaactcattaagatgaggacaaatctcagactttgctcagagctcagaattcagtggggaccagagagcctgcaattggaaatatgagaaattctttgcccagagagctgccctaacagaacacttcatcctcactccaacgagaaatctacagatgcccagaggttttgaaaacttaccgtctgagctcaaatttgatcactcacaagaggattcatacaagtgggaaaccttagaaatgcactgagtgtgagagagctttctactaatgctcagcccttctcgttgtaagagaattcacaccggagaacaactttttaaatgccttcagtgtcagttgtgctgcagacagtatgaacatctcattggacctcagaaaacccaccctggggagaagccccagcaagtgtgaaaaaagcttctaacaaaactctgacttacccatcagagaagccatactggtgaaaaattgtatatttgtcttacgtatggcaaaagcattcattggagagccttacttgggtttgcacccaaaaaaaaaaacccaatctgaggaaagactgcaagtgtctgaatgaagagtgcttgtcaatgatcaactcttgtggtacatcagggaactcacataggtgaaaaaacccatacttaccttgagtctgagaaaacctttggtagaagctcctgtcttatcaggccccaaaaaacctgttctgcagtgagagatttaattgtgggtgagaatctatgtacatatgtatgagaagactgttctcatagttagttgactcatatggtagagaggactttacatgaaatcagtatgaaaatagttttttagatacccagaagcttgttctgggagaagctagggcgggtcagagtagacctgatgggtaactcaggtaaagatgcttttcttttatctgaactacttaatgattgctttacttttactttttaaaaaattcagaaatccaataaaggaaaggacggtaaccttatgatagaaggtgtggcatgtgttactgttgggggaaaggagtatattgactttgccttggttgatatttttatgcttgtctaggatgggactagagtgttgatagtaacatggcagccttttgctggcagtgaaatgaacttaagaagctagggagtagctatcctagatcaaaactctcccaatagtttttcctttgcaggaccaatcttataaagaaacagcatactcagctttttacttagtgtcagttgaggcatactctcaaaagttttttcccctaaaatatctttcaagttattactggtatttgaaatttcaagtttagaaattcatttctttttaactcaaagtgcaaatttcatataatgattatgatggttttagtgtccatatttttgtgacttcacttatcatctctttcagcagtagctacccacagtcagctcctagtaaaatggctacaggaaaactgaaagaaaagtttaagcctgagtaggcatagagtaaaaaatgcataatgatgcattattaatataagagtaaggctttttttattttgagtatcctaactccaaacctagtgttcttttcactccattatcctgctgtttatagcaaatcaagacccataatgatacgtctttcatttatttcagttctgccaaggaaagagaaaataccttttaatcccagggaaaggattgcaatcaccacattataaggtatatggcgtggaatgcagaattctaaatactagaagggaaaagtagttggcagattcatcagaggcttaaggataagtacttgtttcca

SEQ ID NO: 42345 - DNA, 2300 bp, Homo sapien
caaaaatgcaagtgacttactggcttttattatgctagaaataagccctatacatcagtattagaactttttttgataagccattgtatttttatttctgatttatattttgcctaaagtaaaaaaaagttaaatagcaatttaaatggaaatcaatacgaatggatttaaaaagtaaagttgcattagcatcccaggattatcattataattgagaatagaatttcttcctgagctttgctttttaatatttattttcaaaaatttttaactggtctgtcttacacagaacatactgagctttctaatagttaagattaaaatctatcctcttgtattaggaaaaatcccatggactatttaataataaggaaaataagtgattttgaagccaatctctcttaattcacagctcatttccttagtggcccctttggatcaggagtgcctgacattggcatcctgacaacattgatagaagtaaatcaagcaagtttgtgccaccgagaggaaacctccacttgtattgggaagctctggcaactgtatccctgaaactctagttcctaaaatgttaatgtttgccacaaaaagtattgtcaaattgagattaggcaaagttcaagggatttctagattgttggccatgtaatataattttgtaatacttctcaaatgcagatgatcatggaatctttttgttggggtacagttcttctggtaaaacaaatattcttcgaaatatagtttaagaaacacggctccagagataataatttagatcattaatttattttaaaaacttaaagcattcactactatgtcttaggttttagggttatagagaaaaaagatacagcccttgccctcgagaagctcttggtttcagtgggaaacaatgaaataattacaatgtactgtgctaaatgctgagacagaagcaaggatttttgggactggtaaaaaagggagttttggagatgaccgaagttaatgtggggaggcagaggaggggtgttcacaagacagtgtgtgggaaagcacagaggagtgaaaaggacgggactgctttgcatttactttctctctatattgcatgtttaagttcatagcatcttatagaagatttttagttcagttgagaaatacatacttttgtgaattataaattgtttttgctttttacaggagggaaacactccacttttgtttgctataaattctgggagacagcatgtggtggaattcttattgaagaaccaggcaaatatacatgccgttgacaatttcagaaggtgcaatagtttttgtttttggtttgtttgttttttttcctaaaaatctgagtgttctagagtggtaagagtcactcaagtcagaactgttaataagatttaacttataattattggcatatagtaaaaaataacatgaataatcagttaggtagaaaagcagttatttggactgagcaacataaaaaacagtatatagtaggattcatcttctcttatagactgttatttgtaatttgatgtttttggtcctgtaatcttatattagctaaaggggttttgtattttattaattttataaagtgtagacttggcgccggcctcttcccagccagcttgaaagggtttgcgttgccggccttgtgggcccttgaagcgctctgttaaagcgctctgtgggcggcctggccccagctcctctagtctaggcgcacgaagggagttgctcctaggtcttgtccgtgccgggttcgcttttctttccttcccgaagcctggcccttagatctactatcgcagagtctgcggccgccaggaagcccagattcgagtgtccggagagtaaccggaagtgctgtccccaggcctaggggcggcgccggcggctgccagggagaggcaagaattgagtgttgtgaatagttctgaactagagaccttttgaaaccaaaaggaagatggtcttgagtctttcttgttacgaatgctatcttctttgagaagtcaaatagtcaggatcaggaatgtatgttttcttccatctggattctagggttggaaataccaagtaaggaattaacatatatgatgctggaaacttgtagaggctcatgattgaaaggcctgaaacagatgtatcttccaagttcttatcaagaaaatgactgtgagggcaacgatgggtcaagaagaccagcggaaaactccctaggagagagccatagaaaatgtacacttcagaagagaaatgtaatcagagaactcaaaaaaggaaaatatataatg

SEQ ID NO: 42346 - DNA, 2300 bp, Homo sapien
tggccatttagataacatttgaaaattaaccaatgtaattggttacattgtaacattattattaaaatattattttaaaattattattatataacagtaacatattattattaaaaatacatatgaacatttcaataaaggcagaaaaagcacttgatattgaatgctttcctcttgattttacaaccaagacaaggaagtccattatcactatttctattcaatagtggacatactagccagcaacaaaactaaaaggtataaagattacaggaaagttaaaccatctctattcacagattggaagattgtaatcacataaattccaaaagactctgtagtctttttgtcccttacaaataataagggaacttagcaacatgcttgaatataacatcaatatgtaaaaatcaatagcatttctatattcttacaacaaacgagaatataaaaaaataaaatgctatttaacatcgcatttaaaacactgctcaagaataaatctaatgaaatatatgtttgatctctatactgcaatcgatccaagcacaacttggatccaaacattaagatataaatatgtgtacaatctacaaaatattaccaggaaaaattagaggccacttaaataaatggtgggaaataatgatattaatggattgaaggacagtattgttaatatactagttttccccaaacagatctacagatccaacgcaagcccagtacaaatcctagcagttttgttttttttttaaactgacaagctaattccaaaattcacctacaaatacaatagccttagaataagccaaagcaatcttgggagaataaagtcacaggacttcaagacttattataaagctacatgaattaacacagtttgatagtggtataaagttagaaaaagaccactccctccagctccccattctgcccccatccctggaaggcgctggcagctttccccatccgatctgcatgggtcaaagggcgctgacggagggcctgaccgaccgggatgggaaacaaagcggccctgagatcactttcggtctaggaagcccactaagaagaaagcctgggctgtggagttatgaggaagggaatgaatagtacacgggggccaggcgcgtctccccaggaaccagaaggcctttagctctattagttcagaacgacttccagcgagtcccagcccttttccattcccagcgcaacgatcgccggaatccaggcgccatccaggcccctctgttccctgaaaagaccacgcagcctccagtgacatcacggagacgaaagggcttggccacctgtggcagccatgataaaacctagggaaaacggagctcgaagtagcttattttatttattttttatttatttatttatttattaaggagtcttgctctgtcgcccaggctgtggtgcagtggcgcgatctcggctcactgcaacctctgcctcccaggttcaagcgattctcctgcctcagcctccccagtagctgggattacaggcgcccaccatcacgcccggctaatttttgtatttttcgtagacggggtttcagcatcttggcgaggctggtcttgaactcctgacttcgtgatccacccgtctcggactcccaaagtgctgggattacaggcgtgagccacggcgcccggcctggagcttgtgttactaaaagacatgcaaacgcccttaaccgctaagctcctgaggggtaacggtatgctacaaaagtgcttctgagctactactcctggaggcttggtccgagtgaccgcagcagtgggcgcggtggaagagaaggagaacgtgttggcccgggcctccataaccatggctgctaggggcggggactgggagcgcgggtcccgggactgggagcgcgggtcccaggccagggtgcgggctgggaagactcggtcctccactgccccagcaggccacgcgcccgcgcgtagcctcccgccccgctagcagcacgctgcgtggctgctcgttggctacttacgacggaagctcggttggggtttctgcagaagtttcccccttgggcggtggcggagctgataagcgcgctagtagcagctctggcagaagcaacggtggcttcgagggatggcggcggctgcaacaggacctgcagcatcccagaggtgcgtgtttttccttccctttgctatttattttatcccctttccttggctagtgggtcctgctgaagtcgttgttttcctgagaggttttttccagagcttctcagatgctctaatccactgcggcgt

SEQ ID NO: 42347 - DNA, 2300 bp, Homo sapien
cagtaagaagaactgctggctgggaaggagcatgaaggaaccttatgaatggaaatgctctatatcttgatctgggtggtgtacacgtatctaaaaactcatcaaactgtagacttaaaatttgtgttatttacgtatgtcatatatgcctcaataaaaaatttaaggccgggcatggtcacacctataaacccagcactttgggaggccgaggtaggcagatcaccttagatcaggagtttgagaccagcctggccaacatggcaaaaccccatctctactaaaaagtacaaaaattagccgggtgtggtggtgtgcgcctgtaatcccagctacttgggaggctgaggcaggagaatcgcttgaacgtgggaggcggaggttgcagtgagccgagatcatgccattgcactccagcctggatgacagagtgaaactccgactcaaaaaaaaaaattaataagtaaaagaagatagaaagtgacaatgaagtttattatattaatattctttaaaagcaactttttttttttttaagacagagtctcactctgtcacccaggctggagtgcagtggcacaatctcagctcactgcaaactctgcttcccaggttaaagcaattctcctgcctcagcctcctgagtagctgggacaacagatccacaccaccacaccccgctaaagtttgttttgtatttttagtacaaacagggtttcaccatgttggccaggttggtctcaaactcctaacctcaagggatccaccctccttggcctcccaaagtgctgggattacagacattagccaccgcgttgagcctaaaagcaacttttatacaaactggatttccaaaggatgcactagccctaacatgacaattaagaaatgtaaattcaaagtaatagctatctaatataagaaattacagagaaaaattttcactgcttcctgtaacattatcccaaaactgatcccagaagccttattgctggtatctaaaggtctatatatttagattcaaaaaacatacctgggccctaaaaggccatacaggacgtggctccgagtttcctgtccaaccttatctcctaatcaaatgggccctctaataaaaagggcctttttgctgctccatacacaggccaacttcatgcctacttcaggatctctgcactggctcttggtcctgcctggaatgctctttccccagaacttctaagcgaattctcttgcttcttcaggtctctgctcaaatatcaccttaacagaggctccagcaccctatggcacatttcttataaaagccatagctagaaaagacgccgtcttgcctcaaattgttaacgttacttatgttagattataacaacaaaacagggtgtccttttttatgtgctttaaagcaaaaaacaaacaaacaaaatgaaaaacaaaaacctcctggttaaattctgtgacccacagcatcatttatctttaggctcttctttaactcctattatttaactcttgctcttttacattcctttacagctttatagtttgtcttcactgcacacctgcaagaagtgatttcttggttagctaagtatataactaagactaacccatagcaatcagcgcctttgcacacagcaactcctaaaacattttttgatgaataaacaaatgagtgaataatgaactatgacaagacatctggaaagtttcagggacgtgagggaaaaggtttttgttccagtagactgacttcataccggcacttttacataagaatggcaacaatgatgtcaaacgaaaaaattaattttcatcgagcccagagtccacttttctcttctagtcataactgccattaaaaaaaaaaaatcctttcagcccaactacagttgtcaaccatgttcccaataaatggaggaggtttttctcagaagtgcaggaatgcaagagtctggaaatggaaagggcaagacaggagtctgaggtaacgcgaggagactgagaatctcaatactggggcggacacgcagtaaccacaggaccctgggtcccaatcaggtgctgctgggaggaggcgcgtcagccaggggtggaggaagcagaaaaggctctctcacctctaacgccgcagtggattagagcatctgagaagctctggaaaaaacctctcaggaaaacaacgacttcagcaggacccactagccaaggaaaggggataaaataaatagcaaagggaaggaaaaacacgcacctctgggatgctgcaggtcctgttgcagccgccgccatccctcgaa

SEQ ID NO: 42348 - DNA, 2300 bp, Homo sapien
cattaagcttcttgggcgtgtagattcatgtctttcatctgatttggaaaattttcaaccattaattttttcaaatatttttcttctcatttttctctttcttcccctactgggactcttataaaatgtgtatgttggttcttttgatatgtcccccaagtccctcaggttgtgttcatgtctgtgacctggaaggctacccagggtcttcagacacctttggtgtcttgtctgagcctgcctgagggtggcatgggaatagaataaggtatagcaggtagtcctgaagctctactacctaagattgacactggattcttttgaatattgtgcttctcttaatacattctatgtctacctcatctcatccctagaaagcagtgaggcctagtggtcccaaaataaagattcttcatgttgagtgtcttcatctagcatgatctccaaactcccaggaaacttcaaagctggaaggtatgccttgccttttccccaacacaaataagaaatgccctatgtcacatcctgtagattccagctcccatgccacttcctctggaaagtcttcactaactttacacaggcagaattagtagttttcttttccaagtctccacagaactttgtacaagcccatgttattacatatagtgggttggatcacagacagctgtttacatattagcctcctcaattcacggcaaggtttcccatgggtattcactcactattcattaaaaccatgatgccaggattgattttggtaagtgaattcatactcaaaagaattattcatcttgatctcattattttattcattccaagatcttattatgttataggtgtgtgcttggtgatagtaagcaaaacctgagaaggcctctttcttcatggagctggtatcttagtgagggggtgagcagatattaatcagatcatcacgaagtgttatatgacaaataataatagttaatatctattgagagtttaggatgtgtgagacactatcttaagagtgtttgtctctattaactcatttttttcctcaaaacaattttaggtgttagggggtattactctctttttatagataagaaaagtgaataaaggcaaagtaattgagctgctggcacacacctacaaagtggtggcatgagaatcccaacactttgagtcttggttttctcagtttctaaaaagcaggatgataaagctcagttacagagattaaactaagagacaatgctggcaaacacctagcaacaggactaggttttacattaggtgcttaacaataacaactgaattacaattgctcttggattcatgaggggaatggggattcccctttgtcttgttggtgggatcctcataatatctgcagaagcttcataaggaattttgaatggacagattttgtacaggtcctgggccaggtttttgtgcttcagcatgaaatgtggttaagtactgggctttgcacaggacaaatgtccaagcctcctggcatgacatttggcccttcttgggatggtcctggccagcccctagagttctgtaccccgacatgtcacatggctcaccctcctcaaacatgcttggggcttgcttgctcacagaactttactcttgtgatcccccacctggaatacctgcctaccctgtctttgtatcttcagacaggtggcttttccaagtaatcccacccttattagagagaatctgtgcatctgctttatgactaatgcccaagttagctctgatccattcctcatctcagtggcaatgggagagaaagcctgttgtgtgcctgcttgtctaaaaacactggggaccaggatcatggatttcctttttttccatccaccataaagcctggcaagaagaaagcaatgaggatactgtcagattgaaatccacattctgttccagagaaaaattaggatctgatggttaaactctcctgatgtacacattttaccaccttctccagtgacataaaattctgctttgtaggtaaactaagtgctttttaacaagtaactctccaaggctgcctacccacaatggatagtggaagtcattaatgggtaaagtttgttcaacagacttttctttagttttttaatcttttttgccaagggagtgaaatagtcctgaaacttcatccctcagcccaggtggccatcccatgagtgaccattgttgtctgccatctgcatggatggtgcctgtgccatcccatttcattgcaggggacagctgctggttagattgagccctctcttggtggcagatgt

SEQ ID NO: 42349 - DNA, 2300 bp, Homo sapien
acttgggaggctgaagtgggaggattgtttgagcccaggagtctgaggttacagtgtgagctatgattgtgccactgcactccagcctgggtgacagaatgagaccccgtctcaataaaaaaaaaaagtatacaacttacaaacataatgaaataagcccaacataaaagagtccattctctatggttccatttaaataaaatttttaaagaagcaaaaccaattcagaagttagaatatttgttatcctgggggaagagagggcagtgacatgaaaggtacacaaaaggggcttctgaagagttggtaatgctctgtttcttatgggtactgcttactaggcacgttcctttcagataattcattgagctattcacttatgatttctatacttttagatatgtacgctatgcttcaacatgcacatccaatcagttggttaaataactttttttctggctagtcacaggtcagatggttcaagacttgaattacagggtctagattcatatcctagatcttcctatcttggagatcttggccaagtcactgactctgaatttcagtttcttaatcagtaaaatgggttacttaaggcacccctctcatagtcactacaggcattaaatcttctcattaaatatttgcctcttgtggtggtcctcattgctctgctttgtctggactatgcagaagacagacaatagcctgggatagaggaaggaaaaggatggggtcaagagacattttcaaagttaagagtgagagggaaaagatcaaagatgatgctgagctacaagaaaaagatccagaggccctggtgtcattctttccgttccctatctctggctttttgcccgtatctaaacacaggaggtggactaaccagatgatctctaactggttagtctttcgctatgatattatcaggttgggaggagaatggaaatgccatccaaaaggcaaacacgaatttccacgtttgatgcaaactcaaacacagtctcaaaaacttggaagttaagggaggtaaattctcagtgctgggattatgggttatttttactttctccattgaagtttttcatttttttttaatttttgacaataaatatggagtttaatcaaaacaaaatcccatacttcacatgtccatgcctgctatttatagccatataatttttaaaaagaaagaaacccctaaattacagatgtgcctggaaccagaacccagaaagcatctgggtagggaaaatagtttctagtgttcaaggccaaagccagtagggcctccttggatgggaaagagatatgagactgcaagtaattcctggacattacctatttgttattgtgttttcatcccttccctcagtcacctacacgttttctttttccagctaaaatgaatctaatctttgttacagtacttcaccttgttaataaaacccaggactgaagaatgagaataaaagggttttatactcaccatttcttaatttctgattctagtctggacagaacaatcactcattctagaaaattggcatagggagcatttattagcagttgtaacatatcactgccaaagggagggattctgtaaggcggcactgggtgtctcatatgtatgggaaacccgaggccacgttcagtgccaaccacaagcattttcatctctggccaggcaagccttgatccctgaattttgagctctcaacctcttttaaaatgagaaagagatggtttcttccagagtctttcagcttctaacttacaggcaaacactaccgtatgctgtcccccagcagagattggttttaaccaaggcaaataagttaggatggactttgttgaccgtgatggctcagtgctacatctcatatatcctaccacctttcagaacatttaatagtgctgctcctggcagccctggggttgtagtccttgtagagaggaggaactggcattgaaagaaatagttgagtttcactacgccacgtggggcgctcccattgctaagagcaatctcccctccctgggaagaaaagcgtgggcggggccggggcagtccctcccctccgcgttgccttggagaccatgggcgtccagctgcagttgtcgctggaccggccctggctgccttgagaggtgctttctgcaggcggggacgcggccaggccggacgcaaggcctccctccaatctaccgggctcagggggacggccaggggctgctcagtctacttggcgggctagggagggggatggcagaggctggttgggtcttctcagcacaca

SEQ ID NO: 42350 - DNA, 2300 bp, Homo sapien
aggacctcttttgatggaatagctcttaccacgttggagaccaagattttctctttgggaagctgctttgggcctttgttgtagagatcgcctctgcaagttgattctaatctgttccctcccttggcctcttacccgcacttctggcagaattacggatccagatcaggagatttgaggagctgctgccccaagtgtgttggctggtgatggagaatttcaaggaacaccactggaaaaagtttttcacctctgtgaaggagatccgaggacagttcgaggaacagcagaagcggctggagaaaagaaaggtgagggccccaggaccagcccttccactctaggaccaggggaactgggagttcagaaatggtggcaggttgtgggcagggccaagtccaagggaagaaggtgagcttggcttgggatttttggatgggggctgagggacaggagccattggcgaaataagaactgagccaacagcttctacatagaaggtgttcagtaaactccttgttggctataatgggtgggtgtgctgggttccgtggggctgtagtcattaagacagcaataattgtccacactggtccttggagctgtggaacatgggtactgctgatttcactggactaaaactctgattgtgctgggcagatgctcagccttttctcttccaaacccccgagtcagctctagccatgcccccctcttaacccctctgccactcttctgcccacccatcacccccacacacccaggtcagaggacatgagtctggccataatcataattgacagaagacacaggtcagtgacttttggtgggttaacattgccactgaattctggattgtttgattaaaggacaaaaatgcccagaagctccatctaaatcttggacaccccgtacatttccaagaaatggagtctctacacttaagtgaagaggaaaggcaggaagagctggacagcatgattaggatgaacaaggagaagctggaggtcagtgataccattgattcgccagtccaggcatgctccaaatatagcccgatggacagccactgacagtgccaggtgcagccctttcttggtatcttgcccaaagcaggcatgatcgtggttgggttttgtaggtaaaaatggccattattggctgttttaacttgtatacttttttttttttttttttttttttgagacggagtctcgctctgtcgcccaggccggactgcggactgcagtggcgcaatctcggctcactgcaagctccgcttcccgggttcacgccattctcctgcctcagcctcccgagtagctgggactacaggcgcccgccaccgcgcccggctaatttttttgtatttttagtagagacggggtttcaccgtgttagccaggatggtctcgatctcctgacctcatgatccacccgcctcggcctcccaaagtgctgggattacaggcgtgagccaccgcgcccggcctaacttgtatactttttgacttctaaattaattaattacaaaattactgacgataacttttatttagtgatccatgtctagttttatttcctcttctgtgaattgtctgtgtgtgtcccttggccgtttctgaatcatttattatgtttaaaccagatcacatcttgggagaggcctcctggctgagggccagatgctggttacttggacacagtggatataatggcttgggtccccagatctccctgcagagttcacccatcccctcttcagctggccttggagggatgatcctctcctagcagcactgtgctcaccatgttttttccaggaatgtaccagaaggaatggccaggttttcataaccaacttggccaccttcaccgagaagttcctactgcagttggatgaggtggtcaccattgacgatgtccaggttgcaagtaagaggcaccaccagccttgtgtcatggccctggggggctggtgagggctaggttgggcaggggtctgctttccccaactctatcaaagtgaaaacaagtgatccattgaggggactgattaatttttgttttccttaaaaataattttttgattaaaaagcaaatgccagatggctcaacgtttatatataaaaaatgaaaccctattaagtaaacactcccatactcttggggttagggataccttttctaagtatgacaggagagctagaagccatagagggaatggctggctctttgtagccaaaaaaatcccgaaaaatgtcaaaagatggaaagacaaaccacaaactggaaaagta

SEQ ID NO: 42351 - DNA, 2300 bp, Homo sapien
gcaagtgtgtaggctgggtgtggtggctcatgcctgtaatcccagcactttgggaggccgaggcaggtggatcacctgagttcaggagtttgaggccagcctggccaacatggtgaaaccccatttctactaaaagtacaaaaattagccaggtgtggtagtgtacacctgtaatcccagctacttgggaggctgaggcaggagaattgcttaaacttgggaggtggaggttgcagtgagctgagatcgtgcctctgcactccagcctgggcaacagagtgagactctgtctcaaaataaataaataaataaataagaagaagaagaaagaagagaaagagccagtgtggcttggggagtgtggcttgggggagccctggagggaggatgggagaggagggaaatgatggcagggccagatcctggggcctggtagactaggtgagttacccattcttctcacaacattagcaatgtgaaagtacaaatatttaatatctcacagtctgtggatcagtaacctgggcatggcttacctgggtgcctctgcctgaaggtctcccatgaagctgggactgtggtctcaaccgaggctgggctgtgggaagagctgctcccaagctcactcatgtaggtattggcagaaccagtttggactaagcctgagttcctttctgtctgttggcctggatgttccccagttctttgccatgtgggcctctatgtcgggtagctcctgacatgaaagcttgcttcctcagttagaggactgtgacagaggcagcgagaggaggagggacagagaaggacaaggaaagggagggagaaacacaggagacagcaagtacgagggaattggtgctttttttgtaactaaatattggaagttgcaatggattgaatgtttacgtcccccaaaagtcatgtgttgttagccaaattcccaatgtgataatattaggaggtggggactttgtgagataattagctcataaaggtggagccctcatgaatgggattagtgcccttttcaaagggaccccagggagctccgtcaccctttttcaaccatctgaggacacaacaagaagctggcagtctgcaaccctgaagagggacctcggcaaaactggaccatgctgataccctgatttcagacttccagcctccagaactgcaaggaatacatttctgttattggtgagccaccctgtctgtggcactttcttatagcagccctaactgactcagacaggagagacaacccgtcactttgctgtatactcttagtcagaaggggagtcagtaaccactttatggttaaacaagggcatgaatcccagcagtgaggttcattgcaagctgctgtgcatgcatgcagactaccacataggctgggatgagacacctaggtctgattctaaatataacaggaaaccactggaaggctttatgccacaggatgaccatataccagtttcattttatgttaactctctcatggtgcagaatgagaaatgaggcccagagtggaagtaacttttccaatattacactgttggaacccgggcatgtcttcagtttaagtccgtgctgcatcccatctatccttataattcttccttctcttgagtttgtgcatttgttacttgtgacaccaacctatgagtgttatgagaattatctcatgtatgcctgatgatgtctctgggaagcagatgctgggatgatttgcattgtgcaggttaggggactggagaggctctgagaggtacagtgagttttccagggcacagaactggtaagaaaaagaagggttggaacccagctgtatctcctcaaacctagggccctcgctgcatttgggttttcccagaggggggatgttggcaaaattgtgaacagttaaggagatgacatagaggaggagggtgagcagtcaatggctcagagagacctttggggagggagctctttgaaggaaggagccgaggtaatggaaccttagagaagtgacctaacttccttggtgataggccccaacagaacttagaactttgataaccagcactcacattctagagaccccctgtccagctcactcgatgggagccactagagggaataagatgttctcctgctgtatcccgactttctgaggctctgactccaggaaagcccggcacgagggccttttccattgctgcaggctttttggctcagcactcacttttggcacctctggccatttggcaggaagtacccaaaggtaacacagagaagtccgggccaggccacaa

SEQ ID NO: 42352 - DNA, 2300 bp, Homo sapien
ctaagggcactaattctattcacaaggacgaagccatcatgacttctcaaaggtcccacctctcaacaccgcaagaatggggattaggtttcaacatgaattttgtagggacacaaacattcagaccatagcaaagtctattaaaaatccactgcaatgtttggagtagactggaagggaaagaacagaaagacatctgaaatagactgaaatagagcaaaggagatgcagagaaattccagagagagacatttaggcaaacttagtcagggaccagatctaggatatgaaagagaacagtgttcaaagaaaagccctgttcaaaaactctgaacaattccctaccgcctttggggaaacatccaagtgtctgagagctggatatcaggttttccagatttacttccaatttttctttgtattgcctactgcatcttttcactgaatcaaaagctctataagcacaggcttatccatgaaaatttgttatttaacagcaggtgttcaatatatattagttgattgtccattcaccttctgacggatgtttgtattctttccatgtggggctacggccaacacaactgccatgagcactcttgtacaggtttttgtgtggacatctgctttcatttctcctgggtaaatacccaggagcagaattgctgggttgcgtggtaggtttggtacatccctacaataccattcagcaatagaaagacatgaactattgatacatgtaacaacatggatgaacataatttgctaaataaaagaagccaggcagccccccaaaggatagtacatacgattccatacataaaagttttacatataactctagaaaaagcaaaataatctatagcaacagaaagcaggtgagcagttgagggggcaagtgacagggagggacaagatataagaattacaaaggatcacagtaaaacttttttgggtgatggatatgttcatgattttgattgcagtgatggtctcacagtgatatatatatatcaaaacttatcaaactgtacattttaaacattcagtttattgtatgtcttatacatggcagtcaagctgtaataaaataccggttgaataagcagcaggttctcagtaaatgcataatttatcaagctgtacattttaaacgttcagtttattgtatgtcttatacatggcagtcaagctgtaataaaataccggttgaataagcagcaggttctcagtaaatgcataatttatcaagctgtacattttaaacgttcagtttattgtatgtcttatacatggcagtcaagctgtaataaaataccggttgaataagcagcaggttctcagtaaatgcatatccaatggtgcagagaagtgttcaatgttggctgcagggatgcaaagcaggtgccaataagtgttggtggaattaatgtgcagaataaataagtattcacttattaggtgttcaataactttagagtgaatgaataaatttgacagatatttattgctgatcgtgtgctaggcactatcctaggctctgggaataggttaaggaaccaaacaaaaatccttgtgctcacagagctttaattttagaaggatagcagacaataaaagcataagtaaaatacatatagtgtgctagataggtgctaaggagaaataaggttgagaatggggatagggaaagtcaaggaaggaggttgacatgttagagactgtgtccaccgtcattgaaagggtaatgcttgagaaaggcctgaaggatatgggcggacagagtgtgtgtctagggcaataaaaagtaactgctccagatgttgaagaaaataatgtgcaggagttgaactgtttggaaggagggtgagccccatagaaggagccaccctcgccccctgctgagtcccggctcgctcggcccgcgcgtacctgcgttgtccaccaggaggcgctcccgcacccgccccgcaggcgtcttccgccgccggccggtgcgtgggcacgcgcagaaaccgctaggtggcgacggtttcccttcccacgcgcggacgccggcgtgggccgacgcggccggagcgcccgcgcgtgcgcagagccgaggccaggctgccctcgaagcggggcggggcgaagcggggcggggccgagcagggcggggcgggggcttgaggtgattcccaagccgcggggcggctccggtggtgcggggaaaccgaaagtgggcggcggccgcggcggggcccctggcggagacggcggcaggagctgggcccagagacgcggggacgggccgtggg

SEQ ID NO: 42353 - DNA, 2300 bp, Homo sapien
ttcttttcaggccattaagtgctgtttagcagatcttccacaatctattggcatgtggacaccagatgcagtgctgtggttaagagattctgttttgaattgctcggactgtagcattaaggttagctatcttgttgggcctgatacatttagaaagggagctggcagctgtcagggctcatttagtttttgtgaaggaattttatctcactgtaaaatggatgcttccacatccaacacattttttatattcagcaaattggctacatgtgtagctgtaagatattttatggtttaattcttatttaagaagttatcctgtctctccagtattatttttaaatccttcttataatttttcccattattaatgtagaagagatggttctccacttctgttttgcttcatgataagggattaagtccccaacagagggaccacagatctcttgataaatgtttctaaagatcatttaaataagtcctctatttcttttttattcacaaagtagaatagattataaacaaatcatttatttataattgtggttctcagcctctttttcctaaagtttatttaatctgccatacttatttcactagctcttgtttctttttctgtacttttgcatctttaaatcaaaaacattgctcatatatccaagaatacaaatttaagaagatagtttttctctgttaactgatggaaattgtatgactgttttatataaacatttaaaatgaaatgtccttgaaaaatatcttcatgaagacctctaaattattctagctagcagtgatttttctgtctttgtattcctctggggtttatagtgtacaattacatgcttaattatatactattccatattcttcagttgtcacatgataatactgttttctcagctactctttaagctcctaaagccagaatattggatggttactcaataaaagtactttttgttaatttttaaaactgtacttctgtattataaatttcaaaatgaatttgcagtcagtatttaattagtacttcagaggatgaatgtaatagaggcatcttgttgggaaaaaaaagaaattttaagtaaatcactgtagatgggttgccttgctgttatctccctctccgcagacctgtgttcctgcctttcatttctagccctatttggtaaaagataaatgtggctggaagtatcttatttttatcattcctaagataaaccagagttgctgatgagaatagccaacagtcacctagctccttgggacacacagcagtacagtcccaattattaatgtatgatatttccatacaaacacccctctggccgaaagagcaaagatggttaggtagtcagaggtctcctggacaaaaagtgtaaaactaattttgacccgttctgtggagcttgcttcctctttttctccccaggtccctctcctcccatgtaattggcgatggggaaaggggtgaggacatatactaggaccagacaaggaatttgaaagaggggtgcttacagatatggtggttgtcagagctttttccttcccttcccagtcttgaggacacaccagccttaagcagaacgctcataaatcattttgccatcattgtgattgttttttattattgatgctgggtgatgagtatatcagggttcatcatacttatcatttctactttaagtgtttcgaaatatcattaatttaaactattttaatcatgatatatagaatcctttctgtcaatgataatgaccttagcaagttataaagttttctcagactttttaaagattagtaaattttttatttccataaggctgcactgttccctagactattttgacttcagagcccattcattgccaagctgtgataatttatttttccttaaataaaatggattttagcaagggttttggcaaaatactgtgttttaatgattaaggttactataactgcctctcaaaatttaatgtgaacttgtatttcttatatcattttttgtgttttccaaaggttacaaaagtggatgaaaccagagggatcgcacatgtttatttatttacccctaagaacttccctgaccctcatcgcagtattaatcgccagattacaaatgcagacttgtggaagcatcagaaggatgtgtttttgagtgccatatccagtggagctgactctcccaacagcaaaaatggcaacatgcccatgtcgggcaacactggagagaatttcagaaagaacctcacagatgtcatcaaaaagtccatggtggaccatacgag

SEQ ID NO: 42354 - DNA, 2300 bp, Homo sapien
aaacatttttttaaatagctgggcatggtggctcatgcctgtaatcccagcactttgaggggctgatgtgggggttaaggggttggcttgagcccaggaggttgaggctgcaatgagccgtgatcacaccactttactccagcctggccaacaaagcgcaagactctatctcaaaaacaaaaacaaaaacaaacaaacaaaaaacctaaacatgaaaggctaaggtgggaagataacataggaagataactttataacccaggaacaggaaagagttcttaaacaggacacagagtgctgccaataagggaaaagattgccagactgtatttaagaacacctgtttatcaaaatacgttaataaggtgaaaaggcaaaagagtggaatataactgaggatacacacaccattgaatctattcaatacacaggactatccagaagaaaaatggacaataaatctgaacaattcacaaaacaaatccaactggccaataaatatgaagtgatactcaacacattaggatatagggaaatgcaagtttgaacctcaatgagataccattactcacatatcagaatttctaaagtgtttcaatttttgtaacttcaagtgttgttgaagatgggaaactgcactgtacaatggtactataactttggaagagttcaggcttatctctgccgaagttgaggttaggctttctctatcacccagcacttccaacagcaggctgtgcgcgtggacaggaggattctggcaaggaatgttcgcagcagcactatttgtaatagctaaaacctggaaacaacctaaatgcccattaatagtcaaatggatttttttttaaactgtggcatattcatacagtgaaaaactacagctgcataaaaccacagattaacaacagatttgaacaaatgaagacatactacagagggaagaaaaaaaacaaggacatgatcaccgtaagggtcaagaaagtgatcatctttagaagggagttgggacccaggagggacaggttggcttctgggctgtaggcaatgttctctgagtgactggttgcacaggtgttcacgttgtaaaaagtcatgaagctgcacatttattttgtttacacatacaacataacttatgttgtatgttcttatatgttcgattcacaacaaaaatgttttaaaataatctgaaatattagatcactgcttatttttaaatgtatggcatataccccttgaaaagagcgttctcattgtgaggactttagagaaattcattttcttgagaaacaaaatttggttaatgagtgtttctcattaataatctatacatcaggattaagagctgattttattaaggtctaccctaccaaaagctttcccataataatccaaaataagacgttttcctatttctatataaattcctttgcatgagacatttgtttattaaaacacttaaaattgtatttggaataaaccacctaaagtggtttgttctgaaaaaaaaaaaaaaaaaaaaaagccttttaagaacttgggtctttttgttgtggtcatttaaaatcagtattttagacactccactcgctctcagtgtagagagaatgtattcgattgcgtgttggaactacgtgtagacaaaacgatcgcggttaaagcttgcggctcagagcccacctggccgcgctgctgggaaacggacggagcggcgcttcaatcagaggtgaaggtgcagcagctgcttagctggctttggtccatcacttctggggacttcagattctcaaaatcttaaattctaaaccccacaggaatgcaaatctgcccaccttttcccacataactctaccgtcgctcaaactcttcctggtaccagcggggaagcggaggagacccaggcaggggcccgcgctcgctcggctgcagcccgactcccctgcgctcccggcccagggccgcgtcccgacggggaagtgcgctgcgcccgggcgcccccgagtggagggggggggaaggagggagccggcggcgggcggggcggggcgcggtgacagccgagccgggcccgcccctggctcccacccccgagcccacagctcccgcccgcccgcggccgcccgggagctcgtccagccccgcgctgcgctcgcccgcccgctgcccgccggagcaccgcggcctccgcccgcgtccatctgcccgccgcccgcgcctgttccgcagcccgcgtccgcgccggccccacagctctgcgtccgggtaagcccccaccccgcctggggtccccctcgcgc

SEQ ID NO: 42355 - DNA, 2300 bp, Homo sapien
cttgcatggaggtctaaatacgtacgttgctgtgaagaaggtcatatctgttacataagtttgcctgggctgctggaacacagttccacacacagcgtggcttaaataacagaaacgtactgtcacacagtgttggaggctagaagtctgagatcaaggtgtcggcagtgtgggttccttctggggctgccttctggtggcttgctctcaatctttggcattccttggcttgtagtagcatcaccccaatctctgccttcattgtcacatgatattctcttagtgtgctatatctgtgtccaaatttcccgtttataaggatcccaggtaaaatatattggattaggggcccactctatccagtaagaccttgactaaacttaactacttatatctgcaatgaccgtatttccaggtaaggtcacattctaacttgcaatgtgttgctaggttactgagatactgggggttagaacttcaacatatgaacttttatttgtattttatttatttatttacttttttgagactggatctcactccgtcacccaggctggaatgcagtggcgggaacatggctcactgcagcctcgacctcctgggctaaagcgatcctcccacctcagccttctgagtagctgggactataggtgctgcacgaccacacccagctaatttttgtattttttgtagaggcaggatctcactgtgttgcccaggctggtctcaaactcctgggctcaagcaatcctctcacctcagcctcccaaagtgctaagattacaagcatgagccactgcacccagccttatatatgagtttttaggagacacatataactcatcacactgattctatgcacagtactacatttagccaagctggaggacaatagcgctcgaggtcctgctgtccctcctagctcagcggaggcagtgtggtggagtagagagcaccctcggactgatgtcaggggtcctgagtcaagccctaggccatcccttagttttttcactaataaaaatgttttaattaaaagacctattagtatccaagaagatcttcaaggtataaaaaaggggaaaaaaaagtgtgtgtggagaggctcagatgagttaacaggtctgaaaatgtcatggttatgggaagtagcagagacagggtccaaacacacagggtccaaatgcgttgggtgtcatctgtgaaatgggaaatgaacagtaggcttctccagcaagagagagcagtctgggaagcagcagaggtgaaccctggtccccagggtcctgctggcaaaccaattcttccctctgaaccggctccctctggggggaaatgggggctctggactaggcagtcccctggccacgccattgggtgactccgcagagaaggtctgcagccagcagacctgagtttaaatgtggatctgctgcttcctagtagtgtcgtttgggtaagtcacttaatctctctaagtccttctctataaaatggggataatggtaatacctacctcacaggttaaatgagaaagtccttgtgaagtactgaacacacagcttgatatgcagtagtaaaagttagctatttctatgaactactttttgtaaggattgaatgagatggtgtaggtgaggggcctgtatgcagtaggtgcttaattaaccaccgatactcccctgccccttttaaactcagttttggcagagtttccagcattcatgattccctctggggtgtagggtgaagggtggagagttacacagaaaagtatttgaactccttaaagaataacattgttttcaggcactcataagccatttacaattgcccatttacttgtaattaatgtccatgccaattctaaccaattacaattcattaacttacatgctctcaggactttaccttgcacagttttattagagaattagccaaacttagtgtagtattccaccatagtaatgattatcctggcaattcataaaatgtacccaggccgctgtgtgaacgatgagcctccatttgctctgagagagcaaatctgagacgggtctttctaaggttcttgtctttctggtaggtattactcagcacagaaattcaggagacacagacaagttcttccacgatgtcgtacagacgagaactagagaaataccgtgacctggatgaagatgaaatccttggagccctaacagaggaagagctgaggaccctggaaaatgagctggatgagctggaccctgatgtgagtaggtgctaaagggaagcacattgtcactagcgaggggacc

SEQ ID NO: 42356 - DNA, 2300 bp, Homo sapien
cgctggaaccggagctggaggaagccttggcaaatgcttcagatgcagaactctgtgacattgcaggtaagaggcgttccaggagctttccacatcctccagaaggatttgacccacatctgcagggagccttgtagggctcatttcagcatgaacaccttctctatttctaacaagaactagaggagaccgagagtgttcaaacaacaatccattctcaaaaaccaaaacaaggaaaatagagagaaaaccacgcaaacccaccacaccagggagccatctgctgttgccatgagaccccatgccagagggacgtgggtgtatctcagggagagcccacagacgccctttcccagccattagcgttgaatcctgcccaaaccatttgggaagagaggatagagggaaaacagacagagggcctctggtttctttggcttgggaggctcactaagggcttgatttttacaactttgcactttgcctgcagttggctcagtgagccggctttgaggggtcacccttgtatatcgcatatttgccccatgccctccatcttcatatgtgtttccatatgatcttcaaaaactacccccaaaactccagaaggtggcctgatattcagagccctttgccccactccctgcctcccccgacttctctgctgctcctgtctagtttctgtcccactgctgtggtgttccatccccacaggaaggtcaggctctggccacatccggcaccttgtgcactccctccccacctactgtgctctctgatccagggagtgggtgggtttttattctgcaggcttggagactgctaatcatagcccaggtgatggcaggagggtgggcggggtggggaaaggctcgaggcaggtgggcaggggagagggtagaaggggatgcctgtgactgattggctgtgagagtgaggtagaagagtgaagcagggtaacctcagacactaagtggtgtcggtgccattagtgatggatggcaagggaggagcaggaagaggggagatacagagttcagtttacaacctgtggcacttgaggcacctgtgggccacccaagtagggtcagttgtataggaagttctggagtgctacaggaggttcccattcaagatagagatttgggcatcattagtgttgtcaagctccagaaagaatacatggcccttgtagaagcctttggtggtgggggttgggggcgggggtgcaaatcgtgggaatggggcaaagctggaatgtggatcagttagccacaaataggctgagaaccaaaggccaaatcaagatgggcagaattggatgcaggagccacagagacagagtgagggttcagggctggccaggagactcagaggcatgtaagcccagaggccacggcggaggtgggagggcaccagcaccagcaccagggacttgacaggccacagctgccttctgcgacttgtgagtagtgttgtgcatgactttggtgacattcgttcaggggtgggggagccactgggggatgtgcaggggcagtgagaagactcaactatacacaaggggcactctgggtggtgacaggtgaagccaggtctgggggacctgaggagtgaatgcggaaagccagtgtgtagatcccaagtccagacagccctttcctcaggagacagggaatttgaaggacaaagggcaatggcttgaagggtattgggactgagagagaatggttttccctttcactatgaagtacagaagcagtgagtgcttcacccagctgggaaggtagcacttaactccggaacctagtttgctagggcagggatttattctgtcagaagccacacgagtcacagtagatcctccattgagcccgtatattatacatcacacttcaaccaaaccatctccccgaagtcccttgaggtcgggttaatctgtgaggcagggaggtggctgatgccttggtgcggcatctccacatggactggggctgtttttaccctggactttctcctccaatcacgcttcatgacgtcactcccctcattaggcagctcaaagggattatcaaatgactgccggcgcctgcggttcctgtgccaggtcagagctgcaactctgtgctacgtttctgtgtggctttcttgaaactacttctctttatttttgttggcgtggctatttattgttatctgtaacgacgcaatatgctgccgaagtctgggaaggagaggggagctgtaagtctacaccagtgttaactggctaaccttggatgcctgtcatttgatgttgg

SEQ ID NO: 42357 - DNA, 2300 bp, Homo sapien
tagtagagacggggtttcaccatgttagccaggctggtcttgaactcctgacctcaggtgatccgcctgcctcagcttcccaaagcattaggattataggtgtgagccaccatgcctggcctacgtcccatgtttgaatctcccttttcaccccactctttttgtatccatgtaattgtgtgacagtaccttatatagaatctggccttactacattctcattacaaccataactcaggcaggtagcaatccagattccttggcctggctctgggccctcatctctccttggtgtggagtagtttcattggttgttggggttcctctctgaggggaatgaggctcctttggtgctgtaaagctttatcatgagtggtaggtaactgagtcaccagagcccctgcccatgaggcatggctacctcataatgcagattcaccaaaagttcctcacaatctactgagatttctggaccctcaaagataggggaatatttctatcctagagagttacaaggcaaagagccccaggagactgaggttctctcctattagtccctttgtatatatattttttgagacagggtcttgctctattgcccaggctggagtacagtggtgtgatcatagctcactgaggccttgatctcttgggctcaaggggtcctcctgcatcagcctccaaagtagctgagactacaggcacacactaccatggccagctaattttttaaattttttttagagacagagtctcgctatgttccccaggcttccccttgtattttaatacttacccatcttctagctttcctgtctttttctctcctttactttctttctcatatgtcgtttctgttgtccacccctcttgcccttttctcttttactcatgcacacacacttagacacattcttcttgctcctttgcattaaaaatgtatctattccaactttattccataactttttgctcacacctgcctgtgggttcttagccttcaacgtgggttcgaccttaatatagaacagtttacaaagcctgtagtcagccacgtacttgcccagctcctccatgtacagtgacaatagagcagtggccatttcctgacctaccagtgaccatacaatggaccagcaaattcacatggcaatttagatcccagttgcctggtttttatcactagggttaggccaagtatgaggatgcaaaattctttgactagttatttctaaactaccaggtctccattgccctcattttaggaggagggagattgaggatacctggaattactggaattactaagttatttcatcatgatcatcaagtagtgttcttttcagacagttgtaattatgaagagaagagatttgggtggaaagaaacaaagcaacacgtaagtcaggctgggtgagtcatgattgggttttggtttttttgtctttgttttaatataatttttttggtttggttttaggaatccatttatccccaggtgaatttcataaagaagtagaaaagtttttatctcaggcaaatcaagaacaaagtgatactatccttcttgattgcagaaacttctatgaaagcaaaatagtaagtaaaagccagaactgagttctctgaattggtagatctccccattcccacagtgtggtatatttcccaaggggaccttgtgtgtgcccacctgtggccacatggatctcctcccagtactggcagcttcagagaaaacccaagtcctaaaactcagaaatctggtgagagagtctaagaaaatatgaattaaaggcatccaggcacataatatactttgtgactcccatgagcctgcctttgacatgtatcaaggatcttgcaaagttgcctttgggcagcctctccagttcccctgaggaccctgggaaggtgacccacagcccacagcctcggttttaagttgagatcttgaagttgaaaggtcagagtggggatgagattagcaactggcaggggcttctttgctaagtagggtttgttgggtacaaaaagaacctttgttcctaccaggtatgtttttctgataattttccttttgttgctcctatgttacagggacgattccaaggctgcttagccccagacatcaggaaattcagttacttccctagctacgttgacaaaaatctagaacttttcagagagaagagagtgctgatgtactgtaccgggggcatccgctgtgagcggggttcagcctacctcaaagccaaggtgagccaccaccccggggcactgtgggcatggcagtgaag

SEQ ID NO: 42358 - DNA, 2300 bp, Homo sapien
ttatccacttgtttacttcaccccactggaatgtaaactctaagcaggcagaaactttttcactttcgtttactgctatattctcagtgcttagaatagtgcttgacttcgagtcgttcctaagtaaatactattgatttagtaagtaaatggatggttagcttgggctactttgcccatgctgatttgcgtgattgattagcttcatattttcttcaagaaatcaaagaatagcatggctgcttctttcttatttatattctaggaggtatttaactgaaaggaatatctgcttcactgttgcaaccaaaccagatgccttcttccacttcaccagaccaaggagatgacctggagaactgcattttaagattttctgacctggatttaaaagatatgagtcttattaatcccagcagcagtcttaaagcagaattagatggcagtacaaaaaagaaatactcgtttgcaaagaaaaaggtagaattcttatgaatgtttcatgatcatgtatgtgtggttaacgcagatacatttggaagtcggttatcaaggttgctctccagctcaaggtaaagtctagtcaggaacattaaccagtgatgttaattccatcccaggcaaagggtaatcataggcaaggtgtggtcctggaatagccatggtggagtacttgaggagggtggatcctagacagatggattagatttcattccccaccccccaggtcaaaaaagaccataaacaaagttgaaaaccaaatgacaagtgaagaaaaaagttggtaattatgatcaacaaaagatcactaaaaacacgtatcagtaagaagataaatgctataatggaaaaataggcaacagatttgaacaggcaagccagaaataaacaaatagattaagcaggaaaaagtattcagcattactactaatcaaaaatattaaaaaaaaaaatagggtagcatttcttttgccttttatttggaccaacattaaaaatattgatgataaaaaatactgatagaactcagtgaggctatggataaaatggcacccacatgcttttctggttagagtataaattggtacatttttcctggaagtcactattacagattaaaatttcatgttctttgacccctcaatttttattttagatattctaagtaggtggttaaagatatagaaagatagatgcatggaatgctcattcaacatggcttttaattgcaaatattagaaacaatctaaatgttcatcagttggtaactggttaagagaattttctgtttgattgttttacaataagcataagtaatttttataaaaacagtaatattattttccaagaaggaagatattttggtacgtttcttcctggtctttttcaatgtactttttaatgtggttaagattacattgcataagcaattttatccaatttttttcacttaatattatatcataaaatatttttccatataacttaaaactggctgcttaatattccatggtaagcatacttcataatttactttccatattcctttcgaaaataactaatagtgttatttgtgatattttaggccaaactgtattatgtattttccagtgtgacttagtcttatatcctgagaataaaattatgatgctgagagttatttaacctcctcaatataaagcctagttttaatttctctaatagtctcttctaaagcttactaataagagaagtgttacttctcagagaattgtataacataatggaacataaaactagaagcccctgtggaaagataatctaaagaatcttagtgagacttctattagccataaacctaaggttatttaacagtgttagcatttgaaatctaattgcaggcctttgccctttttgtcaaaaccaaagaagttccaacaaaaaggagttttgaatgtaaagaaaaattgtggaaatgctgtcggcagctattcacagaccaaaccagcatccatagacatgtggcaacacaacatgctgatgaaatttatcaccagacagcttctattttaaagcaactggctgtgacattgagcacctcaaagagtctttcgtctgcagatgaaaagaaccctttaaaagagtgccttccacatagccatgacgtgtctgcttggctccctgatataagctgctttaaccctgatgagctgataaggtaagattttcattctgtattttggtttgatttaaagtatttttccaaccacaatgagatactacaattcacccattaaaatggctaaagtgagaaagaccaa

SEQ ID NO: 42359 - DNA, 2300 bp, Homo sapien
tccacctggttctctgtgtgtggtctctgcatgggttggattggcttactcacaatacagtggtttggtctcctcagcgtgagcatctcagaatgagagcttgcactagcgtatccttttgagaacccaacctcagtcatacagcattgcttccatcacgctttatttttgggagtagttaacaagcctgcctaggcttagggaaatggaccagaaatactgctgcagccatttttggaaaatataatctgtcacagctaatttttaaataaaattttaatgttaaatttaaaatacagcattcaattaaaatattaataatattaccattcattgaaccctagtttgtgccagacactatatattaatatttctttccagtctacagtacagtactgtaatgtagatactacaatgcacaatttccacaagagagatttagaactcagaaaccttaagtagcttgcccatgttcacatgcttggcaaactgctgcagcacaaaccaaagcccatactttttctcagtgtgcctcttagtgcttgtcacctgtcacctttgctttacaaaagaaccaacatggtatgatggttgtagtgtgtccattttgacaagatttggccacagtagcgattttgacatttcttctggcatattacagtggggctgtcttgggaactatttcttctaaggaaggaaattttcatagctctgaaattaaggggcaaaaagaagaaagtgtttataactgaaggtgctggcacacatcttgattgatttgggttgtacctgttgcttttctggtattatttaccctaatgactgcatggctcgctccctaattcaggtttctgctcaaatgctattgctgcagaaaggcttttcctactctctgtgttcgaagggcttctccatcactgcctccctaccctgctgattattcttcataacctttacaccatctgactttaaaaataaaaaatcaatttatccacttgtttacttcaccccactggaatgtaaactctaagcaggcagaaactttttcactttcgtttactgctatattctcagtgcttagaatagtgcttgacttcgagtcgttcctaagtaaatactattgatttagtaagtaaatggatggttagcttgggctactttgcccatgctgatttgcgtgattgattagcttcatattttcttcaagaaatcaaagaatagcatggctgcttctttcttatttatattctaggaggtatttaactgaaaggaatatctgcttcactgttgcaaccaaaccagatgccttcttccacttcaccagaccaaggagatgacctggagaactgcattttaagattttctgacctggatttaaaagatatgagtcttattaatcccagcagcagtcttaaagcagaattagatggcagtacaaaaaagaaatactcgtttgcaaagaaaaaggtagaattcttatgaatgtttcatgatcatgtatgtgtggttaacgcagatacatttggaagtcggttatcaaggttgctctccagctcaaggtaaagtctagtcaggaacattaaccagtgatgttaattccatcccaggcaaagggtaatcataggcaaggtgtggtcctggaatagccatggtggagtacttgaggagggtggatcctagacagatggattagatttcattccccaccccccaggtcaaaaaagaccataaacaaagttgaaaaccaaatgacaagtgaagaaaaaagttggtaattatgatcaacaaaagatcactaaaaacacgtatcagtaagaagataaatgctataatggaaaaataggcaacagatttgaacaggcaagccagaaataaacaaatagattaagcaggaaaaagtattcagcattactactaatcaaaaatattaaaaaaaaaaatagggtagcatttcttttgccttttatttggaccaacattaaaaatattgatgataaaaaatactgatagaactcagtgaggctatggataaaatggcacccacatgcttttctggttagagtataaattggtacatttttcctggaagtcactattacagattaaaatttcatgttctttgacccctcaatttttattttagatattctaagtaggtggttaaagatatagaaagatagatgcatggaatgctcattcaacatggcttttaattgcaaatattagaaacaatctaaatgttcatcagttggtaactggttaagagaattttctgtttgattgttttacaataagcataa

SEQ ID NO: 42360 - DNA, 2300 bp, Homo sapien
ctgaactatcttcctcctttgggagcatgagaagtaactattaaaaaaataagtcagactggccctgcacagaggctcatgcctgtaatctcagcactttgggaggccaggagttcaagaccagcctggccaacatggcgaaaccccatctctactaaaaatatacaaattagcctggtgtggtggcgcatgtctgtaattgccgctacttgggtggctaaggcacaagaattgcctgaacctaaaaggcagaggttacaacgagccaagaccgtgccactgcactccagcctgggcaacagagcgagaccctgtctcaaaaaaaaaaaatcatactccaatgacttctcaattcacttggataatgtccaaagtcctcacagagcaccttccccctacctctctgatctcatctaccactctcccgttgctcactacctatgatggcactatttgtgggtattcctgaatgggtcgttagaatatatcagcgccaagagagcaggggttttcctttgttcacctctacatcctcagcattcagaactctgcctggcacctaggaggtgctaaatgctaataaatataatattcgttgaatgaaataaaacagtgattgggtaaccaaagaaggcctcactaaggacctgacatttgagctgagacctaagtgaccaagagccagccacgcagatttagaaccagagaccttcaggtaaaggaaatagtataagttcctaaaataagaacaagcttgacttattgtaagaacagaaagagtggttggagtacagtgaggagaagtagaaccccacaggccatggcatggagtgtgcaatggaaagtcgtaggagactttttttttttgacacggtctcactttgttgcccaggctggagtgcagtgtgcgatcaccgctcactgcattctcgacctcctgggctcaagggatcctcccacctcggcccccaaccctcccctcgagtaactgggactacaggcgccaaacactaggctcagctaatttttttttttttcctgtaaagacggtgttcgccttgttgcccaggtgggtcttgaactcctaggctcaagcggatccgcccgcgtcggcctcccataagtgttaggattacaagcgttagctaccccgcccggccgtcataggagacttttaaacaaagcagtaacacgatctgattctggatttgtgttgaaagcagagcaggcagggtttacagataattgttatgtaaaaagagggaaaagagctaagaaagactctaaatttttggattaagcggccgacggatgacgtcatttactgaaatgggtaagaccgaaggagaattaggccgggagagtgaaatttcagatggccatggacaaagcagataagccagtatggtgctcataaagacatcaggggaggggacgctcacacacaggcatataggtacccaataacccttgaaaacagattactaaaacaatcatttgttccttcctaagcaaacaacttaaggaaaatgacggccagccggcaagcccggagccgcacgctcgcgtcagggccggcctttccataccaaggggcggcacgtgcggcaccgcctcccgcccaggccccaccccgcatgccgagcttggcccaacctctcctcccacttttcccaaggcggcaaaagccggaaagtgggagtagatgagcacatacccgccagtcctgatcctttctaaggtctctcttccctgcactgtctccgcctagcaattgtcactgctcaccgccctcgagcctattcccccgccgcgtatttgggtagaaaagctcgctcgtgacgtcaccaagctccggaagtctcctggcgtcggcgcaagggccgccgggaaaaccattgagaggccaccgggaaaccattgagaagccccggaggaccggcctgagcggaggcggagactagagcggccgccggcacgacccgccttcaggcgtacgacgaccgcggcccgggggctctgagtggccaaagcggcggcactttctgcgtggccccggaaggacatagagcggaaggcgggagaaagaagtagccggcaggcggaggcagcccgagggggcggttgcatgtgtgccagacgttcgtagcccactgagcttcctcacgccggctgtcgcagcgcctagccccacccggcggcctctcctgcgcttccggggccgtggcgagctagtgcgcctgcgtgccggcccatccgcgcgccttgcagctgtccttgcgtcggccagcggccagaca

SEQ ID NO: 42361 - DNA, 2300 bp, Homo sapien
atgacactccgtctcagaaaaaaaaaaaaaagggagggaattgtattttctgtgccttgtacagaggttacacaagaaacctcgtgttagaaatcaaagcacgcagcatagttatttaatttatacctgtgtagtgaagagagccccggactggattcgctcttgctggtgtttgggaactgacagctgtccctccatcttagttatgctcagtctctagacccttaggtgtcagatagaaagctggactagaatatcctctcaagccattccttcgtagaaatctggtgtttcactattaaaactaaatgcatgcgattctgcctccacctcaactgccacaacactcaaggagagacaaacgttagtagataaaatttactcaatttaaaatgtctgttatgggtttttttcttacattgacagcatctgctaacgtttaccgcctcttaagcgttggcaaatgataaaacatcattgttgctgatgtgtattacctcatttaaccttcacaaaaaccagaagatataaatatcattacttctgtattacagactaaagtttaaggagatttcataacctggacaagatcaccaagtaaatggtagggtctggctttgaacctaaaccctctggttccaaagtctcatctcttaaccactactatacactctcttcaaaaaacaatacactaaaatgttaacaatagaattactctaagttttacttttttggtgtgtggatttgtgtttttgaccgattgtaaggcttatgtgtaatataagcatcttttttttgttgttgttaaaactagaattattccatctttatgaaggcaacactgatctccacgagcacaatcatccaaacggagatgggaacccctgttctaactctctcagaggcctgaagttagttttctagcactctctctcacacaagggaaatgcgcttacggccagttcaaaatctgcagtaacctgtgtctgtttattagggacctcttgggcgcaggtaagacaatattctttccctgcagcttgaaagaagtgaaatcaacggataaccactaccggaacagagttcagactgcaactcatgagatctctcagtcctttccttcagtgaattcttccgagcccttttcaggtgcagctttgaaggttaaaacgagacactaggaccagtgggtccctaagaggcggcagcacagacacaggtgtgcttccctgctccgtggttttacggacgaaattctgaagcatccttagagaccaagggtctacccatggggttcaccaggccttctttcccgaggatcggcccttgactcaaagaactggggcgggggagaagtcgctttctagaagccgcccgaccacaccgccaccatattctcctctttccctccgcggctccccgcacgttcccggggagaagagcttccagtctcttccgtggacacccaaagacgccgagcctcggctcccaaccgggagcggcctccgtggccgggccgcaggcactcaccgtcgttctcgtcgctgtgccgccgccgcgacatgctgccctccggtgcgccgcggaaccgagaggccaggcggtaagcgctgcaggaactgtctggccgctggccgacgcaaggacagctgcaaggcgcgcggatgggccggcacgcaggcgcactagctcgccacggccccggaagcgcaggagaggccgccgggtggggctaggcgctgcgacagccggcgtgaggaagctcagtgggctacgaacgtctggcacacatgcaaccgccccctcgggctgcctccgcctgccggctacttctttctcccgccttccgctctatgtccttccggggccacgcagaaagtgccgccgctttggccactcagagcccccgggccgcggtcgtcgtacgcctgaaggcgggtcgtgccggcggccgctctagtctccgcctccgctcaggccggtcctccggggcttctcaatggtttcccggtggcctctcaatggttttcccggcggcccttgcgccgacgccaggagacttccggagcttggtgacgtcacgagcgagcttttctacccaaatacgcggcgggggaataggctcgagggcggtgagcagtgacaattgctaggcggagacagtgcagggaagagagaccttagaaaggatcaggactggcgggtatgtgctcatctactcccactttccggcttttgccgccttgggaaaagtgggaggagaggttgggccaagctcggcatgcggggtggggcctggg

SEQ ID NO: 42362 - DNA, 2300 bp, Homo sapien
ttagatgggaacgttcagctggttcaaatgtacagaacgttttgggtttgcatgtctactctataaataaggtagagataaggcatttctttagttataccagctttctcttattccatactggtagaggttacccttctaaaaaaaggaaaataaattcattttcattatttattactatgtactttcctcccaaaagaggtaggtaagaaatctcttatgggggtcccaagtttgtggacattgtacattgtgggcctgtggttatatttatgactctggagtcatctctcaagagagttcgggagactcagttctctgttactctgctttagtttatggaggactaaagaagaccaaagcatcatattgtcattgtgtcttttccttgtaattttttttcctcctgttaacaaggggcaccatgagtcaatacttactgtcctaccataaagtatttagaagtatcttgtctctcgcagctagttgtcttttaaatttacctcagaagcagcattgggtttccatgaatacagaccacctcttttgcaaaaccaagatgttaaactgaatacaagttttagattggtataaaataacattttcatttaaaaaaggatttaggagaattttttcgtctgtaaaaagtataagcagtccctgaatatatcagtaacaagactgcttacactgaaaattgttataaatttccatgaaaggcagtccttagttaatagcttccagcattgtgaaattctaggccaatggaactaggaggttggaacgtggtaaaccactgttttgtctccagcttcaattaggccttcagtactgcgtaggacctgcacccaccccaggtttcctcagctccccgaaagtcgatttcagacctacagaccttttttcactcttctaaagccttaccttgtttttaaaactacctccttctcattctcagcagtaggtagttgatttctgctttcctaagttttaagttgttaaatgaagtaatgtgaaaaaagtatttatcttaaattttttttatttacctgatgttgacatttgccatatttactttttctttcacacacacatattttgccaagccatttaagttgcagacattgtgattcttataaacacttcagcatgtttctcctcagaacaatggcattcgactgggagcagtggcttatgcctgtaatcccaacacttctgtaatcccaacacttcaggaggccgaggcgggtagatcacctgaggccaggagtttgagaccagcctggccaacatggtgaaatcttgtctctactacaaatacaaaaattagctgggcatgatggtgtgtgcctgtagtcccagctactcaggaggctgaggcaagagaattgcttgaacctgggaagtggaggttgcagtgagctgagatccccccattgcactccagcctgggcaacaagagtgaaaccctgtctcaaaaaacaaaaaacaatggtgttcttctacatagctaaagaacaacgatcatactcaagaaacttagcattaatataatgctgctaccttgtgtataatttaatattctccagttgttttggtgtcctttacagctttttgtcggatccaggtgttattcaaggatgatgcatattgatagctgcttttaaactagtccctcagccttttttgtctttcacgacattgacattttgcagtgcccaggccagctgctgttcagtgtgtccctccattcagatttgttagctgcttgtttcctcagttagactcaggtcgaatgtttttggtaggaatactttcaaggtgatgtgtttgagcatttatcagtagacacatggtaccagctctgtcttttaagggagtggtagtttgactgcttagttaaggtggtgtctgccaggtttttccattgtaaaggtaccctttatcctttgtaattagtgagaaatctaatactatgtgaatatctcattccttacctttcactcagtggttttagtacacagggctgagtcttactttagttattatattggatataaatggtgattttctatttctttcactttctgtaattgttatttggcttttggaaagaagagcttttcttctcttagaaactgatttttttttaagcatcagctggactgattgtttcttattctgaagtcaatgtattatagtccattccagtcatgattcattttggtgttgaaattgtccaaaatttgcccagtagaatccccttcaaggtagctcctgtctttttaaactattttgtt

SEQ ID NO: 42363 - DNA, 2300 bp, Homo sapien
ctctccacagactggcgcatggccagctctgtctcatacttgactctaaagtcatcagcagcaagaccagcattgtcaatctgcagaacaatgcaggcattgtccacagtatttgtgaagatctgagtcctcaggccctcaatggtcttgaagtaatggctcatctctgacctggggtcccttcttctacaggtgctcctggattttactctccagcttccagttcttggcctccaggctcctcattctgtccaggtaggaggccaggcagttgttcaggttttgcacggtctccttcttgttctggatgcctctcattcctgccagacccctggccatccccgcggccaggcccccggaacccatgctgctcaggtagctggtggagcgggacatggagatccgggaaccagagcccccgtgcctgtacagacgctggctatgctgctgaccagccggacaccgtagctgggtgcctggacagaacccagggaccggtagttggtggagaaggtggagcgagtggtgaagcttatgctgtccagggaggagagtgagaggacaggactcaggctttgccgacgactttaatttttttttgagacaagatgttattgtgttgcccaggctggagtgtagtggtgccatcacagctcactgcagccttgacctcctgagatgggttcttgttacattgcccaggttggtcttgaactcctggtctcaagcaatcctcctgtgttggcctcccaaagggctgggattacagacatgagccactgcaccttgccaattattattattttttaatagtgacagggtctcactgtgttgcctcagcttgtcttgaactcatgacctcaagtcatcctcctgccttggcctcccaaactgttgagattacaggtgtgaaccactgtgcccagcctagtttttaattttaatgaagtccagctttttttcttttgttgcttgtgcttttgatgttatggaatttgaaatagtttcacctgggcaagattgatgggtagggagaaagaaggatctgaggggaagggagatggggatggcttgagattctatctccaattcaacctaagatttcagcaggtaactgctttatacgaggttttgcagctttatgtatatatgaccgataaattagaacactgaattgtgtttctgaaaggttaaccattgaacattagtgggaaacatcagtgtgtgaggttgtctttctaaaagccagtcctaaatggtacatgtagtaattagaagttaatgttttctggtttcaattaagcattatttgtaacaaagggaaagcatacatttttgggaaagcctgctatgtttcttttgttacactagccacacttttgggaagtcaggatatttggcccagatccaaacccactgtctacctggcagtagctcatcctcactgaaggaatattccatgggaaagatagccaaccttatgcatatcagccttggagcaagtcctgcatttgcctgaggtcacacagcaagttaactgggagtttcaacccaggtcttctcattttaaatctaaggctgtgtctctaggccgtgtatccaacataaaatcaggactatcatctgttgggctctatgactggcactactactactcactgttaccattttttgaggtcttctacgtgccaggttattgtcctggcaatctaatcctcccaaagactcggtaaatggttccataattatcctcattttaccactgaagaaactgaactctggttaaataacttgcccaaggtcacacagactttaactgtcaagagctcagacttaacccaggcctgactccaaagcctatactctgaatcaccaagcgagacctattttaaaggtgaccaggtcgtgagatatgatctcagcacggacccttctcccggatgacaagagagcaggtagttaggcgggtactccgtgtccgcgcatacccagactccgcccagcgcccgggcaggccaccccgagccccttaactgcgcaggcgctctcactcagaaaggccgctgggtgcggggagcgcagaggcggtgcagggcggctggctcgcctcggcgtgcagtgcgcgtgcgtggagctgggagctaggtcctcggagtgggccagagatggcggcggccgacggggctttgccggaggcggcggctttagagcaacccgcggagctgcctgcctcggtgcgggcgagtatcgagcggaagcggcagcgggcactgatgctgcgccaggcccggctggctgcc

SEQ ID NO: 42364 - DNA, 2300 bp, Homo sapien
catcgcggcctgtgagtggaacaggctagaattatccccagcgtcttttttccatgtccaagtttcgccttaaaacaatttaaaagaggaagaagaggaccgcgcgtctgtaaggcgctccactttatcaccttgactcggtggaagagaaagcacagatatgggatatccccacatacacacttcacagatagagaaactgaggcctaagaagggcagtggatggtttaaagtcgctgggtgggtcttgagcaatcttgggtggaaaccctcacaacactggtgctgccttacatggatgtcttctgtggtcagcaggacgagtgtgacttgggggcccccttttgtgacagtgtcttgctctgatgctctctagggccatacagcccactgacccagacagaatgcactggagtaacctaaacaggtcactgcgatgctgctgtaaggagatccttggatcagatttgcaagtgtggacgcctggagttttgttgttcagtaaaaagggcagcccaggccaaagaattaagtacaagtaaggctctgagaactcaagaaaagacagagaggctttggggccaaagagtaaggcccaaagacctgagtttccttctcagcccaaggcttttctctctacaagtcccttccacaatccaggcccagtctccttccagcttgaatttccatggtttctttaatagaagaactggttacctctgcgtctgcatgcaggggaatctccgtcaaggaatctggaggaattttccttgactccttggacccctctcgtttttatttacaaagtcgcccattcaaaactgaggaaagcagctgttgcagaagaacatcttctaaagattcccaatagcacctccagccccctatgcacataaaatggcctgctgcaggctggcttctccaggggtgctgggaatacttgaagggctgaagatcagtgggaagcagaaatcactggcctgcccacatcaacaccaacccacccctgctggattgggagaatgatttccaagggtctggaacctgcccttcctaacttccagatgattcataaacgttaaggagcactgtggcagagaagaggggaggacttggccatgaccatgttccttctcaagaaactgagaaggaagcaatgggaagagataggaaatgccccgaggagatttttgtgtatggttttgatccaaacgggtaaacttgtgacctgtgtactcaccaaatcatttaatgtgaactcactgtggactcacagaatcttcaaatgcattattcaaagagaacatttatgaaatagaaatttaggggtccttggtttgcgaaaatcttagaatcatgatcttggaaattctaatctcatgatgctaggtatttggtctcggccacaggagtagcttgatattaacaaagtttgagaaaaccatcagaattctagaagaatgaggtcacagacacaagacactgaagaacagaaaatcctgagacaagaaggcttttagccatagtcgttgcagcttaaaagtagaggatcataaagtcatgggactaatcattacagcatataatcacaaacattagaagaattattggaatcagattatttgaactacagaatagcagatccagcactaacattttagaattaaggaaggagagaactgcggatttacaggattcaaattcttccaatcagacattcctaaacaggaattcaaattaaataatatataacttagagtggaaaaaataaaaaactggagaagtggcagcttcaagagtggcatcatattttcaggcacaaaatcttaggtccccgttttttgtttgttttgttttgcttttaagagaccgggtctccctttgctgcacaggctggagtgctgtggctactcacaggcacaatgattgtgcactacagcctggaactcctgggctcaagcgatcttcctgccttaacctccagtagctgggactacaggctcccgccaccgtgcctggtttagtcccagtatcttaatacataggtttttagactttgactagaagcttaagtcaaaggaatataagcatagtcaaagttagactcccagtcttggaatcttagaattacagggtcgcaggatcgcaggatcgcattctttagatttatggaatcacgttaggacaacggtcgtccagaatttaaaatctagatatctgaatctcagaatcttgaaagttactgagagccacgaaatcccgtattaaaaggtgcctataatataatccagttaaaaatt

SEQ ID NO: 42365 - DNA, 2300 bp, Homo sapien
cattcttggccacttatgtatttttatgaacaggatatcagaagtggatatattgggttagaaggtaagcatatttagaattttggggaactacttccaaattatcctctaaaattaaccaatgtatacttcaataatatatgcaaatgacctttttcttacacccttcccaacacaatatgttatcagttttttacatttttgcctgatggggaaaaagagtattttggatttttagtttaatttctaaatttagaaatttctaattattagtgaagctcaacatcttttcatatggttcttagctacttgccatttttttgtgaattacttattcatgttctttgcatagtgtcctatattgggttgtccttagtaatttgtaggaacaatttgtgtgccacagatattaacctatggtccattatgtatgtagcaaacgttttctcttaggctgacattttgtagtacataaatgtaatgatttcatgagttcaaatctgttagtttttcttcttggcttcttggttttgtatcttttttaggaaggtctagtcatgccaaatggaaaaagaaaggaaggtctggtaaaggtatttaacatttctgaacttcaatttcctcatcccaaaaatgggggataaattatattacttaagacagttaaggcgattgtatgaaatgagtgtaaaaatgttttaccgtactacctggcaaacagcagacacttagtaaatattgtttgttgggcacttgataaacgtctctcaagttcctactgtgtgccagttgttgtgttagctgcaaaggatgtggagatgagattctgtctcttcctttaaggaaaggggatggtgttattttcttcctaccagatgacaagttaatactatttaaaacatgatttctgttaatttgtgggagattgcatttttttccccatcagatcattgtggtaaaataacttgtgctcttttcttattccgtggtttgttttgttttgttttctataggattttgtttgtttttcacaaaaatggtcatttgagctgtaaggcaaaagtgcagcctcctaggctgaatggtgcaaagactggagttttttccacaaggagccctcatcgtcccaatgcaataggactgaccctggccaagctggaaaaggtagaaggtaacccatttcatttctacttttacctttttcctcacccaaaaaagccttataaaataaacagcattcaccactggctgtttattcagacgagtaccaatgatgttaactcctgagaaccaccagacattgaagaaaatacaatgattaaaagaatgttagcattgaaaaatgttgaaataaactcataggatgctcagagcttgtttatattattgcatatatccaaaactattaaattatttagaaataacacaaatttcacaatcattaaattagtaaccaaagtttctctgacttggaatgcagtaaatacaaaatgattaaaaataaatggacactttccaatttaacacacaataactcattgtacatgcacatatggaaaacacatagactggtggtatatcattccttccttgcagccttggggaaatggacagatatcatggctgcagtgctgatgtcaactgtgctgtgtggcaggagtctgggatgaatcacactacaaggacaaacattggtcaggttgtagaagttttaaactagttttaactgtgtgttcgtatataacctagttacgcatttatggaaagcattccattctgacctaacagatgcatttgttatagaggcagcagatgaaatggcaggtaaactaggagtcaagagaccattccaggcttcagcctgctggttgtgaagtgggcaaaggagaaggacctgcttcctctgtgattccacagaatattttgagaatcttgtaagagagaagttctaaaactactttttcaggctattggacactaaatagatgagagcagttattttgcttgttctttcccagaacttgaactctcccactggattgtactcaactgggccttaggtagttttctcagaaaaattcagtagctgatccaccttgaattttatcaatttgtaatggctaacaaacttggatagcaagtactagaagattttatgattattcagggacatattttctagcactgaatatgtgccagacattgtcctaggtgctagagctatagtgataaacaaatcagatgaaagtagaaatccatgccctaaagaacttaatgtttcaattgggaaggtcaagtca

SEQ ID NO: 42366 - DNA, 2300 bp, Homo sapien
gcagtacattagaggaagcagaatttctctctccacctctcgggaccctttctgcttgccctcttacatcactccctgcattcacacaccacttctgctttctcaccattcttgtttaaacatcactgtgcatctaaaattcttctggcgttcttcttggcttagaacctttaggtgacagaattaaagttttgcaagaatccttctagcttgactttgtgctgccctcctctcatgttaggttagaaacccatgaaccatatgatattatagccaaaatgatgtgtgggacggttcaaagctttagttgattctcaaaggggtccttcacccaaatgagaggttaagaatcactctactgagaagtgtttctcaaagtagtacaagctgaagactacataattatttaggtcatttctttaaggcagatttctaggtcttacatctggaggagaggttaagtcttataaactgcaaataatcacatataattccagacaagataataagaacttcaaatcatagactaaaaaatgtgctgcatatttaagttcccgttttcagtcaagagaaattttacctataaaagaagtagcaatctatttccctagtatattcaaatcagctttgcatttcagtacttgtcacacttggtaattacatatttttttgtgtgattaacaacgtctaccatgccctccaggagggcaaatatctctttaaatctagtctttccacagataaagcgggactatcatttttagcaacaccaccatctagtggcaagcgcagtaattctggcccagttttataaacacacacatacacacacacgcgcgcgcgctatatatatataaaacaatgattttcaaacttgtttctccagctgcacagagctgtccctcctaaaaaaaatggcagccttttccaagttgtcctgtaaaaatgacctgccaaaagacactatatgaatttgatcagttttatcttattttttaaaccacaatctttaattatttggctcctcctgctggttattttctaccagaaatcaatgacaaatggacagacatggaaacatcttttcatggttgttagacttttcaatctgtgactcatatgcttttgaatattttatactgcagatgttaacagataaaaagataaaagattttaaaatttctcccagaaagagaattatatacagagaaacttactaaaggtgagagacagcattacaagtgggtaaaagataggctatcattgcaaggacaactggtcattgcatgggattaaatgattcttgttagctcttagcttctcagagctgtccagaaacgacaataatccccacaatgcacatggcatgttgactcttataattccattctcacttcagttccggtaaggtgtggagcacaagaaacagttcccactccttaacccctagcacatagtagggctcctttataacatccaccacacttgaaataagacttatttggggttgtttctgacaaagcataacttatattatggaaaaatttcccaccacccagggataattttttttttttttttttttttttttttttttttttttttgatacgaggtctcgctctgtcacccaggctggagtgcagtggcgcgatcacggttcactgcagcctcaaactcctgggctcaagcgatcctcccgcctcaatctcctgggtagctgggaccacaggtgcctgagaattcttaacatttcttaacgtccagtccttccgctctgtgttaattacatatacacatcccttaaaaattagggtcatactggacgtataggttacttaataatgtttcgagagagacatagttgcgagttcttcatggaggtgtgttccctctcaaaaagcgcgggaagccggagtcgcattctaccctaggagggcgggcaactgtagcagctgtgtgtaagataaacgagattggggtcccggaggggcacacgcccgggatagggttcgaagccccatggagaactcaaagcttccctcaacgccaccctgcgcgcgcacattctcctgggttcgcgggacctcgccggcgaggccactgcgcatgcgtcaggcatggagagcggaagcggaaggttgaatgcgtcgggtgggcacctcagcaaccagtagccatgcgcggcttggaggagtcggggcctcggcctacagcgaccccgtgcggctgcgttaagccggctctggagacaggtaacttccaacaccggcggtgccacactctggagaggtttaggccc

SEQ ID NO: 42367 - DNA, 2300 bp, Homo sapien
tctcatctttgtgctcctgtgcactgtacgtatgcaaatctcttaaggtccatcttaatgcaacgctgttagaacttgagacttcagtttactcttttttttcctctaattttggcccactctggcaggtgaaattgagacagaagcacattccaaagaagaaaaaaaagcactgaggaagtcagatgtgactttgggtgagtaccttccctctatgttattccctcatctttaagtgagagtgataatcaccgcctggcctatttcacatacttttgtacagatcaaataaaatagtttatgtgaaagtataaatgttgaagtgtcattgagaggtaagaaactattatatggttgtggccgggcgcggtggctcactcctgtaatcccagcactttgggaggccgaggaggatcacgaggtcaggagattgagaccatcctggctaacatggtgaaaccccgtctactaaaaatacaaaaaaaaaaaaaaaatagccaagcgtggtggcgggcgcctgtagtcccagctagtcgggaggctgaggcaggagaatgtcgtgaacccaggaggcggagcttgcagtgagccgagatggtgccactgcactccagcctgggcgacagagtgagactccgtctcaaaaaaaaaaaaaaaaaaaagagacgaaactattatgtggttgtgctgccctgccctcagtatgttgtgtaataaatataataggggtatgaataattgtgcaatgaatacatcctgatggtaaaaaatttaatgtacacacaaaagggggtaggcagataggagggaaacaatattgtaacatcccactgtactattggttctcaaccctacctccactttaggattgtcaggagagcttttaaaataaaaacatcctaaatgcaattctatatcctggattggaccctgaagcagacaaagcacattagtggaaaaattcatgaaaacggaataatgtctgtagttaatggtagtgtaactatcctgatttcttagttttgacaaatggcccatggttatgtaagacgttaacattggtgtaaactgggcgaaaggtatatagtaacttttgtactatcatgacaacttttctgtaattctaaaattattcctccaaaaactattatttgaagcataaaacaattaaaaaataaatatacctatgcctgtacatcagctagatgggggaatctgaatccctgggggagaagtctggacatatatgtatttttgaaaccttcccaggtgagtctaatgtaccagaagggttgaaagaaccactgctctctcatgttcattataccatgaatgcctgagggactgtgaccctgtcttgttctttgatatagctagtacctagcacagtgtctatatggaaagcttgtgcaagtgtgttcttgctgaatgaaactttatttgcaaaaatatccttagtcctctgtaataacagaaggaaaagtgaaaacaaaaaataccagggtagattttcagacatcttcccatccagaacagcttctattcctgccccggtctcttgtcgttttcagttaatctttaccattatcaccatatttaccatattcctaaaatagtgaaattgccattccattgttcaaaaatctgacttcattccccatttttaacaagtgatatatttcttggttaggtaagcaaaatattctatgctctagtaatatgagcttttcagcatgcaagcctactactatttcatatggactctacattaaccatagtttgcctgcagttctcttgaacatgttttgaactcacccttctctttgtcacatacagtaatgctgctatcctcatctatgcaaatactttccgtctttcaaggcttcatgcctgtgtaattttttcaggtcactccagcaaaaagtgagcattctctgtttgtatctaccattcaaatggcaccagcccttactattttcttttgtgattatttgttttctgttttatttccccatgaaaccaaattaaccccaccgtggggtgttagataggtcttctaacctccgcaattcttaacatgatggtatccacacagttaagcatgtaataatgatttaatgtacattgtgcacaaatacaatatttaaaaaataaaaatagaaaatcaaaattcaaatacaaaagtaaactacattcatcactccaaaatatcttttaaggagaattgttaaaactgaccaaaagagtcaactaaagcctgaataaaattttgatgctactgttacattaataattgaaca

SEQ ID NO: 42368 - DNA, 2300 bp, Homo sapien
gtggaattgacttaggtaggttgtagcaggatataaagaatctattatttccttgcaatacagatgtacacactttctcctctatgagcctacagggcacagggctcaggaactgcaccatccgtctctacagcacaagagggggcattaagtaaaatttgctgaattgttgaactgggtgttacaagctcttagtaaggacaattttattcaagaagtacctctgcatccactgaaggtgtcccagagggattctataatgttattttattaaactatcctaatgtaagaaacaacctaactaataagaattaaaacatatcaactaaagggaccaatatttaaaaaaacactattttgtaatttttaaagttagtttgagttatttaaaccccatatctgaaaatccaaaattttcaagcaaataatgcctgctgttccgtgcaggattcctttgagcaggggctccctgaagttacctgaacttttagatacagagatttacttaagagaaggactggggaactgagagaggtaaagctaaatattagggtttagtaattaaaaaccaagttaaattttagtggcagatacttgggtgtttgttatatcattctcgataccctttagtgtgtttgacagcttgtttctctaatatatttacatgatacacacatttttatacccaggaaagatcaagcacacaaaatgatgacccatctcctaatctgtaagagatgctgctggcaataagtaataaaatactaagtataggtaactctcctcctcggttctcagtttctttgtatacaaaataggcagggactagatgattttgggctcttccagttctaatgccttaagactccatggaagtagtgggtatctattcacattacaaaggtctttctttataaagaatcctcttcagattctctctttagtgcatttaaactatgacttgctttaccaaaatctggttactgtatttttattggtagctaacatttactgaccaagttcaatatgctaggcacacataaaatgcctcatatggattactggacttaatcatcccagtaactttctgaggtagataccaatattgtccccatgttatagataggtaaattgactccaaggctatctaacctgcctcaggtcactgaattagggaatgtcaacactggaattcaaactcacttcaattcaatctgaatccagaacacatatattaatcctgcatctcccagactggcttcctgtatcaggaggtgctcagggtttcttctttagttgaaccatagtagtctgtggctccttgtcttcacaaatggggttactgcttggagataggatggttcctttgattatttcaacttaatttctgggatataatgtggtgatattttcattaagaagtaatttttcaccttcccctatatgagtaacaatggatttcactagttatcttgagtcacttgcgaatgatttggtgagccaaaaagggtacaaaattgctgtgaaattctaatttggttctttatgtctatttcttaactaagtctaacagcatacacagcaaaactgtacattattttgcaacagattaaggtgaaaaaagctacatacaggaaaccatgtaagattaatatatatcacactttctagaaacttttatatctattattttcactttcacaagaaccgtatgaagtaggcaagacaggaattatttacccattttgcaaatgcagagagtcatagaaaagggaggtgacttgccctgggccactgagctggttggggcctagattgtgttctttctacactaggctacctccatctgtaaaaaggaacatcggatccagacacttcctggcagatagaaccaaaagagtgctgactagaggctgtgccatgccaggctgtggtcagagagtttccctgtataaatagcaacctatgctaggggttgctagcaccagccatttcccctactcacacctgtgcagtgtgataaagatagtagaattagcctgcagttgtggtccaaccagataaaacttttaggcgggaagtcaagtgacaggcaaacttgtgtgtgtggtttttttttttaagtgttagatgtttttgatattttaaaaaagcatctaggctgcttgtggaagtcagaccaaaatagcaggaaggtattgcagcaagatggatttgggaaaggaccaatctcatttgaagcaccatcagacacctgaccctcatcaagaagagaaccattctccaggtaatgaaaaata

SEQ ID NO: 42369 - DNA, 2300 bp, Homo sapien
tattgtgaaaatggccatactgcccaaggtaatttatagattcaatgccatccccatcaagctaccaatgactttcttcacagaattggaaaaaaactactttaaagttcatatggaaccaaaaaagagcccgcattgccaagacaatcctaagcaaaaagaacaaagctggagatatcacgctacctgacttcaaactataccacaaggctacagtagccaaaacagcatggtactggtaccaaaacagagatatagaccaatggaacagaacagaggcctcagaaataacaccacacatctacaaccatctgatctttgacaaacctgacaaaaacaagaaatggggaaaggattccctatttaataaatggtgttggaaaaactggatagccatatgtagaaagctgaaactggatcccttccttacatcttatacaaaaattaattcaagatggattaaagacttaaatgttagatctgaaaccatagaaaacctagaagaaaacctaggcaataccattcaggagataggcatgggcaaggacttcataactaaaacaccaaaagcaatggcaacaaaagccaaaatagacaaatgcaatctaatcaaactaaagagcttctgcacagcacaactaccatcagagtgaacagggaacctacagaatgggagaaaatttttgcagtctacccatctgacaaagggctaatatccagaatctacaaagaacttaaacaaattttcaagaaaaaaacaaacaaccccatcaaaaagtgggcaaaggatatgaacagacacttctcaaaagaagacatttatgcagccaacagacacatgaaaaaatgctcatcatcactggtcatcagagaaatgcaaatcaaaaccacagtgagataccatctcacaccagttagaatggcgatcattaaaaagtcaggaaacaacagatgctagagaggatgtggagaaataggaatgcttttacactgttggtgggaatgtaaattagttcgattgtggaagacagtgtggtgattcctcaaggatctagaactaaaaataccatttgacccagtgatcccattactgggtatatacccaaaggattataaatcatgcaactataaagaaacatgcacacatatgtttattgcagtactattcaccatagcagagacttcgaaccaactgaaatgtccatcaatgatagattggattaagaaaatgtggcacatatatgccatggaatactatgcagccataaaaaaggatgagttcacgtcctttgcagggaagtggatgaagctggaaaccatcattctgagcacactatcacaaggacagaaaaccagacactgcatgttctcactcataggtgggaattgaacaatgagaacacttggacacaaggaggggaacatcacacactggggcctgtctgggggtggggggcagggggagggatagcattaggagaaatacccaatgtaaatgacgagttaatgggtgaagcaaaccaacatatcacatgtatacctatgtaacaaacctgcacgttgtgcacatgtaccctagaacttaaagtatttatatatatatgtatatatatgtatggtaagatgtatatatatatatatatatgtatatatatgtatggtaagatgtatatatatatatatatatatatatatataaagatgtgcaaaaaagttatgtaacattcactacaaaagaggctaaaatcaagcatggttatagctcagaaaggagagaccacatctaggcaattaaagggaatagaacagaatggttaaatccctaaactttacagtcggacagccttagttttgagccctaattctgccactcatgagtttatgtgatctagggatataacctctttaaaccatggttttgttatcagtgaaatggggatactattagttggaaaaatgaaatgagatactgcatataaagtgtcagctacccattatgagtttgtagagtgactaaagtctcatcatatcattgtcatcgttgtcatcatcatcatcatcaaaggctttgtgattaaggcactcactatctggatcggcagacatatgacagaagactgaacaaccagaagttatgaagataggtactgtgggtgttagaaagattcacggcaaaacagggaaggcaagtggtactatttaatggaaacattgggtagttccaggaaagtaatgggaaagaacattgggaagttagacttaaatgccagactgggaaatttagtctttattctgcaggc

SEQ ID NO: 42370 - DNA, 2300 bp, Homo sapien
cgtaagaacggacagtgccgtgtctgtagtctctcctcctttggctcttttgccttctatttgcagcacattgtggctatgtttattaattactttgtggcttaatactataaaacacacatctatcctgtgagctatgtaccctagggaaagagtccttcataccctccagttggccataaagagaggacagagtctcaagatttgccctgatgctaaggattaataccacctcctccgggagccatcaggttaccactctctagcacagagctaccacgtttaagactccttcagcaccatccccccttttcctgcacgaggacacttgcatgctgtttggtattaaaagccctctgcaactgttcccaacctacagcaccaaagtagccccccaccatgctatgactccactctagccagactgatgatgtagcacaagatggtgggctgtggagtcagacctatctgggtgtaaatcctagctctgcttcttgctggacgtgcagcttaagattcctgagctcctcatctgtaaaatgattaaattatcacctacttcagaaagttgtctgagaattagagaaataatatcaagccccttaaagcagatcctcaataatcgcttgttggctcatgaaaccgattttttgttttgttttgttttgtttggtaaaagccctcattgcatagccctgtggttctcataaccttagttacagaccttttgtaaccctgagaacatctgtctccattttcccttgtcataaagacgtctgctgagactacaaacggagtcagggaactactaccagaaagtttttcttttcccatattccttctaaaactttcatcttcaaatgttaactcactcagtattttaaaagctgatatataattggtttacaactaaatttgggttgtttgccactaaaacttaggtaaaataggaaagggggcactttcttaacttccataaaacttcatgttaatacatagaatttcaagtttttctttaacaaattgttcttagtttttggtgcttcttgtcagtacgatcttcttagattgtatttgatttgacacattatgtatttacttattgtacgctgaatataacgtcattccccggtgttctgcaaagcacaacactcatcccgatctggtgctctaacccctgggaccctttgggccagaccatgacaaaggctgcctgccaggtttcagcgaaacttagaccaccaagaatttacacacttcacaggggtgccctaaggaataaatgagattaaaaaaaaaagtctgcggggaaaccctgaggccctattagaaatgctaatcgtttccttctctagctcctattaaaatgttagaaaaccgagggagactctcctgaacagggtggggatgctcggctgctctgtggcttagcaagcgaccccagctgccctgccagggccggtcggccgcgattccgtcccgacgggggggatcctcggcggcactacggacgccagtctgccaaggaggcagcggggttcggcctgttggccccagactgtgtggcaggcaaaaggtgaacgtcaaagcctgtccccggcttcttcacatctcgcgcctccgcgggcgtcgggccgcccccgtgagcctccccggatggactgggttttagggacccccgcagccggactgcaaagcttcccaccaacccttcccgcgaacctcccagcccgggccgcaagcccagctccgggcgcgacgacgtggggccggaggtagaaggagtctcagcgcggcgggggccggggggcggggaagcccccccacccacgagaaaggtcttacatcagccgccccacgtgcaatcggagagagggaggaagtcgctcctctattcgggctgcgcctttccccagcctccgccccgcccgccgcgagtctccccgccccgccttggtgcagccgcggccgccgagccgagcagcgccgcgcggggccgagtggagccgagcagctgccgcgccgcgtcgccggtttaagcgcagtgcaggccgcggccgggggcggcggtagtgagcccagcgctgcgctccagcccccttttccctccatggtttctctccgctcccgtgagtaacttggctccgggggctccgctcgcctgcccgcacgccgcccgccacccaggaccgcgccgccggcctccgccgctagcaaacccttccgacggccctcgctgcgcaagccgggacgcctctcccccctccgcccccgccgcggaaagttaagtttgaagaggg

SEQ ID NO: 42371 - DNA, 2300 bp, Homo sapien
agatagcaaaatttacatctctaaattcagagaggaaaaagtctggtgtgctagagggaagttaaaactgatttaattgccagttaaacataaaattatagaaatctatcataaaggaaatacacacacacagacacacatacacacacacagagagagatcctatagcttttacttcagaactctagccatgagataaacacaaattcactggcttgcaaaaaaaaaaaaagtttggatctaaacagtggtttttatctcagtagaaaagtaacagcagagttaaagcaagcagaaaagaaaatagagagaaagagaacttagaaattctgtggacctttgggctctttttccttaatgcagtggtcatcttgtgcacaaagaccataatatttccattttacacaaattctaacaagtagaggtgccataacactaagagtgccccaaaaggggttactcttcttgttttctccgccttcttagattatttgtttcctttttttttttttttttttcttaaaaggaggaactgagctgtgtcctagggcttttgtggagtgggtcaaagtgtgtgctgcttgagggcagcactccatagtgtgtcaccactgaggtgttactgccctcttagcgtctcagtttctgactctgcaggtctaagccccttcaggagggctgaaagtgcggagtcatcagcttccatatgcccttcctggacaagcctttttaaaactaattttggtgagggttccctgtagggccgttgcacgtcatgagggtcaaccctccagacactcccatgtggcccccggtcacccaggggcgcctttcagctagcaagggcaaaatgccctttctcttttttttttttttttttttttttgagaaagagtcttggtctgtcaccaggctggagtgcagtggcaccatctcggctcactgcaacctccaactccctggttcaagctattctcctggttcagcctcccgagtagctgggattacaggcacgcgccaccatgcccagctaatttttgtatttttagtagagatgaggtttcaccatgttggccaggatggtcttgatctcctgacctcgtgatctgcccgccttggcttcccaaagtgctgggattacaggcatgagccaccgtgcctggctgcaaaatgctctttctcttggatgctgagtaaactcagtctgtcatttacctatgaaaacaacagttcagttcctcacttaaatgtacacagacaagccaaattgagattaattttgggagaaaaagcaatggagaagaccctttagaatgcgcctctgagctcagtgtggtggctcacacctataatcacagcactttgggaggccaaggcgggtggattgcctgagctcaggagtttgagaccaccctgtgcaacatgatgaaaccctgtctctattaaaacacaaaaaattagctgggtatgacggtgcatgcctgtggtcccagctacgtgagaggctgaggcaggagaattgcctgaacccagaaggcggaggttgcagtgagccaagattgcaccactgcactccagcctaggtgacagagcagactctgtctccaaaaaataaaaataaagaatgcacctccgaactagaagtaggatccttaaacaacagcctcctaagacagaaaaaaaacaacagccaagactacttcctgtaaattgtgctcagccacccctaactttgtagctctcgtccaccatttcacatgccaaggtcaaatcctctctcagtacaaggtcatctctggtatctcttgttaaatcaagtttagcctaaagctgcctccttacatattttaagttcagcctaaaggtttctctgtacatcgtgaactataacaagtggaggtataaacaaaccatggcccacacctgtgccaattactgagtttttggccaatcaaatgtagccaactgtttgaactgtgttcaaataagacaaatgctgagctgtaaccaatccagttgtttctgaacctcacttccgttttctgtacatcacttccctttttctgtcgtaaaccttcttccaccacatggctgtgctagagtttctgagcctagcctggctcaaaaggctccccagttcatggattgttcatttctcaactaaactcctttaaatttaattcagctgaagttttgctttcatcagatggggtcagaaacaggatctgaagtagagcttcttctaatgacccccaggggtgctgagtgatcaagcaaggtacctgcaggacccatttgtg

SEQ ID NO: 42372 - DNA, 2300 bp, Homo sapien
agttatgagatatctccccaggacaatttctctattgcaaagtgtactccatacatattgggctagtagtgccctgccgatagagatgacgccagagtcagcccccagtccaaaactaggtggccgcttgggctggcctctggatccatcgccagagggggtctacagaaccggggcaggtagcacaagagcaatcccgaatgagcccccaaatttttaactgctcaactggttcaccatgcccactacctacacagctgatttatcaaaataggggaattgcaatagagagagtaattcatgcagagccagctgtgcagtctggctgagttttattattactcacatcaatttcccctagcattcagggatcagaggtttttggggtttttgtttgtttgtttttgaaatggagtttcgctcttgttgcccaggctggagtgcaatggcacaatctcagctcactgcaacctccgcctcccaggtttaagcgattctcctacctcagcctcccaagtagttgggattacaggcatgcaccaccatacctggctcattttgtatttttagtagagacagggtttcaccatgttggcaaggctggtctcgaactcctgacctcaggtgatccacccgcctcagcctcccaaagtgctaggattacaggtgtgagccactatgccccaccttggagatcagagtttttaaggataatgtggtgggttaagagaggccagtatgccaggagtgctgattggttgtgttggagataaaatcatagaaagtcaaggctgtcttcttgtgccaagtcagttcctggttgggggacacaagatcagatgaaccagtttatcaatctggtggtgccagctgatccatcaagtgcagggtctgcaaaatatctcaagcactggtcttaggttttacaatagtgatgttatccccaggagcaatttggggagggtcagaatcttgtagcctccaggtgcatgactcctacgtgtctaatcttgtggctaatttgttagtcctacaaaggcagtctagttcccaggaaagaaggaggtttattttgggaaataacttatcttattttttaaattaattaattaatttatttatttttgagacagagtcttgcagtgtcaccaggctggagtgcagtggtgtgatctgggctcactgcaacctccacctcccgggttcaagcgattctcctgcctcagcctctcgagtagctgggattacaggcacgcaccaccacgcccggctaatttttttgtatttttagtagagacggggtttctccatattggtcaggctggtctcgaactcctgacctcaggtgatctgcctgccttggcctcccaaagtgctgggattacaggtgtgagccaccgcgcccgcccaggtgattgtattttaagagcctggggctgggaggtccgggtactagtcccatctctgctttggctttctggatggctttggacaagccagtgcaacttctcgaacctgttgcctctcatataataggaacctccgccacttcttgaaaacttactacaagccaagtattgtgatcaggggtttctatacgtcatctcacagttctattttatttttttgcttcagagagaaacaaaaataacgctccggaagactgagtaacgtatatatgagcaggagctggtgactggcataggctggactcgatccagctctgtgattctaactctagcaaccctgttttttccattacaccatagggcgcgctctccccatgctcctgagagcaggacatagactatgccctgcgcaggcagccgtccgcctcctgcagggaatgcttgctcctgggtgcacgcacggataccgcgatggtccgagaccacgctctgggacagcaagcctcaagcctcgcacaggagagggccgcggagcttcctcgacccgccccgccgcccttcccgcgggaggccccgcccccgccccccgccccgattggctgtcgggagagaggcggggcctaggggattggctgcccggcgaccgcgggctgacgtggcggggctggcgtgtgggtctcgcagcgttgctcacagaacagagtagaggcggcggcggcggcggccggacccagactggtagtgaggctttggaccccgagccgctgcaatgccgctggagctggagctgtgtcccgggcgctgggtgggcgggcaacacccgtgcttcatcattgccgagatcggccagaaccaccagggcgacctggacgtagccaagcgcatgatccg

SEQ ID NO: 42373 - DNA, 2300 bp, Homo sapien
tgggactacaggtgcccgctaccatgcccagctaatttttgtatttttagtagagacagagtttcaccatgttggccagggtggtcttgaactcctgacctcatgatccacccacctcggcctcccaaagtgctgggattataggcgggagccaccgtgcccggcaggaaagtgcattctttaagagcctttacgagagttaatttaccttgccctctgtcaaactgttggaggtagattggttccttgttctgtatttacctagcaagtggctcccagtgtttacctaccctaacttccttatagaaacaggcatttattgaatgcatattttctccacactgtatgctgttctagggcgttctctgtgtgctgaggaaaggttaaggtgtggcagaattttattaaggccaagaaaaccgtcagggcttctggttgaaagttgcaccaaggctgtggaactcaggtgaaacagcagaatgtctttagtctaaaaggaaagttctattgagaaggcaaatggaagccatgaccaaaaaggtgactcctgagggacatgctctcctcacacacagtggccatcccagcaaagccgcccttccctccagcacctgcctctgtcctaggcacggtgccctctgacaggctgctgccctgaggctggcccagcctatttgtggctacacccttcccctgactccctgttctccccagctcatcaccatgggctttttttttttttttttttttttttttttttgagacggagtcttgctctgtcacccaggctggagtgcaatggcatgctcttggctcactgcaacctccacctcccaggttcaagtaattgtcctgccttagcctcccgagtagctgggattacagacacacaccaacacgccgggctaatttttgtatttttagtagaggcggggtttcaccatgttggccaggctggtgtcaaactcctgacctcgtgatctgcccgccacggcctcccaaagtgctgggattacaggcgtgagccaccgcgcctggcctgggcttctttttttttttttccaatcctgaaggatccaaaacctgaggggagaggaagggactttagaaaaatctcagctccactcctctctttccttacccctgactcagatcagcagttcccagagtgtcccacaggacacagtacagaaatggggttctgtgggcacgtgttgtccaccctcattcattaattgatttagaatcaataaagggttttttggtttattttttgttttgtcacccaggctggagtgcagtgacacgacctcagctcagtgcagcctcaacctcctgggttcaagcaatcctcccacttcagcctcctgagtagctgggactgcaggcacacaccacacacccggctaatttttatatgttttgtagaaacgggatttcgccatgttgcctaggctggtgtcaaactcctgggctaaaatgatcctcctgccttggcctcccaaagtgctgggattacaggcatgggctaccatgcctggccagaattaataaagttctgagtcgaataagtttgggaaacactgggtttggaactcagctaagttgatttactgggaccctctaagaaggcattaaggcagggtagtgtttctcccaaacgaggctatccatgggacccatttctgcatgttgaactcagctgggagcccgaggagagttgtacatgcctgagctcccttcagactcccacagactttgtgctatggggcaggagggagagaggagtgctgaggctgccgggctgcatggaaccccagatagagggaacccgatagcacggtcggcaggctaggggaagtcaaggagtccctgaagagaaaggggtcaccagttgctgacccagcctgtagtagcccctaggcacagcgatactgtcttagggctgaaagttaggatcttccagattactcagattccctttgcccgatggctctgagtggcagttttctaaatgtccactgggtggcgctggctccccaggaggcggcaaaatgaggcgccccttccctttccagcaggaattggcctttttctttacttgaaaattacagaattccatgcagattttacagcctctgtaggtaagctttcacaaggtgtttttctgcacttgtcccccctccttgccccgatcgctctgcccctctcttgggggggtttctgcttctgtttatgccctggtgggccacaccacactcccacaagatgaacattatacaaaagaaaactcagtggaa

SEQ ID NO: 42374 - DNA, 2300 bp, Homo sapien
gcaatggaaataatgtaacaaaataataaacatctggccattttactacaaggagctttccttttcttgatttgttccacaaataccaattaactatctactcttggagtcagacaccaagctggaaaacaggcagaacagacagtctttgccctctccagttttcagtcatggctgcgggaatggggagggccaggatagggaaagcataggctgttctggaaggagaaggagggaaggcttcctggaggaaaagatagtaaggtagaaacctgcagagtaagttggaatactcagggcaaagggcatttgggaagaagaatgttccaagcagggtaaactgcacgtcccccagtcttgaaaaagcacagggtggagcataggcagggcggagaccaaggatcttaagaaagagctgagggctttataagtggaagtctagacttgagcctgggggggcaactggaatttggggtggtggtgtgtgtgtgaaagttgtcagtaccaaaacagagtcacttacatcaaaaccaaactaaatggtgctcctgtagtcccagctactccagagatgaggtgggaagatcacttgagcccaggagttagaggctgcagtgagctatgatcgcactattgcactccagcctgggcaacagagcgagatcctgtctcaaacaaactaaatggtgctgggaggccatgaagtggggggccctcatcaacgatttgcctggtaacaggaactattattgcaaaagattccaccaaactgcaaccttgcacaaagaaccacaaccttgcacaaaagccatgatatgaggacatctgcccagcaactgcctgttcaacttttggactgaagccacctgtattaattcttgtaaccaagtattattattttaaaacgatctggccgggcgcggtggatcacgcctgtaatcccagcactttgggaggccgaggcgggcagatcacggggtcaggagatcgagaccatcctggctaaaacagtgaaaccccttttctactaaaaatacaaaaaattagccgggcgtggtggcgggcgcctgtagttccagctactcgggaggctgaagcaggagaatggcgtgaacccgggaggcggagcttgcagtgagcagagatggcgccactgcactccagcctgggcgacagaccgagactccgtctccaaaaaaaaaaaaaaaaaaaaaaaacaaaaacaaacaaacaaacaaaaaaaacagtatatgcaatcctcctcgttttgcctttaaaagcctctgctttcctttgcctccctgagtactccgcgtccccaccccttgggtgccatggcacatttattcccgaattgcaatccttctgctcagtccgaaataaactcaattggagaatctctgtgtccttatttgaggttgatgaaggtatcttacagttgtgggaatgattatctttccggggaaaagggcaagagaggatcaagggaaagtgagaggagcacccccggaaggtcacagccaactttggtcccatcatcagggctgcagttttctgggcgttactggaacagcgtcattaagcaggaagcccaccctctcctagctggctcattaggagcttcccatttctggtgggaccacctcccggcctgggcgggcagagggagcaccctgctggtcggaggatgctccgaggcccgacgctgctcccggcgggctgtcatcctcctaggggtcggccggccggcctggagccgccccgcccacggccgaggtttcggtttcccttgggagccccgccctgtgtcccggggagccggaggaggtggagatgaatggcgggcgcggcgaccgggagccggacccctgggaggtcggagcttgtcgagggatgcggctggcgctgcccggagcatggcgaccgcgtggctgagctcttctgtcgccgctgccgccgctgcgtgtgcgcgctttgcccggtgctgggcgcgcaccgtggccaccctgtgggcctggcgctggaggcagcggtgcacgtgcaggtggggacgatggggacggggttcgccgcgcgggagttgggggagccagcccaggcataacggccgaggagggggcgtgcctggccgtggccagtggcgggttacaacctggaaaccaaaggtgccccagagggcgtctaagcggtcgaccgaaagttcagagcgggagcctgagacccaaggaagggcaaaggcgagccaaagccatcagttgagcttcagaaaaggtgggtttaggagtgagaggttgggagcc

SEQ ID NO: 42375 - DNA, 2300 bp, Homo sapien
atgtagtggaacttgcctagcacattcaggtcccagccagttggcagagcatgctctcatctccttattccataccctgggcgtcccctttctgttgactcaggaactttctgagaatgaggacagcactaggagatgagctttggcaggtatccaccttaacgctacaataattgtgcttcctgaaacaaaacttgagattgtatcatagaaggaaacaggaagtcagaaatcaaatctatgcttttaattgaaaccgtgcctgaaacagtttgaatgattgttttaatgttgtttctgaaattccttgtacctttgtgaaaaataatgataataaataaaagtgaaaataaatagatgtggaatatgcaatggaaataatgtaacaaaataataaacatctggccattttactacaaggagctttccttttcttgatttgttccacaaataccaattaactatctactcttggagtcagacaccaagctggaaaacaggcagaacagacagtctttgccctctccagttttcagtcatggctgcgggaatggggagggccaggatagggaaagcataggctgttctggaaggagaaggagggaaggcttcctggaggaaaagatagtaaggtagaaacctgcagagtaagttggaatactcagggcaaagggcatttgggaagaagaatgttccaagcagggtaaactgcacgtcccccagtcttgaaaaagcacagggtggagcataggcagggcggagaccaaggatcttaagaaagagctgagggctttataagtggaagtctagacttgagcctgggggggcaactggaatttggggtggtggtgtgtgtgtgaaagttgtcagtaccaaaacagagtcacttacatcaaaaccaaactaaatggtgctcctgtagtcccagctactccagagatgaggtgggaagatcacttgagcccaggagttagaggctgcagtgagctatgatcgcactattgcactccagcctgggcaacagagcgagatcctgtctcaaacaaactaaatggtgctgggaggccatgaagtggggggccctcatcaacgatttgcctggtaacaggaactattattgcaaaagattccaccaaactgcaaccttgcacaaagaaccacaaccttgcacaaaagccatgatatgaggacatctgcccagcaactgcctgttcaacttttggactgaagccacctgtattaattcttgtaaccaagtattattattttaaaacgatctggccgggcgcggtggatcacgcctgtaatcccagcactttgggaggccgaggcgggcagatcacggggtcaggagatcgagaccatcctggctaaaacagtgaaaccccttttctactaaaaatacaaaaaattagccgggcgtggtggcgggcgcctgtagttccagctactcgggaggctgaagcaggagaatggcgtgaacccgggaggcggagcttgcagtgagcagagatggcgccactgcactccagcctgggcgacagaccgagactccgtctccaaaaaaaaaaaaaaaaaaaaaaaacaaaaacaaacaaacaaacaaaaaaaacagtatatgcaatcctcctcgttttgcctttaaaagcctctgctttcctttgcctccctgagtactccgcgtccccaccccttgggtgccatggcacatttattcccgaattgcaatccttctgctcagtccgaaataaactcaattggagaatctctgtgtccttatttgaggttgatgaaggtatcttacagttgtgggaatgattatctttccggggaaaagggcaagagaggatcaagggaaagtgagaggagcacccccggaaggtcacagccaactttggtcccatcatcagggctgcagttttctgggcgttactggaacagcgtcattaagcaggaagcccaccctctcctagctggctcattaggagcttcccatttctggtgggaccacctcccggcctgggcgggcagagggagcaccctgctggtcggaggatgctccgaggcccgacgctgctcccggcgggctgtcatcctcctaggggtcggccggccggcctggagccgccccgcccacggccgaggtttcggtttcccttgggagccccgccctgtgtcccggggagccggaggaggtggagatgaatggcgggcgcggcgaccgggagccggacccctgggaggtcggagcttgtcgagggatgcggctggcgctgcccggagcatggcgaccgcgtggc

SEQ ID NO: 42376 - DNA, 2300 bp, Homo sapien
tgaaccccaaatcagggtagacagtgtcaagggctaaaggcaaggggagaggtggctgtcagggaacagaggagagcgagatctctgctacttgggatatcaaggaggactctctggaggaagtggcttgggagctagggaaggggcggatttggatttgtggagatgggaacaggaggtgggggcatgggaatggcaagccaagcagaaggagagggacgggcaaagagccagagggctggagatgcaagagcaggtgctggggaagctggaaggtgccgtttagatgagctagaagaaaagaatcttggaatatggaatgagacccagccagaggccttgaatgccaagccaaaggatttggccttgatcctgtagggcagcaatgaatgggcagcatcagagggtgatgtgaggccaggggcagtggctcacgcctttaatcccaacctttgagaggcagctacaggagaattgcttgagatcaggaggttgagaccagcctgggcaacatggcaagaaaaaaaatttttttaattagccaggtatggtggcatgtacctgtagtcctagctacttggaaggctgaggcaggaggatccttgaggtcaggagtttgaggctgcagcgagctatgatcacaccactgcactccagcctgggtgacagagcgagatccttcctcaaaaataataataaataaagggtgatatgaggtgggggtggggtggtgagggcttggtattcagaagggtccgtctggccaagaggaggccccctggtattatgggtatgggtttggccatgaaagaggcctagaccctctcacaggccacttgtgatctggctctcctcgcccctctggcttgtattctcttcattcacgttacccaatatacatggtgtgtgtgtgtgtgtgtgtgtgttttcttctttttaatttctctttgataatcttactaaaccacatgtggttcccccaaactgttctatctgcctaagacaccttcccccagctctccctcatcctgcctacatgaccaactcctactcatcctccaagtcactgtttagttgtcacttcctttgagaagccctccctgactgtcatgtgcgaatctctgttattacccatagtacagtcggtcccagtggcccagactctcctagtagcctcacccagaggactcttcactcctgtaaaggctgggctcaggcctactgtttccaaactccctggtacctggcacagggcctagacacacagtgatgctcggtaaatattgagtgaacaaatataaggctggacgaggagcaaagcaagctgaagatgcccagatgatactagtggctgtgattgccactgttgatcaagtatctgccatgcaccaaggggtctaaatacatcatctaacttaatccttatgacaaggctatgaggcagatacttttttcaatctctctctcttttattttttttttagagacagggtctcactgtgttgcccaggctacatttgaactcctgggctcaatcagtcctcctgccttggcctcccaaaatgctgggattacaggcatgagctgccatgcctagctgagatggatacttgtgttacctcattttacagatggagaaactgagactccagaggttaagtcacttgccatccagctgataagagacagagctgggattgaaacccaggcaggctggctccagacagcacattggtacctacttagtcgggctgagggtactgggctgtctggtgaaacagcagatgggggtcaatgtggtggattctctctatggttcttctgccttgttatattcacactcaaagggatgaaaagccttaacacatcagcaagcaggtcagtaatagctatgcttcatcccatcttatcttaccaggtctacagaagtaactgtaattagagtcttttcacttgtttgcccttcacagtgcatcaccgtccacgttgaactgaccactgtcctgctcgtaccctcttatgtactcttaagatgagagctctgtgtgtcccatgatcagggcagtgagcctcataccctttgtcccatttgtctcctgcagatgtcatggcacccccagtaccggagctccaagttccgtcatgtctttggcaaaccagccagcaaggagaactgctacgactccgtgcctatcacccgcagcgttcacgacaaccacttctgtgccgtgaacccccacttcattgcagttgtgactgagtgtgctggtggaggggccttcctcgtcatccccctgcac

SEQ ID NO: 42377 - DNA, 2300 bp, Homo sapien
tctcttttctttattatttttttaatgatggtgatatatacatagcaaagtttacgattttaaccatttttaagtatacaattccgtggcatgacgtacattcccattgtgcagccatctgtattagtccactctcacactgctataatgacatacctgagactgggtaatttataaaggaaagaggtttaattgactcacagttccacatggctggggagcctcaggaaacttacaatcatgacggaaggtgaaggggaagctggcaccttcttcacagggctgcaggagggagataactcgcaggggaaactgccacttttcaaccatcagatctcatgagaactcccttagtaataccagaacagcctgggggaaaccgcctccatgatccaatcacctctcaccaggcccctccctccacacttggggattacaattcaagatgagatttgggtggggacacagagccaaaccatatcaccatcactgccaagatttttacattttgatttcacagtagcctactctattatttaatgtttttgtttacatgtgtcaatgaagagcttatgttcagactgaaatatatttgacaaaacaggaatatacatgtaggagactaacacctggctgagcacttgccaagcactgctctgaggcactttatatgaatgaacatctcctctataaggtaggtgctatcatggaccccagcttacagcttaggaaactgaggcacagagaggtttaggaaagctactcaaatgcttgccttggcccactggttgctaccgtttattgagaactttaccatgggccagggctacacgctctttggttttttttttttgttttttgttttggcggtggggggtgggcgggggaacagagcttcactctcgttgcccaggctggagtgcaatggcgcaatctcggctcacagcaacctccacctcccaggttcaagcaattctccctcccgagtagctgggattacaggcatgcgccaccacgcccggctaattttgtatttttagtaaagacggggtttctccatgttggtcaggctagtctcgaactcccgatctcaggtgatctgcccgcctcagcctcccaaagtgctgagattacaggcgtgagccaccacacccagaccaaaggctacacgctcttaagctccttgctcatctcacagcaacctgacgatgtggtatcaagacttagagaagggaagtgagtctggatttggatccaggtttctctgactctgaagcccgtatcttaagcacgtgtactgggctgcgaagctgttatgggacagcagacgcaataggtggattttgttccggctgtggagcaccatgagaaggaggacgaggaggattgggacgcccagttccggagtgctggcctcagagcatgcaatttatatgttgagaagagacttaagaaagcaagccaaggagcagagccgcagtggccaccgagttggggggtggttgagtgctcatggagcccgtggattttggacaggagttcctgctgcttattaatcgtgtaacctcagaaaactgacgccgctgctctgcagagtgccccggccacactcacgaagtggagataatcctccgcgcccccagatggttgtgaggggtaaactgagcgatagttgtgaatcatagagctgggctgtagagcagcgattctcaaagagtggcccctgggccagcggcttcctagtcaccgggaacttggtggaagtgcagactctcagctctcacccacgctgccgaatcagaaactctagggtggggcccaacaatcggagtttgtttgtttgtttgttttttgtagagacagaatcactgtgttgcccaggctagtctggaactcctggccctaagcgatcctcccacctcggcctcctaaagtgctgggttacaagcgtgagccaccacctgggtttgtttttttccagccctccaggtgactctgagcaccctcagatgctctgctgtgacacagcgggcaaacacatgtaaatgtgatgctgtcacctgtcctcacagccagtcttgcgggcagaagtgcctttcccacaggggcactgacatctttgctggactcttttaatcctcataaacccaggctgctggcacttgaaatttgagaagggcaatcagtctggcctcctgcctttctggcctgcaggcccagcctggacaaacaatttaggtggagctcctggaggctggaagcagagaggaggtacctcaccatcctctcctgccagctgt

SEQ ID NO: 42378 - DNA, 2300 bp, Homo sapien
aagtgaattaagacattcaaggccaggcgtggtggcacgcacctgtaatcccagcactttgggaggccaaggcaggcagattgcttgagcccaggagttggagaccagcctgagcaacgtggcgaaaccctatctctacaaaaaatataaaaattggctgggcatggtggcacgcacctgtagttctagccattcgggaggctgaggtgggaggattgcttgagcttgtgtggtggaggctgcagcaagctaggattgtgccactgcactccagcctgggcgacagaacaaaaccatgcaaaaacaacaacaacaaagttattcagatgccttagcctgggaaagatcatggtgcccaccgtccagctgtaattcaagtaaaaaccaaaccatgattataaagaattcccacaatgttctgatttcatccatatgtttgtttgtttgtttgtttgtttgagacagagtcccactctgtagcccaggctggagtgcagtgatgtgatctcggctcactgccacctccacctcctaggttcaagtgattatcctgcctcagcttcccaagtagctggaactataggcacatgccaccacgcccggctaatttttgtatttttagtagagacaggttttcaccatgttggccaggctggtcttgaactcttgagctcaagcaatccacctgccttggcctcccaaagtgctgggattacaagcatgagccactgcgcccagccatccatatgcttgatacccaactcttgcacgctaacaccagaagcatgcgttcagtctacctgctgggcaatccagctccagaaggtctgaatcagagctgtaggatggggttttcaggaccatagtgcacactgggctttgggtggtaggcagggagcccgtccagctctgggcaggggggtggtacagtggactatggaagctgagtcacattctaaggagagaatcaagagctccctaagtaccttgccactccaagcctcagttttcttatctgtaaaatggaggtaataatagtggctaaataaagccactattattagaagcttagaagaaacgatacagatatgtaaagtagtaacagtgtactctgttatccactccacaactatatattgagtggttactatgtgccacggagcagttcaaggccctcaagataacccgtctctactgaacaaaaccaagagctcttcacagacgtggtgtggagtggagtggctgttagcttagtagccgtgggagccatactgcctggggttgcatgactagccgggtgatcttaacctaggtacttaatatctctgtgcctcagctcttttgtgttaaataggtgagtaatggtatcaacctcataggcctgtgtgacagtgaagcgaggtaatgcacagaaggcgcttagaggagtgcgtggctcagtagtgttaggtgggggtggtacccaaaggtagggcctccccattgtctagtgtcctcagggctctccagccagcgaggctggcagcagcgcccccggctggtcccgagagaaggaagggcgtcctcctcggttcccagcggcgctcccggctcctctcctccctgcggacggggaagcctcggtaaccgctgtaactgctcggggaaaggagcgcttccctggccgggctcggcgcgcgcactgtacccggccgggatcgtcacatccagggctcaaacagccttaagaggccgacgcggttactgtctccatttcacaacgggggaaactgaggctccgggaggtcaggttcctcatcccacaccacgcagcgagggcacggcgcgacgtggggcccgcggctctgcctgtccccagcctccgcctggtggccggcagcccgccccaatcactgcggcgtgtgcgcgcctgttcccagcacgtgtgcgcgccccgagacccgccccggggagccaggagcgcggtcggggtcgtgggggcggaaaagggtggccagggcggacccgcggggcgggcaaaagggcggaccttgggccaggcccccgccccgccctccggccccgcccgccgggctgcagggggaggcggcggcggctctgggcgccgggagtcggcgggcggcgaggagcgcggagccggagctggacgccgccgccgccaccgccacctgcgcggcagtcatcaaggtagggcggccctgcgccgccggccgtgccttcccggtctgcgcgatgggggcgtcgggcgggacgtgcgcgctgcggctgcagctcccggagagggagggatgcggggctcg

SEQ ID NO: 42379 - DNA, 2300 bp, Homo sapien
cctatagtcccagctacttgacaggctgaggtgggaggattgcttgagtccaggaggtcgaggctgccatgagctatgatcacgccactgtactccagcttgggcgacagagcaagacaaacaaacaaaaagaatcagacagacctgggtttggtcacatctgccttatactggctgtgccttaggcaagttgcctaccctttcagagcctctgaggcctcatctgtgtcataggaataataaaagaacatcccttctagggttgctaggaggatgaagtgagagaatatatgctgcgtggtgttggtgatgggggtgatgccggaagcctgcacagcctctgtattcataagtttctatatctccagacagtaaagtgttagactccagagagagtggggagtggtccaggaaaggcctgatgctcatgggagactggtccctgtgccacaaacaagattttcacttcttgccacataaggataggatatggggactgtggagaagaagcaggcagaaacttgccagcagagcggctggcgcacacagcagcatttttgagaggcagtgaagctggttttttatctaggtcagggacaggattggatagggggaggagggtggcgccaggggttggaactgcctgggtccagccagaaggcagagagcaagctgagtggatgcacagcctttcagccttggcacagcgagggagatgaaagcaggggtggcctgggttggggcaccacagagagcccccgtggagtggtgaggggtgatgtgataaagtcaacagggggcattcgttccctcccctgggagcagaggcccttctagtgtgtcaggctctgggcggagggcagcagcccctgggcaggcatcggagcttccagcctggggagaccttggagatcatcttggccagagtgaagacccacccagggagggccaggaccacctgtgggctgtgcacatgtgaccctgacgaggatgtgccccaaactacatgtgatgttcttcatttccaaatcaatctggccacgtcggagtcatccttgctgcagcatcgcttgcacatgtgatgttcttcatttccaaatcaacctggccacgtcggagtcatccttgctgcagcatcgcttgcacatgtgatgttcttcatttccaaatcaacctggccacgtcggagtcatccttgctgcagcatcgcttgcacatgtgatgttcttcatttccaaatcaacctggccacgtcggagtcatccttgctgcagcatcgcttgcacatgtgatgttcttcatttccaaatcaacctggccacgtcggagtcatccttgctgcagcatcgcttgcacatgtgatgttcttcatttccaaatcaatctggccacgtcggagtcatccttgctgcagcatcgcttgcacatgtgatgttcttcatttccaaatcaacctggccatgtcggagtcatccttgctgcagcatcgcttgcactcacctccagcccatacatcaatgggagagaaagggcctgagtttcagccagtaaataccctggaattgtgaggtatagctctaagaatgtgttacgtgactgaacggcttctgtaatgtccatcccagcagaattgagagccactgctatagctgatccttctctgaggctcaggtccttgcttgaaccttcccagtgcttgtctggcttctccttgtatgccccagcagcagggagctcattccctccactggatgggcaacttgcaaaaggaaaactcagagatgtttatcacagcattattcataatcaaaaaccaactgcaaacaccccaggttcaaattaaaaaatgacaggaaaaggattatgagtaagttctggtaaattcacccaatagaatcatcaccagaggttaaaaatgatcactgggaagcttatgtagcaacattgaaaggttttacaaagtgacactgagttaattttacagtatgattgtaaatatatgataaaatatgttgattttaaaaacaaacactacttgagcacttgctatgttttggtccctgtacttagtgttgtcacacattatctcacttagtttcccaactgcccagtaggttagttggtatttgccccttttacagatgaggaaacagagggtcagagtggttcagtggcctgcctgaggccttccagccagaacatcagccaggacttaaattcagacctactggtccctttaccacatcatgctgacatcaagaatagagaagggtgctatgagtattttatttttctttcag

SEQ ID NO: 42380 - DNA, 2300 bp, Homo sapien
cagtgtgtagccaagcgtggtggctcacaatccagtgctttgagaggccacggttggaggattgcatgaggccaggagtttgagaccagcctaggcaacataatgagacctttttaaaaaattaaaaattaattagctgggtgtagtggcacacacttgtagtcccaactactcaggggcctgagacaggaggatcacttgagcccaggaggtcaagagtgcagtgagctatgatcatgccattgcattccagcctgggtgacaaagtgagaccctttctctaaaaataaaaaaagaaagaaaaataaataaatatccatgagcacatctaggcctgggaggaggaaggggtgatatcaaggagggagacccagtggtgtggagcagtggccagcgccagagctgggtctgctttctctacgcagtgtctgctgagcacctgccatgggctgaacacacctgggtttggatcctggctctctttcgtgacaaggggaacttactttctctgtgtgtgtttcctcatctgttaaatgggaattagggcactttaatagttatcccacagccttgtggatatgagggagatgggtcaggtcatggtaggtcctttcctcccttgcgggggggcttgttgtattttcccgggcattggattccgaactctgtgagccgactgagggggtgggtgcagggtggggaatagtagctctcgagctgtcatgcaaactcagtgagggagacgatgctcacgctcacgttgcacttgccacatgccaggcaccgttctgagccttttgcacatattaactcactgaatcctctcccagccacatgaggtagtactgttattatcctcattttccagatgagaggatgaggttaagtaacttgtccaggggctcagtggtcaagacagaatttccacccagacagcgtgcccgcagcattcatgccactgaccaccaggcggtgccggtacatggccaactccagcgtctttgatgtgttgttatactgtctgatgggtaggagaggtcacataagcctgcatgcgtgtagccaggagacaccaaaggacaacgcttggagggtagggactagagtgtgggcatccaggtggattccagctggtggggagctcagatggtgcccggcaggaagtttggtgattagggctttagaatgagacagtcctggccaggcacagtggctcatgcctgtaatcctaacactttaggaggccgaggtggaaggattgcttgaggccaggagtttgaaaacagcctgggaaacatagtgagacctcgtctctacaaaatcaaaaaattagctaggcatggtggtgcctgcctatagtcccagctacttgacaggctgaggtgggaggattgcttgagtccaggaggtcgaggctgccatgagctatgatcacgccactgtactccagcttgggcgacagagcaagacaaacaaacaaaaagaatcagacagacctgggtttggtcacatctgccttatactggctgtgccttaggcaagttgcctaccctttcagagcctctgaggcctcatctgtgtcataggaataataaaagaacatcccttctagggttgctaggaggatgaagtgagagaatatatgctgcgtggtgttggtgatgggggtgatgccggaagcctgcacagcctctgtattcataagtttctatatctccagacagtaaagtgttagactccagagagagtggggagtggtccaggaaaggcctgatgctcatgggagactggtccctgtgccacaaacaagattttcacttcttgccacataaggataggatatggggactgtggagaagaagcaggcagaaacttgccagcagagcggctggcgcacacagcagcatttttgagaggcagtgaagctggttttttatctaggtcagggacaggattggatagggggaggagggtggcgccaggggttggaactgcctgggtccagccagaaggcagagagcaagctgagtggatgcacagcctttcagccttggcacagcgagggagatgaaagcaggggtggcctgggttggggcaccacagagagcccccgtggagtggtgaggggtgatgtgataaagtcaacagggggcattcgttccctcccctgggagcagaggcccttctagtgtgtcaggctctgggcggagggcagcagcccctgggcaggcatcggagcttccagcctggggagaccttggagatcatcttggccagagtgaagacccacccagggaggg

SEQ ID NO: 42381 - DNA, 2300 bp, Homo sapien
accatcctagccaacatggtgaaaccccgtctcaactaaaaatacaaaaattagctgggtatggtgacgcgtgtatgtaatcccagctactcgggaggctgaggcaggagaatgggaattggagagcatgccactgcactccagcttgggcgacagagcgagactctgtatcaaaaaaaaaaaaaaaaaaaaaaattaaaaaaaaagaaaagaaaagaaactggctgggtgcggtggcaggagaatcgcttgaatccgggaggcggaggtcacggtgagccgagatcgcgccattgcactccagcctgcgcaacaagagcgaaactctgtctcgaaaagaaaagaaatattttgtcccacattctgtactaagagcttcacacatattattttatttaattatcaaaacaactctaagggtagacaggtgtagatccaggttttgtggggactggaattaaacagcattaagggccttctgatttttaaaaaattacaaaattatgaacacaaaattaggtatgacgatggttatttagaatgagaaaataaattgtaaattataacaaatgaagagctctctggcatttaggagaaatgctccctggttgcaactccccacctgttagactacaaatcccagcgacccatgcaagtgaacataaatttcattagcttcaccgtaaagttgtctggcggcgggtcgggggtgggtaggaagaagtgttatctccatttttaggttgagcaaatcactcagtattgcagagtgggaatctgaaaattatgcaaatagactctagagccctcgcctttacccccaccctgcttcttgtcaatatcactgagtgtgcatgagggtctcgttaacgacggctgagggggagacgatgaagtaagaggaaaggctgaacaaagggcaagagaaaggcagaaagaagctcctaaagaaagctggacgcaattgggctccgcaaccctaatggagaaatgcgccttaggagggaaggggagaagtttaaggggaaacaggtaaaatgaggcagaagttgagcaagttagtcaaaccctaaattcttttacttatttacaaaacagcctggcgcggtggctctcgcctgtaattccagcactttaggaggccgaggcaggagaatcgcttgaggccaggagttcaagacccccctctctgcaaaaaacaatttaaaaattagccgggtgtggtggtgcgcagttgcggtctcagctactcgggagactgaggcgggaggatggcttgagaccgggaggcggagactgcagtgagctctgatcgcgccactgcactccagcctgggtgacagagccagaccgtctctaaaaataataatagcaataacaaaataaaaataaatgtactgcacccaactatgacccaggagtggcatgggtttccgcagcgcagcggccgcgcctgggcgccccaagcaacacaaccagcgctgtcaggaggcgaataggagccaggacagagagctggggaggccactgctgtcaggcgagggataagaaggccgtccgcggcgtcactgacggggctgaaggaacaccaggagaagagtggcagacagctccggagccgcgctgcccgggcgacgccggaagatgggcctcccagcggtcttcctttcagccaatggccgcgagatgcgccgtccgagggtgccccgcgcggcacagggagggaacaagcagcccatcgggtgcaagaaagcactatctttctaggtgactatgcgaactaccagggaagtgtagctagggacaggcttctctgcccgcggttaacctaactcagtgccaccacgcctttaacctgaagccagggagcacggctgccctcagtaaagatggctgactggcgcggagaaaaagccggaagcagctgggctttgcagggagccgactgagcgctgcgggggcgtggcctggcggtggaggggcgtggccagccgccgtaacctgggtttgcgatctttgaggcgcgcgcaccgcacccggtcccgactctgtggcttcctgggggcgggttcgccgtcggccccgcccccgcccaggtgtctccctttgggaagctgcccgccgagtctccgagatttgtccctggtggtcccgcggacccctcgtccctccgcagtctccggctggcagcgatggagggcgctggggagaacgccccggagtccagctcctctgcccctgggtccgaagagtctgccagggatccacaggtgccgcctccggaggaagaatcgggggac

SEQ ID NO: 42382 - DNA, 2300 bp, Homo sapien
gtttttttaaagcctatcgaggccaggcatggtggctcacacctgtgatcctagcactttgggaggctgaagtggatggatcacttgaggtcaggaattcaagaccagcctggccaacatggtgaaaccccatcgctactgaaaatacaaaaattagctgagcatggtgccctgcctgtggtcccagctactagggaggctgaggcaggagaatagcttaaacccaggaggcagaggttgcagtgagccgataccgctccagtgcactccagcctgggtgacagagcaagactctgtctcaaaaaaaaaaaaaaaaaaaaagcctatcgagagtttgattgaaaatgtattaactgtatggattaatttgaggaatgtgacatctttacaatattaactcttcccactcagggacatatttggtttgtcttatatcctactataaagcaataaggtattcattatgtaagtcatttatgtaagggatgttgtccattatattttccatttgtttgctgctggagacatctatacacatatgcacagttttttaaaacaggccaccacttgagtttttctggtatacgtaatatatttataattattctttcaaatatttatcattgcctagctacaaaacctagaacaaataaggtatgctgtttgttttattaagaggttttaaaaatcaggaatggggccaggcactgtggctcatgcctgtaatcccagcactttgggaggccaaggccggtggatcacaaggtcaggagatccagaccatcctagccaacatggtgaaaccccgtctcaactaaaaatacaaaaattagctgggtatggtgacgcgtgtatgtaatcccagctactcgggaggctgaggcaggagaatgggaattggagagcatgccactgcactccagcttgggcgacagagcgagactctgtatcaaaaaaaaaaaaaaaaaaaaaaattaaaaaaaaagaaaagaaaagaaactggctgggtgcggtggcaggagaatcgcttgaatccgggaggcggaggtcacggtgagccgagatcgcgccattgcactccagcctgcgcaacaagagcgaaactctgtctcgaaaagaaaagaaatattttgtcccacattctgtactaagagcttcacacatattattttatttaattatcaaaacaactctaagggtagacaggtgtagatccaggttttgtggggactggaattaaacagcattaagggccttctgatttttaaaaaattacaaaattatgaacacaaaattaggtatgacgatggttatttagaatgagaaaataaattgtaaattataacaaatgaagagctctctggcatttaggagaaatgctccctggttgcaactccccacctgttagactacaaatcccagcgacccatgcaagtgaacataaatttcattagcttcaccgtaaagttgtctggcggcgggtcgggggtgggtaggaagaagtgttatctccatttttaggttgagcaaatcactcagtattgcagagtgggaatctgaaaattatgcaaatagactctagagccctcgcctttacccccaccctgcttcttgtcaatatcactgagtgtgcatgagggtctcgttaacgacggctgagggggagacgatgaagtaagaggaaaggctgaacaaagggcaagagaaaggcagaaagaagctcctaaagaaagctggacgcaattgggctccgcaaccctaatggagaaatgcgccttaggagggaaggggagaagtttaaggggaaacaggtaaaatgaggcagaagttgagcaagttagtcaaaccctaaattcttttacttatttacaaaacagcctggcgcggtggctctcgcctgtaattccagcactttaggaggccgaggcaggagaatcgcttgaggccaggagttcaagacccccctctctgcaaaaaacaatttaaaaattagccgggtgtggtggtgcgcagttgcggtctcagctactcgggagactgaggcgggaggatggcttgagaccgggaggcggagactgcagtgagctctgatcgcgccactgcactccagcctgggtgacagagccagaccgtctctaaaaataataatagcaataacaaaataaaaataaatgtactgcacccaactatgacccaggagtggcatgggtttccgcagcgcagcggccgcgcctgggcgccccaagcaacacaaccagcgctgtcaggaggcgaataggagccaggacagagagctgggg

SEQ ID NO: 42383 - DNA, 2300 bp, Homo sapien
cagctctggaggaacatgcattctaggctggtgactgaggcaggaactcagactcaggaagcacatcagggatgcagttacccaaactgtaataccaggccagagtaagatcttggaaccagagggatgcccaggcattaggagtgggctgtgagatcagagattggcctggagccatgctgatggagagtgagattggtgccccctgggtcagggcagatcccaggtcatgcgtcttggggccaggtcaccccaccataaaagaagacagaggggctgtagggcaggatgccaggtagggccttcaaccccttagtaaatgtcaggcaaagttacccagctttcaacttattcccagatgtaggtgtcagtggacactctatattggcacagcttgcaaggaggacacaaatgactaaaggaaagaattagaaaaaagaaaaaaaccaagtgaaaatgttcattcagaaacctgagctaagggtttgaggaatggcaggtgccagaagactatgactggaggatatttgtgatgtcaagtgagacagcagttgagcgagtatctggggattacactgtcctttggaccatttctttccctccctcccttccttcctcccttcctggaggagatgctcaggtgagttctgttcatgcaaaccctccagcttggggaaaaggaaatgccaagtggagccgggagaggtggagtctatagaagcctggaaagagaagttagggcagagagaatttggcctggtttccctggcgctgtccaaggtactctctagtagttctgctcagcctccactcacatctttgtgcttcctaacaactcagcctggattcagagctgcccttgcctcactccagtagagctggtgtgtggccatcatcatcatcatccggtccaaatccctcaccatatgccggagggaatcgatgtccagagcaactgagtcagggcagtgctcctcctggagaggaaacttgcagtcccacatccctggctcccactgcactgtgcacggagttcctgctggctctgggttccggtccttcagtagctctgtgtgcttccactagctacagaacctctctgagcaccagtgtattcgcctgtaaagtaagggtgagtaacacagtatgcttacagggcagttgtggggattacatcataaggcacacagtaagtactcagcgaaggtcaaacttccattcttgttacaaggtcgtcgatatcttccacagtccctggttcaggctcaagtatgttttgtgatttgatgtcctactgtgttcctcgcattaatcagcccctgggactttatagattaatgatcacgtttcctattcttgaagtatgcagaggcacaaggaacccaaggtcttaggtcagctcactcgggtacatctggctcgggactgctttggctaagattggccagtgcgacctggcagagagagggccaagtccaggggcgcgcggccccgccctggcctgaggatagtgctcccaccccgggagacttctagggcggggcccatcaagaatggggacgcggggaggtcaaatgcctggagggggcggtagcgcacgtaaggttgggaccccagctttgcttggggttggcaaagggcggtcgctccgtctggtggggaggaaaggggtgtcctcagccaaggccctaaaggccgggcagcctggcaccaacgggcgttcgagcacccgtgggcgtcttcagcgacccccgggactcggtcaggggctcgtgggcgccagaaaagaacgggagagcgtaggctgcagatgcctctgggacgccttcgtggaacattctcctgcccagaccttcccggccagacctccgagaagcggttccaaaccaccgtgcaggtgctacaggcagcgctcggcggagcggcggcggccactgcgtgtgccagcgcgcggtcccggttcccagatcgctgtccccgggcgctctggtgcctggaggtcagcggtcggcgggcagcggcagctggcgcagcggagggccgggggcgcgtgtgtgcgtgtgctgggaaggtggccctccccgcggccgccgcagcgccagcgcctccccctcccccggcgcgcacggctcgtccccgtccctggaggcggcccgagccgcccctgagcagcctcgccttcgcctcccgcgtttcctgccgtccgccctcccccggccgagctccaggggctgccgcctagcagctcccggcgggagagcggttcagagcgcgcacgggggcgggcggaggcggcccgg

SEQ ID NO: 42384 - DNA, 2300 bp, Homo sapien
aaaaaatagaaatccagattttgatatggaatcttaatttataagtacagggaattttagaaaattctgcatgatgtagtactgagctggccaaagcaaacacttctcttcccaaggaatccgtttgcagcctctgctttactgtgcaggatatttgctgatcatgccactctggggtctccctgcagtccacaggccctgccagcttcctggaaacaccagaaacaagctctggtggctgcttgtaactgcaagctgagactttctctttggatttctcatcttccacatcctgctctacttgtttgaaatcaaacttactttatgcctgagaaaacaaaacaacacactggtcttgtctgctgacctccccagtctgcatggggtggtagcgccttctgagggctgcagactcggcgctccttttgtgtccattgctggctcaagctctgcatccttcctgactgtgttgttctcatagctcccttcattcctgctcttactgccatttccacaggcaggccctcacagatgcccttcgtggctgttcattaacctctgagtggtcatgggttacaagcgttcccaggaggtagtgcctgtcctctctaggtgaggctcagctataggagcagctggcccaggccctggtatagagatcctgatgcctctcacgttatcaccagagcaggaggagggagattatgctattgtagacgcttaggaatctggagctgcctctgtgtccatctgtccctgtctcactgtaagacctcaagcaagtcagcaatcctgtctgggtctccatttctcaatctgtgcaatgaggagattgattagatgaggggtggcaaatagggttcactgccacctccaggctattggaagtgactgcctaagggctgggtcaggaaagatttagtgagtaaccatggcttattgggaatgggtgctatcattgatcagtaatgtctgtctgggccccaggagaggggagggcaggcacatgtgaatgtagtcactgtctctgggctggcaggtcctgggcctggtctccttgcccttcctggagcatgacttctgctctgcgttcctttggcagtcctggtggaaccgaatgtccaatcggttccgaaagctcaaactgatgcagacgctgccccgtgggctgtccagcaaccagcctttgcctttctctgacgagcctgagccagctctggactccacaatgagggctgccccccaggacaagacaagccgctctgcactccctgatgcggcccctgtgaccaaagacaatggtgagaaaagtctgcatgtgcagtagaatttttggaatggtctgagcctgtaccctctgcccttcatcctacctcctgggttgctgtcaggggtaagatgatgttggaatgggacactggagcatagaggctggtctggtggaaaagatacttaggcagggacacaaccaccaagagtgtgatagaatgagaaggtgctggccagtggcaagaggcccaggttcctgtcccacactccctgctgagggacgacagggagtcgtcctctctcttgcctttgataggtggttttccccacctctgaaatgtgattggtctatgacactgaaagcatcttgaaataaaatgagttactgggagggtgtgagtagtgagctccccgtcactcaaggtattcaacagcttggataactttgtcagtttgctgaaggagattcccatactgactggaacatagataagatcccttctaacagtcagattccccatgaccagattagctactttggcaccactgtctgagacagactattgagctgggggcaccactgtctgactcagtacggcagtggtttatggaaaagctgaaaacatgctccaatataccttttaaatgccttccttctattaaaatatcgaataccaattattattaaatatttaagcacccaggagagttggttttccaggttgaagcctgccccagtcactcatccttatgctgtggacacgtggaggggtcatttcaggaaatttccatttgtctctcaggtcctgggagcacaagaggagaaaaggaagacacgttattgacaaccatggtgagtgtggggcttttctaaaagcattttaggtctccggcaatcatcagttgattgatttacaaggagggatgtaggtgtttgtctgtctttgtagtggtcacagatagggttggtgatgagaatgtgtaacagtgggcttagctctggcactgaggagtcagaacagatgccagct

SEQ ID NO: 42385 - DNA, 2300 bp, Homo sapien
ggtgaaaccccatctctactaaaaatacaaaaattagccagatgcggtggtgggtgcctgtaatcccagctgttctggaagcagaggcaggagaatcgcttgaacccgggaggcagaggttgcagtgagcctagatctcaccactgccctctagcctgggagacacagcaagactccatctcaaaaaaaaaaaaaaaacaattctggagttccggcctggagcggtggctcacacctgcaatctcagcagtttgggaggccaaggcgagcagatcacttgaggtcaggagtttgagaccagcctggccaacatggcaaaaccccgtctctactaaaaatacaaaaattagctgggtgtagtggcgtgtgcctgtcatcccagctactcgggaggctgaggcacaagagtcacttgaacccaggaggcagaggttgcagtgagccaagatcacgccactgcactccagcctgggtgacagagcgagactccatctcaaaaaaagaattctggggtttaccttgctggttgctaaagaaagtaattgctctttgaatggcgccttaacattatcatttgatccctgcaacagccaggtgagagggatgctatccccacatttgtgatgaagaggcagcttactctaaaaatgtgcgctgaaattcacgtgcactgactccacactctgtgctccttgtcctgggctgcagcttcctcccagttactcaagagggctcatttcgaccagagtcagcccagagtcacaagtgccctctggcagctgctccatcccctgggatcaattaaaggctgcagaaggcctgccttcagccccccagcaagcagactggccatgaggatgcctgctctgacaggaatggggtacctgctggcccaagcttggaggaaggtgtgggatgagcatgtgagggaggggctaacatctggcggctgcagcaaggctcagctgtgcaggtaggcatggggtccggccccagcctagcagctgggcttcagggtacagcatgaagatgcccagttgggcagcggcttttggccagctgtgtctgcaggtttggaggagggagcatgttctgattgcttcttacatgggagggaaagaaaatatgagcattggctcttctgttggctgtggctgtgaacttccttagagctcagctgctcgatatctcaggggtcctctgatttggaattatgattgtacatttagtttttagaagaaaaaaaatttttaaacaatgtccatgggaatccaggattttctaagaccccaagacttttcagtatatctaagaaaggatatgccaacgtttgttttgcctaaaaatgattgctttatttgcatgagatcagggccgtgatctgctgctcattcgtgttttgttggcaagatctgtctctgaagtgttttcagatgttcttgggtaataaaccttccagaagagctgctggatttgtccattacgtaggtctccaattagattgcttttgagaattagatgctttttaaagccaggctgtgttgttacacccttgtgacttttctgttatattaaacctttccgtggttaactttaaaaatctttgtttacccagatgaggagaaaaggcgacctgatattttccatgcattgaaaatgggtaagcgctttagaaaatctttttggatatttaagaatatagggctacattctcccaacctaatatttgtagtcctttgcagggccacccagggtatttgagaaagaaacaggcattttggtgtttggtgtttggaagttcagatcctggaggccagtatttattgtagagctctacacatagactccagacggcctccagccccactccagccaaacactgtctagctatgccctagctcttcctgcatctgaaatgcctctctgcatacccactccagtctctttgtgacaaagaggcatttagcctaaaattttctctcttgatatagaccctgcttccaggaagcccttcccgatcctcaccccgcagcgagacctgaactctccttctgtcttcttctgtctccttcatccgttctctgaagacactaacaacacttctgtcttttggtaacacttctgcccattcgtgtgtttgtctctgtctcgcctagactgaggcatttaagagtcggggctatctctgacgccctcttagtatcccctatgatgcccagcagcccactgcagaggcagagcagggccagcaagtgtttgttacatgaaccacaggagaaatcagcctatggtaccaggcc

SEQ ID NO: 42386 - DNA, 2300 bp, Homo sapien
ggggtttattaagatcaaatgagataaaaatgtgacgcaccttgtaatctgctgttagggattatgctagattttatctcatgcttgataactaaatagtgtaatcttttagaaatgtactacagtggaggatacaccagttcttcagggatttccactgctcacctctggaccttcccctatgtggttatgccatttatgcattcatttacttggcttgtttgaccaaatttactgagctccgatgtggatcagccactatggtaggggctggggaaacaatatgcgtggaaccctgtcctgtccttggagagcctgccactgaataggagagacaattagggaaagagggctcacgtgcagccagaggcgagcccgtggaattaggtgctcagaagaggggcactgacctagcctggttgaggggtggtctggaagctgctcagagtgggtgagatatgactcctgaagcaggacacggtgggggtgtgctgagtagatgaggacaggagagtcctctggtggggtcaggatggtgaaggtgtggggaaggcgggaaggtgtggtttgggagcaggaggaagtgaggttggcaaagcagtcaggtcttcggcaatcagaagctggggagtgacagatttgggtttggagaatatcatttgggagtcgcatggaggatgggcaggagggaacgagactggaggcggggagacattggggtgcagctttctgcattgagttggtttcaatttgccttgtccttttccactctgggagtggaggtcaagaggcccagccccctgcagctgatggagctgtgtcaccaggctcttgcttcgtggctgagtagccccatgctgttcaggttcacatcccagaaggtattcagccggagcctcagacagagttcagccctggcctggccgccagccgccaggaggagggaggtcttgggtttagatgaggtgcaaaactggctcccgggaaggagggctgagcatcgagaaacccagaaagctgcctcacagatgcagacatgacagtggctttgtggtctcgaaaacctggagtagacagcccctgtcttgtcattgttttcttgttagtccagggccgcttccagcttggagatacacagctccgagcccaccagagacaccacaaaacagaacttttctgccctctggtgttaaaagaaggaagagattttgctgggaagaggtacctgttttccttctcctggtactaggaagttggtgggtgcagatctttctcttcaggggcccagcagtgacttcattgaggaagatctggcctaggctgggtcctcagccgcctgcaacaaacattcctgccagcaggtggcagcaggcctccaggccgcaatgcccagcctatctgctgaccacaaccttgccacacctcttggcatggggtgtgtgcttttggggatggggagggtagaaatgaatcagacatgggctctgcctgtggggaaattagagcacaggcagagagacagattcccaggctataaagcagaataaaatcgactgtctgaaatgtaggaggcagcatggtgtaagagaaaaagcaagggcagcggcattcacacagacctgtcctgaccctgatgccaccccttaccagccgggtaacccttggcacgttgaataacgtaacatgaacaattataatacctaacaatcgctaacattgatgtgatgtttcctgtggccaggcacagagccaggtgctttacatgtaactcatttaatccccaacaacccttgaagtaggtacagttatatccccattttgcagatcaggaaatgaaggcacaaagaaatcaaagttcttcctaaaggtcatgcagctggtggtggggagagctggatttgaacccaggcagggcagctgctcaccttcatgatgatgcatctgcatccatgtggctggcacagtgcctggcgccagaataagacctcttatcatgagcagctgtcaggactaataattcatgccaattaaggatgacataagctggcccccgagtgctgtgtgttcagtgtcactaattctccatcttcctggcagatttgggcatgtgagtgtggcacacctcctgttggatcacggggctgatgtcaatgcccagaaccggctgggggccagtgtgctcactgtggcttctcggggcggccacctgggtgtggtgaagctgctcctggaagccggtgcctttgtggaccatcaccacccttcaggcgagcaactggggttgggcggcagcagggatg

SEQ ID NO: 42387 - DNA, 2300 bp, Homo sapien
aaagggatgttggattttattgaaggccttttctgcatctattgagatgattatatggtttttgtttttgattctgtttatatggtgaatcacatgtattgatttgcgcatgttgagccaaccttgcattccagaaataaagcctacttgatcatggtgaattgactttttgatgtgctgctggattctgtttgtagtatgtcattgaggatttttgcagctatgtttttcaggaatattggcctgaagttttctttttttcgttgtgtctctgcaaagggcatgaacagacacttctcaaaagaagacatacaggcagccaacaaacatatgaaacaaatgcgcaacatcattaatcatcagagaaatgcaaatcaaaaccacaatgagatatcatctacaccagtcagaatgtcaattattaaaaagtcaaaaaacaataggtgctgctaaggctgtggagaaaatacactgttggtgggaatgcaaactagttcagccaccgtggaaagcagtttggagatttctcaaagaacttaaaatagaactatttgacccagcaaacctactaccaggtatatacccaaaggaaaataattcattctatcaaaaagacacctgtatattcattgcagtgccatttacaatagcaagggtatggaatcaacctaagtgcccatcaacagtagattggataaagaacatgtggtacagagccagatgtgatggctcacacctgtaatcctggcactttgggaggccacagcaggtgaatcacttgagctcaggactttgagaccagccggacaacatggtaaaaccctttctcaaccaaaaatacaaaaaattagccgggtgtggtggcacttgcctgcagtcctagctactcggtaggctgaggtgggaggattgcttgagcctgggaggcagaggttgtggtgagtagagattgcaccattgcactccagcctggatgacagagcaagaccctgtcaaaagagagagagagagagagagagagagggagaaagggagggagggagggaggaaggaagggggatagggagggagggagggaagagagggaaggaatgaaagaaatgtggtgcatatacacgatagaatatgatggaatactacggaatactatgcagccataagaatgaacgaaatcatgccctttgcagcaacatggataaagctggaggccattatcctaagcgacctaaaaagaacagaaaaccaaatactgcatgttctcacttataagtgggagctaaacattgagtacacatggacacaaagatgggaacaacaaacgctggggatcgctaggccagggagggatggaggggactctgggctgaagaacctcttggtgggtattatgcttactgcctgggtgacgggatcgttgggaccacaagcttcagcgtcgcgcaatttacccatgtaacaatttacccatgtaacaaacctgtaccctttaatctataataatagttgaaataaaaggtgggggagagagagagaacaggaggcgcttttagccccagcagcctggcccagatgaaggagcgacattaagggcaccgcaggacactgtgaggaaacaatccgttcgttccttaattcagccgcttccttattctagaagggcaggttcagtgccaggggctgcggtggggtcagcggagcccgctagtaaagtcaaggcccacgcagctgcggactcagacccgggcccagggccctgaccacagcgtgaagaggggatggcgtggccgctcccacctctgccctgacaggaagtttctggagccccgggacagggcggcgagagggcgccgaagaggcaaaagggaacacgcgggtctgcggcgggcgctcctctgagcgtccctggactcccgaatacgggcactggaggtgcgcagccccggccctagcgcgctcccggcacacagcaggcgcgcggccctagccccggcgcgctcccggcacacagtaggcgcgcggcgcgggcgggtggccggaagggggcgcctgcgggcggtatccgggggcggagccgacgcggccggcggggcggacgggagcgggccgcgcgtggcggcggcgatgggcgagggcgggctgcccccggccttccagctgctgctgcgcgcgtgtgaccagggcgacacggagacggcgcggcggctgctggagccgggggcggcggagccagccgagcgcggcgcggagccggaggcgggcgcggagccggcgggggccgaggtggccgggcccggggccgc

SEQ ID NO: 42388 - DNA, 2300 bp, Homo sapien
tgcccaacagtgagtggtgtggtgggaaatcctggactgtgagtcaggagacccagatacaaatcctccctctaccgcttgcatgttgtgtaaccttgggcaagttgcttcacttcttgagcctacatattctcatctgtcaaccttgcaaggttgtcatagggtgaaatgagaaagtacatgaaaaagaaagtccagcagtttacagcacacagtgtgtgctcagtaaacaatagcttttatctgttacctggggcttaagtccatgtcttgtaaggcctaattgcatttctcttttctctgtatctgaacctctattgagaagcattccaatttggcaagcggatccaagacattatgaattgtaatccttgtctgttttctaatctgaccgcagatcttaaatgtgttgggtgtctgaacagaggccaaagggctcaggtccagacctacctaacacaaccgccttctggcattaaccagcagcctccattctgcgtgggaagcaggcggggccctgagcactgtgggaagagccacttccctctagtctaatattagcagcaggttgtcctgagtgggagctgctttgcatggttcatcccaaaacccacccccctcctgcaacctgagggagatttcctctggggataccagtagccaaaggctgtatgaagacaacagcaagtcagattctacctctacctgagccgccaagttcaaggtcctctccccaccctgtgtctcagaccccgcatttatcaatgagataattggaccagatttgtgctttttaaactttctgggcttctggtctccttgagaatatttgataaaaagctttggaccaacttcccatggtaaaacaaacaacaacaaatagagcttacactctatccttctacaggggatacagaatgattcttttccctgagctagacaccagcagagggagttccagattaatttaagatatgatttgaaatctctgctatcacttttacattcagatatctgtgtagacattacttcatcagagaagctttccaaaacccccaaactagatcaagttctactattctaagcccttttagcgccctgtaattcttcttcaaaatacttaacacaattctaattatctttttaatatttgtctactccattagacttacttcgtccctggcagctcaaggctcccacagcagtgatctcatgaacagggcggcagcttcatggccttttttggttgttgtttaatagaaacaggatctcgctttgtcatccaggctgcagcgcagtggcgcatagttcacggtaacctccaattcctgggctcacacaatcctcctgcttcagcatcctgagtagctggcactataggcacgtgccaccatgcatggctaattctgaaatttttctgtagagatgggagtcttgctatgttgaccagtctcgttttaagctcctggcttcaagtgatcctcctatctcggcctgggattacaggtgtgaactatcatgtacagccttcatggccttttgctcctagcctcagaggtcacagagctatcacgaggcgagccaggcgagggtttgctattcaaggactccaaagagtatggcagaggctgggcctgcagaagtcagtggggcagcgtggtgtctgttgatctcatcgcacctccatctcctcatctgtaaaagggagctcgtaatcctagttgatggttgttttattggactgtgtaaagatcagatgagataatggcagtagaattcataacaccctgcagggtgtattcagccaacacttagcgcctacaatatgccaggcgctaagggttttaccaccactatctctttaataatgcaccatagcccaagaaggaagatgcaagtctcagccagcccacttgaagaccctgccgaaatgagccaccccgggggctgcgcttgggctggcgcggggctggacggaaagggggcggcgcgcaggtggggcgggccgggggcggggcggcacggcggttccgggatccgggtcctggcctccaccgccgccttggggcgcgcagatcgctggctgcagttggcgggcgcatgtgggggcgcacggcgcggcggcgctgcccgcgggaactgcggcgcggccgggaggcgctgttggtgctcctggcgctactggcgttggccgggctgggctcggtgctgcgggcgcagcgtggggccggggccggggctgccgagccgggacccccgcgcaccccgcgccccgggcggcgcgagccggtcatgccgcg

SEQ ID NO: 42389 - DNA, 2300 bp, Homo sapien
gttggtcaggctggtctcgaactcctggcctcaagtgatctgccggcctcagcctctgaaagtgctgggattacaggcatgagccatcatgcccggccctgttctgcttttttaatgttgaaatttctggccaggcgcggtggctcacacctgtaatcccagcactttgggaggccgaggtgggcggatcacaaggtcaggagattgagaccatcctggctaacatggtgaaacaccgtctctactaaaaatacaaaaacaaaattagccgggtgtggtggcaggcacttgtagtcccagctactcaggaggctgaggtgggagaatggcatgaacccgggaggcagagcttgcagtgagccgagatcgtgccaccgcactccagcctgggcaacagagcgagactccatctcaaaaaaaaaaaaagaaagaaatttctaatagtaaaataaaagaggaaaaaacaaatacttttgtatgctaagggctcttccctgacttttcatggggttcatcattcaggtctcatcctaaatgtcacttcctctaagtgcccctcccagattacctgtcctatagttgctctccttccccctccccactcctctgcttttcattttcatagtttcaaagttgttctctttcatcactctcctttccattttccatagcacaatcactttctgtaattcctgatttgtttgtttagttgattactgtccccctgaatatgagctgcatgggagcaggggcctggcctatctgacatgcggtaggtgctcgggaagtttttggtgactgactgataaagggcccagtagcacatgctgacatatggtagacagcagatgtcagtttccctcctcctcctgcctagtttggcatcttttctcctgtcctctttgatctgtcacttaactaatctgggaaggccttgccttagcaacccagggagcctagctggtctccagcatttcacccccttcttgagtatctagctgatctcttggcctagccttggccagcccccagcattcaaactttgtcccttctggtatccctgtggtttcactctcccaccttcccatcagctacttcccactgatagtctccaggcactgccccttagtcagtcccgtgacactgggaatttgtcatgtcactcaggatagaattctgtgtcaaccagggaaccttcagttcaaagtgacggcaaattgctaaacaaagagggagcttattggttctaatcactgccagtcaggcccactgctggagttgggtgggctcagccccaccccaccacatgactaccacatcttggggggcaggtggcagcggggatttgggggaggtaaccaatgtcctctgtagagtccttcctggagtgtctgtaggtcctagccacaattctagtttatgcatttgggacaccacctttgctaagcctagacagtattggatgctgggagagggtagggagtggtacagtggtacatgaggactcagaatactgtcagtggtgcatgctgagatggaggtgggccgggtgctggaggagcattgaggagacagcaactgcccaagatacgtggtcccaggcgtttcacaaaggagaacaggcctgagctgggagcttgccaagtacagaagggaggaaggggcattccaggcagagggaacagtctgagcaaaggcctgggagtgagactggggcagagtagacagaaaggagggcgatggggaaggaagacgtgccagttcccttccttctgattctgtctcgtttgtatgttgctcaaatcaaaaagttgcttgacagcttaaaacaatatcccacagtaaaagctaggtgggtgccatggttaggacctttcttggagtctgctggggctcctagtgccacaaggggagctctggaagatccttcagtggattatgtccccttccgcaggggaccatgacctatgtcccctttgtcactccatccccagtgccagcctgggctagatcctgagttcctgaagttccgctgtatttgcaggtgcaaagagaagaaatatgattatgataatttgcccaggacatctgttatcatagcattttataatgaagcctggtcaactctccttcggacagtttacagtgtccttgagacatccccggatatcctgctagaagaagtgatccttgtagatgactacagtgatagaggtgagtcccggccagggctctgggaagagcctgtccttctgtagcagtgtctgggaggtgagagtgggatgcaggagggctaaagt

SEQ ID NO: 42390 - DNA, 2300 bp, Homo sapien
acacaacaaataaatagcaggattagaatttatattctaattccaaagctgaccctttggtctgggtgcacctttgttcttaggagataagtatttcttgatgttaaggtgtttcattgtgattaaacctcttgcacttctgagaaattgaaatcatagagcgtttggtcagaatgtccatggatagaatcagagcatattaaagtcatgggactttttgttttaaagccctccgtggcccccagatctcccccatggtggtcacctgccagggctctgacacggctgcagacacctggaataagagaagcaggtctttctcagatgttcctccctcttattggaaggaagacaagaattcacccttgaatttcccaattgtcttcctgctgcccgtctgcataggagagacggatggatgtcttgggtgctttcaggatccatgaagaggagtcggcagtggtgtgcccggtgattgatgtgatcgactggaacaccttcgaatacctggggaactccggggagccccagatcggcggtttcgactggaggctggtgttcacgtggcacacagttcctgagagggagaggatacggatgcaatcccccgtcgatgtcatcaggtcaggagctgacttctgggtgacttgttttttaagcatgcctcattgaatctggctgacctgtgagcggaggccctcgggaggaatggttagctgtcagcttaactacctcccctcttcccacttttttgcccagagtatttgtttatttttattaaacgtgtctgctacacatgtcaattttatatcggtatattttatttatttaatttttaaattgtggtaaaatatacatcatagagaatttaccattttaaccattttgaagtatgcaattttaggctgagcatggtggctcatgcctataatcccagtactttgggaagccaaggtgggaggattgcttgagtccaggagtttgagaccagcctgggcaacatagcaagaacctatctctacaaaaaaataaaaattagctgagcatgctagtgtgtatctgtaggcctagctagctggaaggctgagataggaggatcgcttgagtcaaggagttcaaggctttagtgagctatgatcacgcaattgtactgcagccgggcgatagagtgacaccctgtctctataaaaaaataaataaataaaacaaagcatgcaattttagtggcatcgagcacattcacggtattgtgcaaacatgatctttacctatttccaggaatttttcatcatcccacacagaaaatatccccactaagcaataacttcccattctccccttcccagcccctgggaacctctgttctttcaggcgccccatgtgagtggaatcatacaatatttgtccttttgtacttggcttctttgacttatcatcatgttttcaagtttcctagagaacatcattccttgtgatggctgagtaatattcctttgtacatatatgctacattttgtttatccattcttctgttggtggacacttgggttgtcctttggttattgttaaataatgctgctatgaacatcggtgtacttttatctgcttgagtccctgttttccattcttttgggtatacacctaggagtgggattgctggtcatatgctcattcttgaggaaacatctttaggcccctttgacctggggtgtgggtggatccatggcaggtggaggagtctgctctggccagtgggtgagtcaagctctgagtagaatgggcccaagggaggctcagcagctctcattctggaggttttgaagtgatagcctggcttcttcctccccttccaagttcagaagcaagtgggagacagatgtgggagttgggcaggaggaggtcaggacttcagcctcaccgctggtgtgttgaaccggaagtaggctctgagttttgcgtccacatttggcagttgggcttctgaattctttcaccagagtcctgaccttaagatgacccgctgctggcaggagtggagcaagcaaggagagtgtccagagataaggctggagagatgggcggggccaagggaaggggtttggacttgaccctgagcaggtagaagccactgaagggatcggagcaggaagtgacctgagcatgtgctgcgtgccatgtggtgagggccctggggggaccgttgtaggcagggataccattaggaggctctgcagtcttccaggtcagaaacaatggttcaggagatggtgggcactgtggattccagagatgttaagatg

SEQ ID NO: 42391 - DNA, 2300 bp, Homo sapien
cgcctatagtcccagctacttggaaggctgaagaggagaatcacttgaacccgggaggcggaagttgcagtgagccaccattgcactccatcctgggtgacagagcggcactccatcctgggtgacagagcgacactccatctcaaacaaaaacaaaaaccaaaatcaaaaatgaaacaaaattgagcctatggctgccagttcacaatctctggttttaaaactgtcaaacagaaccctagatctactatgtagccataactgatgtggtttttctaagcagtatagaaatatagttctaagaaagtcaattatattcctagttaatgtggtactttacaaacaatagagaaatatagaattatgaaagcaaattccctatggttagtgaatcaaaataaaataaggttaggcccatcacagagtggctgcaagtgggagagaatttacattcacagggaatgtgaacagattaggaaagaggcctcaagtggacaattttgtcgggatgcagttcgccttatgtgttagctccacatgaggccaacctggttctcgagctgctttggctactggagcctcaatcccttaagaggttgatctagggtcccccctctgtcttgccagttgtccccctccacaggccgcagccccgatgagaatatccacaacctctaataatagaagccaaaatccaatggacagagagcactgtggtgtaccagtaggtggtcccatcaagggactcacagccaccattcaattcaaggtagttgtgtccattatccaggtggagaaataaaaaatcagaccaagggcaagatttgcccaacttcaccctgcagccagggccagcattggactggaacccagactcctgatctccaggccaaccatccctcctctgagccctcaccgcccaggctggcatgaaccctttcatatccgagtgctctgtgtctccactgcgattttgctcttgagggtggagagtgagtctaatcttcttgcttactggcaggcagcatggctgagtggggaggagcatgggtgttgcatctgccattcattagccttggaatgttttgaacctcagctttcttatctatgaaatggggatcatgacagtatcacctttccatggctgttgtgggtattaaatgagataacacagctaaagcatttagcagagggcttgggacataatccacaccaagtaagcattagttgcttatatccattcccatgccatctcctctgcaaggctaactcacttggcaagaggtgacccatcctctagagtggaactgaatcaaacacaggaactgaccacagagccacggcccactgtggctacttggtgcttcaggaagagaggtttctagtgtttacctggcttcagagctgtccaggtctcagccaacttcagcggtgcctcttctcactccaagatctcacactatgtgccgggtggtaatcttaataaaaagcgaccattgagggtttacccagtgccctgcgataagctctgcacagatgggttagtctgccctgaaccgcctcactcccactgagggctttcggaggcagagcctggttcatgacccccacatctcatcacagggcctggtgtgatgcctcacccaagactgtgctccttcattcatccagcgtttattggcatctcctactacctgagctgttttaggcagggaacaaagcacagataagccctcctggagcttacattctgatgaagggggcaggcaaggtatacatagggaggaaagccctggaatccagtacattaaaaacttttattaggattatctctgctgcatttagttgtatgtatcccttatggcccccaggcaggtccactcctgggcattcaagtcggtccatgtgtcaggcgtgcagggtgggtcacagcatctaggagctcagtgcagcttgggactttgggacatacgctccacctctctgagcctcagtctccttgtccatcatataaggaaatcactgattccagccttcctgggctgtggagaggattccctcagcggctgtgaaagagtgctttcttgcgggtcagccccgacaggacagacttaagggcgggagggagcccatcccgcttgccccaacgaacgcgggcgcggggctttcctcgcaggttacataaggcagccgcgggtggaggcagcagaggcgagcgcacgtccgtcgagggggaaaggggcgtggggaggcggccggggcggccggtatcccccgggcgtgagtgcgcagcgcgcggg

SEQ ID NO: 42392 - DNA, 2300 bp, Homo sapien
tccattctagtgtagtttatttatggatctgtggctcatggaaatttcctcctagtatcaggaagatacaacttaaaaatagtctgtttttccttcctattgtatccactgaattccacggaaaatgttaaggaactggaggtgtgattaacactgattaatctaggctccgtacgtcaaaggcacagactgacatgaacatacatgctgattagaatcatacagagctggaaggggatgggcaaagaaatggcattagctaaatatttactatgttccagacactgtaccagacacattacgtcatttaaggggcccaagacaagtgattcaatcccttttatttataaacggggtaggtactattattatttacattttagagatgaagaagctaatggccagagaaaaacagtcactttctgagatcattcattcattcatacaataaaaatctcattagctcttatcttatgaaagacattgcaaatagagcagcaaaaaggcagtctagggacctcaggtggcacaaagtccaccaaatctccattgaagaaactggaactgagagggcaaattgggactggagcctgccagaagccatctctctggaatccctcagcctgagcaagaggggagtttgctgctgaggctgctggagctgcggtgtagagcaagttgcaggcctctgagcctgttggaggttcagaaaggttagctgacttgcttaagtaagtgtcctagacaggagggagaaagcgcgcgggtctcagatcccagctccaatatccacgccttttcccttttcatctcccggaaggaagccttcacaggtggggaaaatgctcacccagtgactctaaagtagtgcacaaattggcattaatcagaaccattctgattcctgctatcaaggtttatttaattctaagctcaaatgacacagaaaataaaatttcctccttaaaaggttctgcggaaaaatattctctgttctacgtaacagcctccttggctgtgtttgtgtctgaagaaaggactagtctgacaggaagaattacaaatctggagctcattttggcgtcgcagagggaaggtgggtggagcgtctcgcagtaaattaggaattcagaatgaaaacgtagagtttatttgggtttttagtgacacctcaggattattatacagcagtgtcagacacagctcaaagtaatgatgactgctccccctccgccccgcgggagctgggtgctaagaagggggaacccctcctttgaggggttggggtggggatcctccctttccaacctggatcgggaaggggtttgagaggagtgcggcttggatccccatcctggatctgtgctggagggaggcgggaggctatttgggggtgtgtttgggctcaggatctgggtctgacgctgggatctgaggactttctgggtttggaactgggtgggggagctgggtttggggtgaccgctgggagcaggaggaaataggagagtgagtcgcatgtgaagggcactgaggagggatcttcgggggaatgctgaagttgatgcgtggacttggagaggggaagttgaagtggatgcaggggcctggcgctgcagcggatctgggtggcatgtgctgggattgccaatgcggagctgtgaatggggtcagggtggggctgaggcagtaccagatcttccgcgcctagaggaggttagaagaaaagagcgtcgaacggccacagcctttttccgaaagagactcacacagacacacccatcgctctacccggccctccggggctagcggctgagcggtgctggggctggcagaccccgcccccacgcggcctctcggagccgggagccgatcgggccggggctggggtctggcggcccagcccccggggagcgtggggcgtggccagaaaccggcgctcgcggctgcggattggctgcctggcgggcccgcaggcggggctcccggctgggtcccgcttggcagctcgcggcggcggggaggcggggccggcgggagcccggcagccaatggacgcgcgtcctccgagcagttacaaagggccggagcgaggccgccgcggcggctagggaggtggggcgaggcgaggtttgctggggtgaggcagcggcgcggccgggccgggccgggccacaggcggtggcggcgggaccatggaggcggcggtcgctgctccgcgtccccggctgctcctcctcgtgctggcggcggcggcggcggcggcggcggcgctgctcccgggggcgacgggtgagcgg

SEQ ID NO: 42393 - DNA, 2300 bp, Homo sapien
ctcaaacgacatatttgcagaagtacaaaaatattttaaaaaaaagaagtaaaaggatgttcattacaacactgatctattcacaaaaaactagtcacaacattagtgtcctttaaggagaatgtttaattatgacacacttaaacaaaagtggattttctggccactatgaagaatgaagtgaatctctaatattgatacataagaatgtcccggctgggcgcagtggctcatgcctgtaatcccagcactttgggaggccgaggtgggcggatcgcgaggtcaggagttcgagaccagcctggccaacatggtgaaaccccatctctactaaaaatagaaaaaattagccgggcgtggggcgcgcacctgtactcccagctactctggaggcggaggttgcagtgagccgagatcgcgccactgcactccagcctgggagacagagcaagactccgtttcaaaataaataaataaataaataaatttttgctgaaaaagatgcctaatagtaggtatgtcataataccaattatgtaccaataagaagatatagatatacctatgaaaagacacaggctggtgtcaccacaacttctgaaaaaatacaagagaaacttaacggtggctatcttcagggagtagaataggacggggcttttaggttacatccttctatactactaaatttttaatcgagtaaatgttactttttaaagtcatcttttttaggatggggaaaaatgcacgaaggaaagagtcaagaatagctacagggcagatccaggtggacattatttaccaaggtaaaaagcttgaacttttctccaaaaaccaatggggagccatgtacaagttttaataggggcatgatatattcagcttggcgtttttaacacatgacactgctgaggacggtgtggcctggctccgaacacaaggacagtgggatgcaaatggcctgaaaggagagtcaacaaaaataacaggtaagcgggaagacaacacgcgagttactcattagtaaaaggtgactgaagctgacttctaataccagcgtttctcagagccccaaagactatctacctcggaatcaccctatgacccagttaaaatgcagatgtctgggccccacctcagggcacctggatgaaaacttcctggaggatggaaccccagcaatctgcaactttaaatgggcccacactaaagttagagaaccacaggctcgctcacaaccctgacttctccatgtcagttccgatctttgcgaaccgcagacagggaaggtcttctctcaggggtcatgcccgcggccgccctccacggcgaggtccgcactcgcgcagccggccccgcggccgcctcacctggtcgcacactaccacgtcgaactcctcgtcggcgaggaacagcacgtagagcgccaggaaaaccatgcgcacgtaggcgcagacggcggcgccgcggccgccccagcccaggcctcgcggcagccagtccccggcacagcgcaccggtagctcgcggctctcggcgaaacagtggcccgggtcgtagtgcgctgtccagatcttcacgctacacccgcgcgcctgcagcgccagcgccgcgtccaacaccagccgctcagcgccgcccacgcccaggtctgggtggaggaacagcaccgacggcttgggaaccgagtcccgttcccggccctgctcctccgccatggccctggagccgcaactgcaccccgcaccctgatgggggtcttctgcgcaagctccgcgctcgtagctcccagctggccactgcgggccgaccccgccctgccgtacgtgcgtcagttaggccacatcagcgcaaatctgtgagggtctagtaactgcctgagaaaatatcttgtctgaccccggttatatttttccttcggtagggattggactttctgaaggacgttgtgatccaaaggaaggaggccggaggtctctacttcccatacagcaggtaactaagttgtctgtagcagactgtctacaggcatatcgtgagacgacccaggcgtccctggggtcagagaggaccttgcctgcaagtccgggggcggggcctgagtcagtctcgccagctgccggtctttcgggggctccgtaactttctatccgtccgcgtcagcgccttgccaccctcatctccaatatggtatggcggcccttccatgatccccgcctctcccagaagccctgactcctcctgctttgcgccgtgcttttcctctgtagctcccttgcttcccccagcctcgggtgtgg

SEQ ID NO: 42394 - DNA, 2300 bp, Homo sapien
aacaacttggttgcttgattccttccttcagtcattatttattgtgtcatgccttatggtgggtacctgggatagaaatgacttgagcaggttctctgttaaagtctaatgaaggagataaatatggaaacatcactggtcttataatgatatgaacaaaatgctatgggggcaaaagggaaaactagtagctactgctgcttacagacagagaaggcctcaagaggaaataacccctgagcttagtcttggaaaataagtagaaatttgccttgagatgagggagaaagtttgtgaattcagaaaacagtaatgggttcacgagtgctggatcataggacagcaaagaaagattaggctgaaggccgggcgcagtggctcacgcctgtaattccagcacttttggaggcagagacggaggatcacaaggtcaggagatcgagaccatcctggctaacatggtgaaaccccgtctctactaaaaatacaaaaaattagctgggtgtggtggcacgtgcctgcagtctcagctactcaggaggctgaggcaggagaattgcttgaactctggaggcaaaggctgtagtgagccgagatcgtgccactgcactccagcctgggcgacagagtgagattccatcccaaaaaaaaaaaaaggaaaaagaaaggttaggctgaaatgaccactaagagctttggtatccccccggttttttttttttgtttgtttgttttttttagttcagcaacaagtaacagaaactacgcagaagagtaacagcagagcgaacgatggactggaaagcaaacagcctgaagaaaagggttaagtagcaaatgcaaagcagtagaaagggaaaaggaaagagcttatgagaaagctttcaagcagagtttaaagtctggcatatgactagagagagaaagagcataagaaaaatccaagatgacgctgacgtttctggctctgagtaaatgagtgtacaacagtgccatatggaagtaaggagatataattgagagtgagagagctgagctgaaaagagactaagttttgtgtaggacgagttatctgtaggacagattgcttatggggccgccagatggaaatgtgagtgcaaacctcaggtccagagacaccagtttaatgacatcggttttctcaaagttatctctgactctattccagtttgttaactttccttttttaagagtagtgccctaaactgagcaacgagaaaaaaaatgtcgccttcctcccaaaaggcctttaactactcccacggccacgtcactagaagctcattttgcctttgtcaatcttcacatgctagggtctccaccccagaatcagcgaggttctgggtcctatctccgagtctggaagcgaacgaactgcagggttccttacctctgccggacagtggatcccgccgcccgggcggccactgctttgctgggagagcgccctgaggatcccacgttagtgccactgggggtcggaccaggctgtagagggagacaagcagacagacgggtgagcgcggcaggcctgccccagaaccccggcctagacacccacacccgaggctgggggaagcaagggagctacagaggaaaagcacggcgcaaagcaggaggagtcagggcttctgggagaggcggggatcatggaagggccgccataccatattggagatgagggtggcaaggcgctgacgcggacggatagaaagttacggagcccccgaaagaccggcagctggcgagactgactcaggccccgcccccggacttgcaggcaaggtcctctctgaccccagggacgcctgggtcgtctcacgatatgcctgtagacagtctgctacagacaacttagttacctgctgtatgggaagtagagacctccggcctccttcctttggatcacaacgtccttcagaaagtccaatccctaccgaaggaaaaatataaccggggtcagacaagatattttctcaggcagttactagaccctcacagatttgcgctgatgtggcctaactgacgcacgtacggcagggcggggtcggcccgcagtggccagctgggagctacgagcgcggagcttgcgcagaagacccccatcagggtgcggggtgcagttgcggctccagggccatggcggaggagcagggccgggaacgggactcggttcccaagccgtcggtgctgttcctccacccagacctgggcgtgggcggcgctgagcggctggtgttggacgcggcgctggcgctgcaggcgcgcgggtgtagcgt

SEQ ID NO: 42395 - DNA, 2300 bp, Homo sapien
tttgttgctaaacttcttattgggtctgagatgatatagtaggtacctttataatcccattcacagggggataaatatttaaagttgtgggttatgccatagagtagtattaatctatgtttgtacaaaatagtggctgtggatttcctaagttttgatttgaaatttttactggtgatcctgagaaccaaatgtttaacttgcatcttgggaatgatttaattgctacctatggaaaggcagtgaagttaagtatattaaaataacatcacccatactttagtgactcaggaggagcacctaatgctttttttttttttttttttttttttttttgaggcaaggcctcactctattgcccaggttggagtgccatggtgcagtttcggttcactgcagccttgacctcctgggctcaagcagtcctcccacttcagcctcctgagtagctgggactacaggtgtgcaccaccacaccaggctaattttattcattttttgtagagatgaggtctccctgtgttgcccaggctggtcgtgaactgggctcaagggattctcctaccttggcctctcaaagtgttgggattacaggcattagccactgcacctggtgcacctaatgcattcttgaaggatgtttcatcttaaggatataaatcgttagtgataatgattgtaagtgattgttacatttgcaaatctcaaagtccattgaagtttttactgtttcaacttctgtttgggaaagattattttacatttgtttaaagatttctgaagaggcaaaatttcagagaataatatttttataatactctgttagatctaagttaagactggaatgccattcaaattcaatggttaaaaggcataagaaaataaattcttatatcagactgcattatcaatatgccatttccttatttttaatgtcaaacttccttgccctgaaggaaaaaaattgaagcttgcagttgaccagccattccataacttggagtatgtttggtggcctttcttatgaaatagtaatggaaaaattccatagaaaatataaactcgtgtgtggatgaagtgagattatagagttacgaaattaatttttgtgcataacttgtggagctgatagccttaatttattattgtacttcataaatatactttatttcaggaaagaagaactaggtctggcagtagatcagaatctacctgttggggaaaaccagaaataggaagaagagttattaatggttcattcttggctgagaagaattcagtatggaataattaaggttagtttagagaaataatatatgattatgttaaggagttcacaaatattattgaaagtaaactggttaaaactgatttgttaatgtaaatggggccaataaaccaattagatgatctcgctactaaattgatgtgataatagaggatatctggagggaagtaaaatagatgataaggttagtggtaatgagacttcattaaatcctagtactaaagagatactgtgtacattagtgacagcttaattctataaataaaagttgatgttaagaattgatatggggcctgtggtgactcacacttgtaatcccagagacttgggagtctgaggtgggaggattgcttgaggccaagagttccagaccagcctgggcaacatagtgagacccccctctcattcactcataaataaatacataaatagcaagcccaatgtggtggtgagtgcctgtattcccagctacttagaaggctgagccaggaggatcgctggagcccaggagtttgaggctgcagtgagatatgattgccccactgtactctagcctgggggacagagcaagaccccatctctaaaataataataactgatacaatgttggcactgctgaaattaggcaggtattatttgtgtaaagagttgtaacaaaaggacttgattaaagagcccaggctccaaactcatttgaaattccaggtaaagtataagaataataattcatatttgtatgggactttataatactctgaatgttttcatatacaagatctcctttgattcttataagaactcagggtaatagtagtacaggtttggaggttctgagaggctaacagacttactgaagcaaatagggactaaatgacaggagtgggacttgaacccagggctccctaccaaaatgcttttgctcactgtgttgcttttttgtggttgctgtaacaaattactacaaactaggtcgcttaaagcaatagaaatttattctttaactcttttggag

SEQ ID NO: 42396 - DNA, 2300 bp, Homo sapien
gtgagggagcgggtgtgagcgcgtctgtgtatggggagcggaggaggagcaggagctggaggggtggggggcgggaggcaggagactccgctctcccggctgcgcgttcgctcgctctctcggcacgtcatttatgccacaggagccctagcggcctctccatagagtgcctggaatgcgagacgtcaatgtgacgccatgggacgctacgtcaccctcctcctccctcccctggcccagccggttccgcgtgtgcgagggagggtgtgtgtgttcgtgtgcgcgcgcgcgcgcgcgcgttcctcggccagtcgcacggccgcacaatggaaactccgccgcacggccggccccggcctgggggcttctctttttgcagcggaaccgctcgccagggcgtgcgtctgcgggagggtgcagcggcctgcccacgggtcaggcgggaccgcccagctgtcaggctcgggtggagtagagttggaggagtgctgctggcgcgcctccgaggctgccccgaggcacggagccagggcgaggggggtaagggagaggacagctcttccgaaagggaaggctccgccagccagcttctgaccagctccagtgacctggcagccggtgcagaaggcgtctggcaccagcccgaagacgccctgaggtgcagctgcactttcctcttgcataggttctaaagctgtttacgttgctccggtcctctgcgcccaggctaatcccccctccccgcatcatttactgggtgcgtgtttcacacagggatgcagatggttccggggataaggtttgatttctttacacgtacggcgtgggtttcttaactggacacgttataacccagcgaagtgcacatccatcatgcacacgcgcgctgcagcagaaactactctgtgtgtaaaacaaacacacacgtgttgaacagctgagcgggtctgactattgcaaatcattcctcctccccggcaccgggtcagaaatggaactctcaactagcactttcactttttgatggttgtagatgccctccgcccacatctcccaaattaaacatttcgaaatcaatcaacaggacttattagtcagtccctcgctaggggatttgctttggtctcctcggacacatttgtcatgaaatggtgtgccgaaagcctgggtgactgtatgaaggagagcaatttcttcctggaaatgataaatttaagtgtaaatttcttgatgaaaacaaaatttatcagagttaaagacccctagtcccaaaggttgctgctgagtgaacgcagtctctttcagaaatgaatttttggacaggagaaaatatttgagtgaaacaatgcagatagagtggtccccatgtggtccgcttgaatcacaaataccgttttatatgtttgacctgtcccaatttgtgtgtgtgtggcgggggcggggggcgctgcgccgaggggagatacaagattcctttgtagacagcacacatttcagaatcgaagaaggttcgagctaggaccagaaacttgaaaacaaactacatataggtaaatatggcatgtatatctttcttcgcctccacttccaattcagacacggtggtgcggagaggatcgtgggagaatgccccgaaagttgacccagccgagagcaaccgagtctctgcactgcggcgggttccaatccagcctcggaaggaaggagggcgctgctacattgtatccattcaaaggcttgaagggggggagcaggacctggagccgcgcggcgctgacgcacgcgaggcgcgtgattgacgcaggcgatgttactaaattcggcggttggccgggacccgccgccggcgcgcgccgcagatagcggagtaggttcccctcggtcacccccgccccttctccattcaacgccgcgcggggcggggcagggcgcgcggggcggggcggggcggggcggggagcgcgcggccgcgccaggatccggccgaaccaaatatagtcgggcctggctatttttagccgggtctcgggcgcgagcccgccgcgtgagggggcgccctgaccccgccgggagtgcggagggggcgggggcggagtcgccatcttggactcggttcgaccaggtctggtgaccggcgacgaggggccgggctcggcgccgggggtcggggtgagtgggtgcgagccgtgggagagagggggggcgctggcggctctcttcgtccggcgcgggctgtgagaagtgagcagggcgaggcgcgggcgacagcggggcgcgaggcccgtgcatgtgtgtgcgca

SEQ ID NO: 42397 - DNA, 2300 bp, Homo sapien
cagcccgcgccggacgaagagagccgccagcgccccccctctctcccacggctcgcacccactcaccccgacccccggcgccgagcccggcccctcgtcgccggtcaccagacctggtcgaaccgagtccaagatggcgactccgcccccgccccctccgcactcccggcggggtcagggcgccccctcacgcggcgggctcgcgcccgagacccggctaaaaatagccaggcccgactatatttggttcggccggatcctggcgcggccgcgcgctccccgccccgccccgccccgccccgcgcgccctgccccgccccgcgcggcgttgaatggagaaggggcgggggtgaccgaggggaacctactccgctatctgcggcgcgcgccggcggcgggtcccggccaaccgccgaatttagtaacatcgcctgcgtcaatcacgcgcctcgcgtgcgtcagcgccgcgcggctccaggtcctgctcccccccttcaagcctttgaatggatacaatgtagcagcgccctccttccttccgaggctggattggaacccgccgcagtgcagagactcggttgctctcggctgggtcaactttcggggcattctcccacgatcctctccgcaccaccgtgtctgaattggaagtggaggcgaagaaagatatacatgccatatttacctatatgtagtttgttttcaagtttctggtcctagctcgaaccttcttcgattctgaaatgtgtgctgtctacaaaggaatcttgtatctcccctcggcgcagcgccccccgcccccgccacacacacacaaattgggacaggtcaaacatataaaacggtatttgtgattcaagcggaccacatggggaccactctatctgcattgtttcactcaaatattttctcctgtccaaaaattcatttctgaaagagactgcgttcactcagcagcaacctttgggactaggggtctttaactctgataaattttgttttcatcaagaaatttacacttaaatttatcatttccaggaagaaattgctctccttcatacagtcacccaggctttcggcacaccatttcatgacaaatgtgtccgaggagaccaaagcaaatcccctagcgagggactgactaataagtcctgttgattgatttcgaaatgtttaatttgggagatgtgggcggagggcatctacaaccatcaaaaagtgaaagtgctagttgagagttccatttctgacccggtgccggggaggaggaatgatttgcaatagtcagacccgctcagctgttcaacacgtgtgtgtttgttttacacacagagtagtttctgctgcagcgcgcgtgtgcatgatggatgtgcacttcgctgggttataacgtgtccagttaagaaacccacgccgtacgtgtaaagaaatcaaaccttatccccggaaccatctgcatccctgtgtgaaacacgcacccagtaaatgatgcggggaggggggattagcctgggcgcagaggaccggagcaacgtaaacagctttagaacctatgcaagaggaaagtgcagctgcacctcagggcgtcttcgggctggtgccagacgccttctgcaccggctgccaggtcactggagctggtcagaagctggctggcggagccttccctttcggaagagctgtcctctcccttacccccctcgccctggctccgtgcctcggggcagcctcggaggcgcgccagcagcactcctccaactctactccacccgagcctgacagctgggcggtcccgcctgacccgtgggcaggccgctgcaccctcccgcagacgcacgccctggcgagcggttccgctgcaaaaagagaagcccccaggccggggccggccgtgcggcggagtttccattgtgcggccgtgcgactggccgaggaacgcgcgcgcgcgcgcgcgcacacgaacacacacaccctccctcgcacacgcggaaccggctgggccaggggagggaggaggagggtgacgtagcgtcccatggcgtcacattgacgtctcgcattccaggcactctatggagaggccgctagggctcctgtggcataaatgacgtgccgagagagcgagcgaacgcgcagccgggagagcggagtctcctgcctcccgccccccacccctccagctcctgctcctcctccgctccccatacacagacgcgctcacacccgctccctcactcgcacacacagacacaagcgcgcacacaggctccgcacacacacttcgctctcccgcgcgctca

SEQ ID NO: 42398 - DNA, 2300 bp, Homo sapien
agatgaccctcgtggccccgcgcacctcggaggtttttggtttggtttgatttggggtttttcggtccctgttcccactcttcgagctgcgcccaccccgggcaaagggggcgctataggccggagtttgggcacccagttccttccctgaggcctgctgagctgcgctttcagctacaaagtttcgctgaggctgtgggctgagacgctggtcccggagctgcgctcggcgccctcaggaatgtgcccccgctaggccgctgggtggccaggagcctccaagccgcccaccctcgaagacaccgccctctgggtgcaggggacctgcctccgctcgtcccatcagccgctaacgccgtccgcttcgtccccttgcttccagcgccagccttctcatcgctgtgcccttttgtttgcttgacccctggccctcgaaactcgcggctaatagaagcgaagctccattagcatttagaatgaaaagcgcagactttcttaattcctcggggcattcatgcattcgttccggaccttgtgcatttcctatgcaacgtgtaaaatttgtatttgaggggtgggggcgggcggagctggaaaatggcttttttccgctggtgaacactcactgaccccccgtattcgggcggagctcgttcctcaagtgttctgctttctttggttttcctgacttcgtaagctcggaatcaattgtgggggcagagagatcaatttctgggcaataacaggctgcgcgttttttttttagcctcggttttggtgccacaaaacggtggtaggcgcagtgggttccaacaacctttcctcggcttccccgaggccgtgtgatgcttcttgcccagggggactcctgtaccattaatcacccttaattttacgataattctttgtaattaatgtaacatttctagaggttgccaaccaattcccccagtccccaatgcgcccagcccgggccgtagtgacccatcctggtctcactgtgacctatgtcctctttcaccttgcctgtagagcccactgcggaagagggcagcccggcaagcccgggccctgagcctggacccttagcggtgccgggcagcactgccggcgcttcgcctcgccggacgtccgctcctcctacactctcagcctccgctggagagacccccagccccaccattcagcgcgcaagataccctccaggtaggtccgaaggcaagacccttttctcctccctggctgagggaagtgggtgggggaaccacacactcggcgggcagcgtggtcgacctgcccagtgccaggacagtgactgctggccgcgaatttcacaacacaggtggcttcctcacaggaagctcctctgtataccacaccctgttgctactgagtggagcagccaaattaaattaagcttgcattgctcaaaattaattttcctaagagaaatacaaatacaccaatagattagggtattttatacatttttaatttcatttttgctcttcttttatagccagtgtgcacatgtaagagttatggaatcacttagagcaatactgagcattttcatttatataaaacccaaatcatttgggtgcagaagtttggatgattgaagctcagagggaaggagaaaagcatttgagatgaaaaccaaagagtaaatttgagtttggcaaaagaacagattgcacttttggtttgtaccacctctttacaaatttgttaaaggaatactaggtgccaagcctgtgtgggcaccatagataatgcagataaatagaatacaatcccagcaagctcatcttctagctagaaacctcagaaagacacaaataagagcagtaaaaagggattggccggaaagaatgacagaaaagagtaatggagaaatcctagaggtgctgaagggagaaggagaatagatcaaagatcaggcagtgttctttcttttaaatgattagcctttcatttcatcccaacaactggacagcaagataagtaactggacttcaaactagtgagtgtatttttaaggccctgcttgttaaagaaaggcttgaactggcctctcctcatcactgcttcttccaacaggccctcatcaccttttttcaagtcaagatttcatcccatacatgcatgactcaatcagatttggaaatgtgggtaagagaaagatgtcaaaggaaatgtgaagtattcacttctctattagtcacaccttttacaccatagactccaaagaggcgttaagcacctggttttcctttggctcagaaaaaccaaccacc

SEQ ID NO: 42399 - DNA, 2300 bp, Homo sapien
gccaccatacccagctacgttttttttgttttttttagaaatggggtctcactattttgcccaggttggtcttgaatttctagcctcaagcaatcctccctcattggcctcccaaagtgctgagattataggcatgagccatcacgcccagtcttcttctcattacattttaaaattgatgattgttgtttaggagaggtattttatagccatcttattgaattagtttcagtttattccatggattttccaagaaagcaatcaatcataacaccctaagaattttttttaattttctttccaacatatacacttaatgttttgtttggacttgctgggttcagttaggacttcaggaaaatgtcggccagtagtagcaggcctgcccctaacaacttgatgacctagagtacacaaaagaggtccacacaccatatgtttgaatatttaaagattataaatcaagctaaccaacagttagattaaaaggttttggtcgggcatggtggctcacacctgtaatcccagtactttgggaggccgaggcgggcggatcacgaggtcaggagatcaagaccatcctggctaacatggtgaaactctgtctctattaaaaatacaaaaaattagccgggcatgttggcacacgcctgtagtcccagctactcaggaggctgacacaggataatcgcttgaatctgggaggtggaggttgcagtgagctgagatcatgccactgcactccagcctgggcgaaagagcaagactctgtctaaaaaaaaaaaaaaaaaaaaaatgtttatcctactactttgacacacctaacttacagcaaacatacatataacaacttagaagtccaggtccaaatttagaatctttgagtaccacacctcctgattttgtacctgaggaagctttttcagaacttaacacaaatgatcttttatttcaaaagatcttatttcactgatccttgcataaaaaacattttctcacagtattgcctaatactttaatttttctccttagaatcaaaatttgataaatacattctggagctcattgtaaaacaaatatcagtatacattatgtccccaaagaaaatccaaattgcttggtagatttggtgctttgttttagaaattgtctttcaaggctttttaaaggatctacaggcccctaatcttccctgtttacctcctactctactggaagaccctaagaactcagtttccttaactgtggtttgaacatcctgatcacttctgagacaatgccattagtgaatacattctaagcacgtcatctgaatattcacagacatctttttaaaagggctggatctggaagttaggccatgaagagaggaggacctgtgacttggacaaggcttcaaagccggccacctgcttgttcatgtggttgcagctggtctaactggaataacttgggaaggaaattaggacacccagttggagttccagctctgccataagctggctgaactggagtgagtcacttaaaactctttgttaaaccccagagtcataatctataaaatcgggataaagacgtttgccttaagccctccaccagtttttggaggaaaccacaatttgctgagctttaatttttacacctgttgcaattaagatggcactcctgccctgtccacttcacagggcttttggggacgggatggggaggcaccacctttctgagcttcagtttcaaaacagagctaagaatacatgcccaacccgcaaataaaattctaggaagaacagaggaaaacggacaggaaaactgcgaaatgcagtcggccatacaagcatgaattgtcttaaacacaacaagcagacctaaagagcgtttgtgcgtctctctcctcttggctcgagtcacaaccccataacgtaaatcaatatcacttttgaaaaaggctttcgctgttctcagcagcgtccgcatttgtactcacctgtgcgcccccagcgcccggcctgggggccctgcggggcgggggcgggggcgggggcggggcccaaccctgcccacccctcgtgatgccccgccccgtcgctcctgcgcctgcgccgtgcccaccgaccggcctcgagcgccccggcgggaggtaaggggctctctggaggccgcctttgggggcgtcgggccctcacaggcttggtgggcctggcgcccgtgtggcgcgcgcaagaggcgctgggcggcaagtagggcattggatccgaagtgcgagcgccatggtggctcctcctgtttttcagaagtggcgg

SEQ ID NO: 42400 - DNA, 2300 bp, Homo sapien
ctatcagggctgaggcacagaaaacacaagatgagcctggggcatcctatggtaccagaaaattaggaagttccaaaaaagaaaaaaaaggatggaagcatgctgaaaagctacagaaagcaacctgaaagaaaactcccaatgatcaaagctggaacaatttcaaacataaaataacacaagtgtaggataacaaccaatagaaaaacatctaagtccacatggatacaaataaataacggaatacaaataaacaaatgggaaatgggcagctcatccttacagaataatttcaattaataaagaaatgaggaaagtagaaaatcatcattagaacaccatagtcataataattgctgaaggcaagatccaccaatggatgtgaaatttagcaagggaaagtctgaggagaaacaggatatgcgtacggtttaaaagctcccccccaagatgtcaattataaggagaaaaataagacctttacattggagaatcccagcagacactctctaccaagtgatcaagattaacctcacgagcaataagtcatatatatcagctatgctcatatgatgaactgagaagggcacacacacttttgtgttcttaacaaaaatgtataaccttaatctaatcatgagagaacactggacaaaccccatttgaggggcactctacaaaataactgaccagcattcttcaaaagtgtaaagatcagaaagagtataaagacagaaaaagactatcagtgtaaagacaggaaaagacagaggaactgtcacagactggaggagaccaaggacccaagacaactaactgcaatgtcgggtcttagagtggatcctagaatagaaaaaggacattaatacaggaaaaaaaatcacaagttagtaattcagttaatagtattatactaatattaacttcttgcttttgataattgcgctatggtatgtaaaaaattattaatggaggcaatagggaactctgtattacttttgaaacttttctgtaattttaaaattatttcaaaataaaaaagttttttagtataagaggatgtttcacgtaagacaggtaaaaacatttagaagtcaaagaactgccatcgtattcactgcattaatacttggagagaggggtgccaggactgtgccaggtgctttacaaactttatcatgtagtgcttacaactaatatgagatgggtaccataatactcatgtttcccagtaagttacttaggaggttattaataagtgaaagaccccatttctcaggaaacccagcccccaaaagtgacgaacaccttccatcggcccagagctcccacttttcaggatactagtggcgcccgatttcttccggcccgccgcttaatgtttctgacttatggaagagataccgaatttggagagaaaagtcaaagtaaagtctcctctctgaacctcggttagctaaaaggagggagccaaggtgtgggaccttctgccaaccacctctgggtttggcgagcaggggcttccggcctctcgctcccagtcctccgagcctcactaccatcgagcgtcgcgtcattcctcgcagtgtcacccacagcacacctgggccacacacaccaaacgcccccaccagcgaacggatgcgcgggtctgtcccgggacccagacgccagcgaccctggcgacccggggcctacagcgcgccagagacaggacgcgcgccggaaacttttccaccccgcgaccccgggaggccgtcctgctcgcatcgtctgcggcctccctataccagcttccaataaagcttccaaaaacgaaaccaagcgaggctccgccacttctgaaaaacaggaggagccaccatggcgctcgcacttcggatccaatgccctacttgccgcccagcgcctcttgcgcgcgccacacgggcgccaggcccaccaagcctgtgagggcccgacgcccccaaaggcggcctccagagagccccttacctcccgccggggcgctcgaggccggtcggtgggcacggcgcaggcgcaggagcgacggggcggggcatcacgaggggtgggcagggttgggccccgcccccgcccccgcccccgccccgcagggcccccaggccgggcgctgggggcgcacaggtgagtacaaatgcggacgctgctgagaacagcgaaagcctttttcaaaagtgatattgatttacgttatggggttgtgactcgagccaagaggagagagacgcacaaacgctctttaggtctgcttgttgtgtttaagacaattcatgctt

SEQ ID NO: 42401 - DNA, 2300 bp, Homo sapien
attgctttgtcagtcttttatgtctcatttttttaatgattcttgttctttaatgttttgcaatttcccttccatgtatttaggcaaatttggtttctttttaatgtatgctacttgaggctgatgtgctttttcagtttgaggtcttacattttaattatcagtatattctctttgaataattccttcttactgttttctttgttctttctttctgggacttctacttgttattaagcttctgattttatcctttatgtcttttatcttcttttttatacttttcatctttttattcctctgtgttctgagtgatttcttccaatcaataattgtttcttatctatataatttactgtttaacacatcttttgagattttcatttctagaagttttacttgttttatattcaggctggcctcttactgtttcataatatctatttttttaaaagattctgttcctttttggaatagaatgtttttggatatttaaaaatatacttactttagtttctttttaaaattattttattatctttcgtccattaggtatgaattttcctgttttgttgggtctgtggatggtctcttttggtaatgaatttctccatatgtccccagtttccattcactgttgcacctgttttaccctctttgtttttgtacctggagattttcctttttgacttttgagccttgtatcaaacataaaaaccaagttactaatgggtaggtattggaggcagtctatataaccaacacatcaagattttcaactgtgaaagaaaggggataaatatttaatgttttggggatgatagatctctgagaatcccttgaaacaatggactctattctccaaaataaactatattcactttttttttctttttttttttttgtagagatgggattttggcatgttgcccaggctggccatgaactcctgggctcaagtggtcctcccgccttggcctcccaaagtgctggtattacagacatgagccaccgtacccggccccttcattcacaatttttcataaagattcagtggctccacaaagtctgtatgtgaattcctatctttatagaccctggactaagacagcataactcagcagtattaacatactcaacttaaaattttttaaacatgggtgaggttgtggctaatgaaatggcatgaaagcatggtgtacaatggtggctttcaagcttggttaagctgtgaagcccattatttatataagctctgataagctccaattcataaaatagttgtaagtaaagtttctacaactgaagtagggagtggagtcctggaacctactcacctctagcccctacgcttgtactctggccccaaatgcatacccttggactttctggaacactagtaggaaactactggtgaagtggaaaaagtatttcaatgtaatttcagaaaatctgggttcttattccagctctgtcactggttttttgaatcagttgtaggcaatactaatcactttattgaaaatggaagaggcagtttaaagcacatcaatgagaaaagttgcatattatgttatcatatatttgaagttgtgtaattacaaagttacattatgatgacattagacatgaagtttgatacaagcatcagtgttaagccatttgataccttttttaaaaaggttattcaatgtccaagatagatcagaaaatgaaaacttggacagtatactcctagcttttttaaaagtatttatatacatacatacctacttacatagaaaaagacctggagagacgtatgccaaaatgtaaagagtacattttgtactctttgtaaaaggtgaggagatgactgctgactttatttaattcttcatttatttatattgtctgaacattctaaaatataatttttgtaaagagaaaaagatttaaaaatcagtggtttcataaagaaaaaaacaagtcactcaaggtcagcattagaaatattctatttattgatttagaataaattgtaaaactaatcgttggcttttaaaaatagtggaaacagatttgaaaacattcttaaagaaatatttttcttttaggtttttctatatgagtggagaagacagctgttaccagggaggtcatacaacatttttttaggatgtctgaagatgaagaaaaagtgaaattacgccgtcttgaaccagctatccagaaattcattaagatagtaatcccaacagacctggaaaggttaagaaagcaccagataaatattgagaaggtgagctgtttcatttact

SEQ ID NO: 42402 - DNA, 2300 bp, Homo sapien
acaaaatgcttagattttagttaaatctagattctatttgggaaaaaactcatatttaacaagattaggtttttctataaaaagcatgagttattccaaaataaattatttcttcttcataacttagctttacaaccaaaccataccatttgaggaaagtgcatctgatatagtttgcctgttcagtgtctcaacttttctttacaatatcttaagatttttgccctttttttttgatttcctaaaagtgcacacaattcataactcaagccattttgtggataagattagtatccagtcttcttaaggagagagtggtctctaataatggtattattctaacacttctagaaggaaaaatgtatcacagtgtataatgaaatcaccaagaaacaacactatacagaatattttcctcgatacagaagtcattcactgttgtatacttataagaagtggcaataagacactctatcatttaatattacaatgtttatacacaactttttgttctcaaaagtactttgacatgccatttagttttttacagtgctttttccgaaaaggtccaagtgacaaaagaaaagaaagaactatttcaaacacaaatattaaacatttaatgggatatggcggaataagcactggaagtcaagagacttgtttctaatcccagctctgcctgtaactagctgtgtgacttcatatgcgtcactaaatcgtttcttaaattgtaaagaaagtagttcttaatgtttaaatctgaatttctaaaaatctactacaattaaggtactttcaaatattacattataattaacagcccaattaaatataagccattttgccatacgtgtttagtccttcgcttttgtctcaatttgacctgaagcctggatcaattagtctgcacactcaagacgtactctggggcaagagggactagggaaagattcttttaagatgggatgatgctgagcaggttaggcagttaggaatgaatgcatattcaaataaggcgcaatgaagaagaaatctgcttccatggggaaatacgttgcaataagatttgagggaggccttgagctgagattgtcaggtaaccacaccttccacccttcaaactctattctcccagtggaatccaaaccagtctccagttccgggttcccaaccaatcgcatcaagccacaacagagggatctgccaacccgggcaccgcttcagggatctagacccagtgagagtcacacaaccccagcacctgtcgacctcacactcttcccaaatggagagggtgggaaggaacgctaggtctatgcttggtcttttccgattcaagctaccaccaggtccactagccctcgaaaccgaaacccccggacttcggggagaaggggaagctcctacgccgtgactacgtatcagtccctcagggctaattctcccattctcccccgacactggtttctcaggcctcggggactccgcgcctggaagccgacaggcgagagtgagggcagcgggggagggtgcactccaaaacactgcaggaaaagacggaaaagcaggggcaggagtagcagtgttccccctgggcgagggccggaggccgttcgtgcgtttgtcgatgggtctgtcattccctcactcaccaggagcagaagggagcatctgaggtcgggtaaggataggaagacggcaggatgcatggtaacgctggggtccgtgacagggacaggcgctggcggctgggactgggctaggttgggttgggttaggaaagggctgggctccgggagccgacggcagcggaggattctccaggcagcggcacctcgtcctctcgacccgggctccagcggcgaacacccgggacaacttccagagaggcctctcacaccctcacttccgggtcctgcccacctcggtgcacttcgggaaatgtagtcctgcactagcctcaccccgcacgtcgtccgtcatctagaacttcctttcccattgggctctcggccccggtccactgagtcctctgcgcgcggggtcctgtgggatagaagggcggagggcgggtgtacgcggtgcttcagaggatgggaactacaattcccagaaggatgtgcggccgaaagcctcgggcggccttttgaggggctcggctagcttcagcgccgtggggtctgacctggctggatatagtgtaccggcccggcaggaggggcggcccggtccgggttgcgcctcctggagccgcccccgggacgtcagtcctggaggaggcgagggtgagtaggagg

SEQ ID NO: 42403 - DNA, 2300 bp, Homo sapien
aaaaaaagttctttataccctttgaaaaatacactaaaaatgtgatctctgttttatatatatgtgtgtgtgtgtatatattatacatatataaattatatatacacatatataatatatataatatatatacatataatatatatattatatatacatatatattatatatataatatatattatatatataatatatatgtatatatattatatatattatatatatacatataatatatatacatatataatatatattatatatacatatataatatatatattatatatacatatattatatatatattatatatacatatattatatatattatatatacatatattatatatataatatatattatatatacatatattatatatattatatgtacatataatatatatattatatgtacatataatatatatattatatgtacatatataatatatatattatatgtacatatataatatatatattatatatacatatataatatatatattatatatacatatattatatatattatatgtacatatattatatatattatatatatatactttttacttcataattcttagcacttagcacagtaacaggtatatagccagtactcagtagatgtttgttggatgaaaggtcacaggctgagtgctaagtccaaaaagtgagcaggatcaaagtttaatttcttgaataatgagttcatacttacaagtctctgctcttttaaaatttcccatttcaactatctttgggctctgtcaggggcgtggacaagagataggagcactagtctaggagttaggccgccttggtaagagtattggctctatcactgtctaattttgtcaccctgagaaagccattatgcagggctctttttttttcttaagaaaaaatgtattttttgcccctttaagaaaataaatcattttttatagaaaaaagtcaaaaccactttgataaagtgctataaaatgcaaaggtgtcatcatccttgcctaattatacaacaagcccgtgtaataaatgctctaataattataaccgtacaaaactagaggtactgcagtcacactcataggaagagtaattctgattaggactaaagggttggttgttcgggaagttctcagagatggtgacatttaagatagcattccagagagagaacgggtaaggccattccaggcagcaggaaagctgaagcaaaggcgggagcagggagaaccacaaaagcacagtgtgcctcctgggtactaagcagagatcgcgtgggctcctggacctcactgagtgtttgcagaagaagccgcagagctacctggggccaagttaggatcctcgactgctttgctagggaatttcgtaattatactggaggagcgatccacgccttagcagcaatcactcacacagttttccagtttacgacgtgctatcccatcccgtaccacatctactccttacaggagccctcagagacaatcagggataagtcattgactcattcaactgaggccccgagtggtggctctgactttataatgcaggaattagagcagaaagaagaggcagcgggcgaggaggccaatgatggaggctcaggccacagcctaggccaggaaggccgtgagtctgcagcaggggccaaggcggtgcggaccgaatgatctgagcctccccagccaggccccctcctactcaccctcgcctcctccaggactgacgtcccgggggcggctccaggaggcgcaacccggaccgggccgcccctcctgccgggccggtacactatatccagccaggtcagaccccacggcgctgaagctagccgagcccctcaaaaggccgcccgaggctttcggccgcacatccttctgggaattgtagttcccatcctctgaagcaccgcgtacacccgccctccgcccttctatcccacaggaccccgcgcgcagaggactcagtggaccggggccgagagcccaatgggaaaggaagttctagatgacggacgacgtgcggggtgaggctagtgcaggactacatttcccgaagtgcaccgaggtgggcaggacccggaagtgagggtgtgagaggcctctctggaagttgtcccgggtgttcgccgctggagcccgggtcgagaggacgaggtgccgctgcctggagaatcctccgctgccgtcggctcccggagcccagccctttcctaacccaacccaacctagcccagtcccagccgccagcgcctgtccctgtcacggacccca

SEQ ID NO: 42404 - DNA, 2300 bp, Homo sapien
caaagtgctgggattataggcgtcagccactgggcccagcccaagtgactttaaaacatagtaaatttgactctgcagtcctggtaggaaacatcctaaggacaaagacagctacaaagaaatcctaaaatgtgttcagtaaacatactgttagtaataatactgttactgttatcttgacacaacacaaataagtggatcactatataaaggtaagatgaagcaagtgaatatgtcaatttcattagtaaccaagattttcaataagaagtatacaaatataaactattgatatatgtgtctgctaaaaatttatatttctgaatttcatagcactagctactgaaaaagcctagaagtaatgactaaccccatgaaggatcacctccatcacccagattgtgtctctcaataccactaaaaggaatcagaactccttagagaagtggctgcttagaaattgggacaagtaatatatgaaatgagcctggctcatctggtcatgctggatggcaagatatctaacaaagcctactggagtcatgtcaaagggccacagaagccgtgttaaaggagcttccaaagatggacaatttgagtagcaaaaatacagttgcttcaatggaaacaaacatgttaaaactccatgagttaggaatactttttttttttttttttttttgagacagggtctcactctgtctctcagtctggagtgcagtggtgcggtctcggctcactgctacctctgtctcctgggttcaagcaattctccagcctaagcctcccaagtagctgggtttaaaagcatgagtcactgcacctggctattttttttgtatttttggtagagatggggttttgccatgttgcccaaagtggtctctaattcctgacctcaaatgatctgcctgcctcagcctcccaaggtgctagtgtatttaaaatacagttgtttttatgtgtttcagtttaacttcccctccttcccatccttattgatttaactttttcaaaagttgaaactacatgaaaagataggtttacaagtttcagtcacttccatgtcctgtctgtctcattttccctgtcttttgaggacaatcaactatattgatttctggtttacccttcatatgtttcatatatgtatgtttccttgttgcctctttttcttctaatatatgctcttgtgcttcagatagtattaagatttttaaaccagataaaaaaggaagaaaaaagcagtaaaagtttacatgttccttgactctagattctgtgactagaaatggaccttataaaccactcaaactaatatatatgtatatatacatatatatatatacacacacacacatatatatatagggatattcattcatcattgtttataatggcaaaatacaggtaaattattcattgttaaatataatctatttttcatacagtggaatactttttagccactttaaaaaattaatctatatgtactatcatggaaagatctccagggtatactgttaactgaaaaaaaagctagctgcagaagaatatgtatagtagaaacctgtttttataaataaataatttttaaaataaccacagttatacatatgtatcatatagattgcaaaaatttaaagaaatagtaaaaatttcttttttttctttttttttttttttgaggcagagtctcacactgttgcccaggctggagtgcagtggcacaatctcggctcactgcaagctccgcctcctgggttcacgccattctcctgcctcagcctcccaagtagctgggactacaggcgcctgccaccacgcctggctaattttttttgtatttttagtagagacggggtttcaccgtgttagccaggatggtctcgatctcctggcctcgtgatccgcccgcctcggcctcccaaagtgctgggattacagcgtgagccaccgtgcccggccaagaaatagcagaaatgtcttatagtggtattatgagaaaactcatagtttaaattataggaaaacattttcacaagaggcatgcattattttagtctgaaaaaagttcaaaaacagactttttaaaaattctaaattttattttgagccagactttcctgccacccttcaatggtgacaattccttgcaattcctgcagttccttacatgttttattttctttgaaatttaactgagtttcagatctttggcttcaaagaggagactaaatcctgttttccttcatttcccaaatcatttttcattatctcctacaacaaaatgctacctt

SEQ ID NO: 42405 - DNA, 2300 bp, Homo sapien
gatatgtgcctttttggtcttttttgaacttttaaatgacatgaaaatacatatactgaatgtataaaaaaacatttatgtagtttaaaaggtaattataaactgaacctccatttaaccaaccccaggttcggatatagaatatcatcagcacatatactgttaatgtaccctgcacagttaaatgtcttctacgtacccctctgccccagatcacttggtgttgatcaacttcattaccttaaaaaaaaaaatggttttatgtgcatttgtgaacagtatcaggtttgttttgcatatttgtggattttttgtaatgggaattatactgcatgtattttttgtgatttgattctctcagcattgcttttgagattgattgaagttgactcattcagctgtatttcattcgtttttatttctccataccagggttcagcaaagttctttctataaagggttagttagtaaatattttaggttttgcagaccattaggtctctgtcatggctactcagcactaccacggtagtgtgaaagcatcaatagataatatgtaaataaatgagtataattgtgttccagtaaaactatttacaaatacttaccatgggctggatttggcctgtggccatagtttgctcagtctgctctatagtattctgttacatgcatgtaccataacttagccattttattgtcagcattcaaattttttccagtaagagtatgtgcatagaaaaaaattgtgtatttcactttaaatatactataaaatttatgcataacataaattcgacgatagttttcttatacatcatcaaacattaggtctgacaggtcaagaaaaggctttataagtagcaaggaacttctcagggttctagagattttataagatccccacttaatgaaatgtgtgtgtattgctatttgttatttcctgtcacttgaagtatggcccctaaaacaacttcatgcaaagtttcaaagatctattgtagtttcttatagagaaacatcctttgacttcatgtggctggaatgaacaaaattaagtgtgtgtaatacttgtttgcctgtttaaaatgcccagttgtaggggtattctatactgggtactggaaaggttaacattactaggatattaggcacagttggcagccgaagtcttaggtacctaaaattcccatttgggctatttcttccccactggagaaggtgtttataagattacaaaatgatgaaaatgctaatcaaattactggggagcctttgatttcacaagtgctggccagaaagttaggtttgaccgagttgagttgtttagtactgtctgctgtgccttgaagatactgttctattgtctccttgcctcagtgttaactaatgaaaaaatctgctgttagtctgagccctcttagtttgtaggtagtaatcttacaggtagtaatctatatttttactgttctctctttatcttcagtgtgttgcagatcaggatgtgtcctagtgtagatttgttatttatcctgccctagacatagtgtgcttctgtaatgtgaagattcagttttttttcttcaagtctggaaagttattattaatttttaaccatcttcccccattgtttctattttcttctaaaaactccttttaaacatagggagctttttattctgtcttcgtctcttaaaaatctttcaatttgctaattcttttacttaatcctcctactgagattttatttcatcaacttttgttttcttttggatttgtttctattttggatttttatttggtattttgtcattttcgcgtgttcttggtttattggtgtttctttaaagttcttgttagttccattagctcctttttcctgcggtgtcggcattctcccttattttagggagcaagttgaacagacttgtatattttgggctgcataccttttccctaagtgtgtcttttgtgggagttctgtggaggtttatagagacttccctgtaggatagtttgacatttgcattttcctggcttcccattctgtgcaaggagcatagttcaaactccctgccttccatacctgggttctgaagcctcagcttccagtactgttgactgttgaaaatccttgccctaaaatcccacatacagtttttatgactgttggatatctttatatgaatttcattatagtttctttcacctagaggttttacccatctggccttgagcttggctgtcttttttttttaaggtctgtggttatttgaaatccactcaaattaagaaaagta

SEQ ID NO: 42406 - DNA, 2300 bp, Homo sapien
atcatacacaattgtaaaacactcagaactgtgcctggtacatggttaaatacgtatgctcaaagcataaacatgtgcgtgtccctcaagtctcaggatcaggacataccaagcccggtactagatgcattgtgtacctcagtatacaatctgcacagaaccatgcaaggtaggtggaactaaacccattttaacaatgtacctcagaaaagtttggaagtcacgcctttatcaagaagttgaaaagggattcattcacagaactgagctctgcaaaaccacctttaacataccagaattaacctgaagactggaagtcttcgtggcaaaacagtttggcttatttcatttgtccctattaccaaattttcatctcacccacacctctagttaccttagtcttaaaaaacaaaacaaaacaaaaaaaaaagctgggggtcggtgggtgggtgggtgggagggaataaggcctaaaaagaaggccatgatactcacctggcctcttttaatacaaaaatggttttcattaattaagcaagcacactttgtgagcttttcctacaattttattactagctggtactagacacgaaagtaaatggtacaggacattcagaaaaattaactcccttcctcctccactcctgtgggttctatttagccattaaccacctgatagatcttcaacagtctactgtcaacttcatgccatattatctatcgctttgtattagtcacattaatgctttctctgttaggaaaattaagaaggctgattgaccttccttgacttttcaaacctagtaatattattacgggatacaaagcattttcatgcgaagaactctcaaagttctactagtaattgactttaacttataacaaagattttcataacacagcaaatcaaaaagtcccactaagccacttttacagtagccggtttttagcaaaaggtaggaacgccagtctcagaggaggagctcacatcactagtccttaggtttgcgatccccaatagtttcaaagctgaatgtcacacattcctactgtaggtcttttctaattccaacaaaaggcagatcctagcgtttttaggatttcaatcgaactaaattccaactataaatagtttgcctgccaccttcttacccttcctcatttccaccttcttttccaaaaaaaatcagagagaacgatcgtactgcactcggcctttgataatttcctccccaaacccttaaactcatgagttcctccaaactccactgaggggccaaccagaggcgacagacttcccaaaaagcaaatggcccaggcaggggcgaccccagaaaactggtagtccccttccgctcgcttaactctcccgcctgggcgaccagaggacggaacaggggacgccagctcatccccactccgtattcggtcctgcatccatcccagaggcgaacacaccatgggttttaggaaaccatcgttcctcctactccaagggacgccggccaggaccagagtcggggaagtggggcccgattcacacactccgggctaaaactctctcggacccgaaaccaggcgaacccgcccagtcacctgaagctccgcaaacgccctagggggtcccgcccccgcagtgccggccgcacacccaggcccagctcggagggacgccgcggcccagacccgggggacgcaaatcgtgcacggccgaccctgcccgcttgggccgcggatcggggggcgacggccccaccacgctcagtcccgcgccccgggaggacccggcccgacgggcgacggccgcttacctgaggacccggccgcggccggggcgagaagcccgagaagacaagcgagggagcagaagcccacggggcaacagcgtgcgccgccgacctcaggctctagctcccggagcgtgttttcaaatagcctcgtcctcacgcggccgcgtctccttccgccgcccggaaatcagggcccctccccctccctgctgtgctcacgtgatcgcagcccgcagccgcgcgcaaccggggaggcgggagcgggagcggtaggccccgcccacagaggagggtaccccgccggaagccccctgctctgtgggaaccggagggaggacagcgcgaggtccccggacaaagcgtggcgcataagtccggcccgtaacttggtgggcaggcaacttaggggatgtgggcctggttatagctgagcatgcttttctattcctcccagaccacagttcttcagacctggagccactttcagagaagagtataagttgcactgaa

SEQ ID NO: 42407 - DNA, 2300 bp, Homo sapien
gagtgtgtcactggtgtttgaggaaggcaaagaagcaagtgtgactggagcagagtaaaaaaggggagagtggaaggaggagtgctcagatggtaagagactgtgtcagaatatggaagagcttgagaactgatatggtttggatatttgtccctgctcaaatctcatgttgtgttgtaatcctcaatgctggaggtggggcctggtgggacatgcttgggtcatgggggtggatccctcatggcttggtgcttgtttagtgatagtgagttctcatcagatttggctgtttaaaaatgtgtggcacctctctctctctctgtctcttttcttttgctctctctcttgctcctgctttcaacatgtgacatgcctgttcccccttcaccttctatgattgaaagctccctgagacttcaccaaaagcaagcagatgccaacataatgcttcctgtaaagccagcagaatcatgagccaattaaacctcttttctttgtaaattacccagtctcaggtatttctttatagccatgcaagaacagcctaagggaaggccctagaaaggactctgggttttactcgaagtgaaatagggagccattaaagggttttgagccaaagagtgatctgatctaacctagatcttaaaataatcacacagctgctctgctgataccagactgtagggggaagaaggacaataagggaagcaggaagatgtgtttgcaggctttttgcagtgatcaagaagcggcttggaccagaatggtagcaggggaggtgtgttaactggtgaaagttaggatgtctttaaaggtagagtcaatctccagatggattagatgtgaggtgtggaacaaagaggccaaaccaaaaacccaaaggtttctgcttgagtaactgcaaggacagacttactatttgagatgaataagctgtaggaagagtagatttcaaggggaaaatcatcagtagctctgttttggacaagttgaccttgagatgtatactggatatctgaaggaaacattgaaaaaactgttggatacaagtttggagttccagggacttgtctggttggcaataaatctttcctcttctgatctagtctcatagctttaaacagaatataatgccacataatgccaatgactcccaaatatttatggttatggtcgattccaggcagattgtggtgatgtggccatattgccagcaaagggaggtcagggtttctagcgctgcctctttatctccgattatggaacaggcatggttttagttccagtgcttgggtctccctggatttagacatcattcctttgaattcccacccaatataatgagggtcaatatcttcgctagctttactaagtcttaattatctggtgaggtgtagacacaaatttgaatcaaggtctgaagtccttacctggggctctttcttccatgccatcatgccagtctttgtgaagacatttttcaaaggctcattcttcttacctcttttctaggaattttagtttatttctttacttaacttcagaaattaatttctcacttcattttagtagcaggaatgttagtgctgagaaactgagatgttagggagaatccttgaccaagacttccaggctctagatactaggtgtgtcttgctctaattaaggaaatcttatctgctccatcttagcccagtttaacgtccccaggaattccatcttctgcagtcctaaacttttccctttttcaattcagtgcaacttatactcttctctgaaagtggctccaggtctgaagaactgtggtctgggaggaatagaaaagcatgctcagctataaccaggcccacatcccctaagttgcctgcccaccaagttacgggccggacttatgcgccacgctttgtccggggacctcgcgctgtcctccctccggttcccacagagcagggggcttccggcggggtaccctcctctgtgggcggggcctaccgctcccgctcccgcctccccggttgcgcgcggctgcgggctgcgatcacgtgagcacagcagggagggggaggggccctgatttccgggcggcggaaggagacgcggccgcgtgaggacgaggctatttgaaaacacgctccgggagctagagcctgaggtcggcggcgcacgctgttgccccgtgggcttctgctccctcgcttgtcttctcgggcttctcgccccggccgcggccgggtcctcaggtaagcggccgtcgcccgtcgggccgggtcctcccggggcgcgggactgagcgtggt

SEQ ID NO: 42408 - DNA, 2300 bp, Homo sapien
tatcaatcaaatttccaatctgaattgaccttccaatgtcacaccccaatagttttcccttgaccgtatctgcatgtaagaagggaatcttcatggacttataatatggcactaagtggaaaacaagtgtaaatgatgtacagccttggctttcggtgtggtatcatagcttgtttgctagcacattgtagcaactcccctggtataattttagtttccaggctctctggacaatttcaaggcctcctggacatcagacaaattattgttaaaataatgaatgagatgcctgtaatcccagcactttgggagactgaggtgggcagatcacttgaggtcaggagttcgagaccagcctggccaacatggcgaaatcctgtctctactaaaattacaaaaattatccaggagtggtggcacatgcctatagtcccagctacttgggaggctgaggcaggagaattgcttgaacccgggaagcggaggttgcagtgagccaagattgcaccattgcactccagcagactctgtctcaaaaaaaaaaaaaaaaaaagaaaagaaaaagaatgaggaccagtatagctcttagtttagggtctttatttttattggtgcttctgccctggattgttttttgagggaagaaagaaagggttgcgtgattctttgtacatagtgaaaacctagatcagtttttactttagggctatggatagtgggagttgggagggcaagcaatagtctcaaaaatgttcaaggaattaaaacacaaaaacggaaaattgcaagtgttgacaaggttgtggaaacttggaaccctcaaacattggtgatgggaatgtaaaatgattcattcagctgctgtggaaaactttttggcagttcctggaaaagttaaacatagaattaccctatgacccagaaagtccactcctaggtatgtatccaaaagaactgggaacaggtactcaaatatgtgtacaggcatgttcagagcagcactattcacaatagccaaaaggtggaagtaacccaaatatctatcaagggatgaatgaataaacaaattataatatacacatacaatgggatattaatcagccataaaaaggaatgaagtactgatccacgcctcaacatggatgaatcttaaatacaggctaagtcaaagaaacgacacaaaaggccgcatattgtatggttgcatttatatgaaatacccagaaaaaagtaaactcacagagatagaaaatagctgagtcgttgccagggtctggaggaaggagggactggggaattactgcttaatggagtatggatgtttcagaactagatagaagtggttgctcaacattatgaatgtaataaatgccaccaaatcgttcgcttttaagtggtttatgttatgcgaatttcacctcaaaaaaaaaaaaagttaaaaagccttctctgcctttctctggggttggagtcttcccaatggatccagggcaaaagaaacatccagccactctgtttgcgggaggagcaaagggtggcttgtcccgacagtttgagctgttgtgcatgcatttacacacgcattaattccaaatgagtcagcacagtgtccgagacaggtcctgggctccagtgagcacagtcgctctcctgggggaggcacgttccacaaattaacagaagttctgataaactcagcatagggggattcgctgtcccaagtatcaaggagtcctaaaagaaaagggcctatttcagtcgggggacctggactgaactaactcgtgttcatggccgccaaatcccgtgtgacaaatgtattcttttgttgttcatagaaataaaacagtttttcgggccgcttcaggagctcctctgcaaaggtggggaaaaaaggcaactaaatcagcacgaggacgtcagcccgaggatgtcaggagcggggtcggtgcggacgggcaggtgggcgggggggcaccccgcgccccgccccagtcccctggaggccggcggccgcagctcggggaagtggggactggcgcggggccgcgctcccgccctcctcggcggcgccgacggaccggcaggcggcgggcggtccgcgagggggcggcggcgtccgggctttgtggccgcggcgcgcgcggcggggcctggccggccgggggcgcgccgccgccgccgccgccgcccggcgttcgggagcccgcggccctcccggccgccctgcttgcgagaggagcccaggccgcccgccctcgcgcctcgccggcccctcccccggtcgccgcggctgccgc

SEQ ID NO: 42409 - DNA, 2300 bp, Homo sapien
gctttctgtgattgaaagatatgggaatagcgtgcagtcctaaaacacacataggtttcatacacttcactggaagaagacattcactaagcacctgttgtgtgaaacatgctgacccggcactgtagaggatgacaaagtgacttatgggaatcatggttgaatcatttggagtgacccaaggcaagaggccgagaaacagctgtggaatgattctaagaataccagactcctagggcagtccaagctctggactttctatgtcaccatctttgtgatcttgtgcaatccacttcacctttctgaccctttcttctctcagctggaaagagacttgaggaatgtaaagagggacactggactcagtctcttaagtgcctaggccctttcacatctgaaattacatacattgtttacttaggattttaaaaaacagcccgcatacctgaaggatcacagactccaacccctcattttaaagatgaaaaaactgaggttgccattgctccaggtacatgccacagagtgatgaaaacgtcaaatttttttttttttttttttgagacagtgtctcctttgtcatccaggctggagtgcggtggtgcaaacatggctcactgtagcctcgacctcctgggctcaagcagtcctcctacctcagcctcccaagtagctgggattacaggtgcatgccaccacacctggctatttttttttcttctttttcttccctttttttttttttttttttttttttttagagacagggttttgccttgttgcccatgctagtctcgaactcctgggctcaagcaatttacctacctcagcctcccaaagtgctgggattacaggtgtgagccactgtgcccggctgtacatcttttttttttttttttttttttgagatggagtctcactctgtcacccaggctggattgcagtggcacgatcttggctcactgcaacctccacctcccgggttcaagtagttctcctgcctcagcctcctgactagctgggattacaggcgcacgccaccacgcccagctaatttttgtatttttagtagagatggggtttcaccatgctggtcaggctggtctggaactcctgacctcgtggtccgcctgcctcagcctcccacatcatattttatatttgagtacacggtggcttcttttgtcctcagctgtgacaaaagttttggaaagctgtttagttctaaaactggctaacatgatttgggggaataatcagttccctaatattaaagaaaaatcaattaacaaatcagagtctaggccgggcgtggtggctcacgcctgtaatcccagcactttgggaggccgaggcaggcagatcacttgaggtcagtagttcgagaccagcctgcccaacatggtgaaaccctgtctctaccaaaactacaaaaaaaaaattagccgggcgtggtgacaggcacctgtaatcccagctactcaggaggctgaggcaggagaattgcctgaacccgggaggtggaggttgcagtgagctcaggtcgtgccactgcactccagcctgggtgacaagagcgagactccgtttcaaaaaaaaaatgttcaacttttctttttttgctgttatataccagatagtcacagtatagccacaacaatccactttgaaataaaaccccattcctagtacatttctaaatattctccagagtcctgaatatcataattcaaccttaatggaaaagaaagtactgtatttcagacaagggaatcaagtcaggaattaagcttcagtgatttataggcattgtttttgctggagttggtaatcattgcttcaaacttccttttacaggatagctagcggccaggagaaatacagtggaaaatgcaaaacaacgaaattataaagcctgccaaatacttctcagaattggaaaagagcatcctgctggctttagtagaaaagtataaatatgtgctggaatgtaagaaaagtgatgcgcgaactattgcccttaagcagcgtacctggcaggcgctggcccacgaatacaactctcagcccagcgtgtccctgcgggatttcaaacagctgaagaagtgctgggagaacatcaaggctcggaccaaaaaaattatggcccatgaaaggagagagaaagtgaaacggagcgtcagccctctcctgagtacccacgtcctagggaaggagaagatcgccagcatgctgccggagcagctctacttcctgcagagccccccggaggaggagcccgaataccaccccgacgcctc

SEQ ID NO: 42410 - DNA, 2300 bp, Homo sapien
cacattatatatattctagaaaaatagggttttcctattactcatcagtatcctgctttttccatgtcagtaaacgctaacctaattatcatcattgttaaagctgcataatactccattgtactaagaggtaccgtactttagtccccactgatggacatttaagttataaaggctgtgatgaacatcctaatgtatacatttttgtgtgcttatccagttatcctttagataaattccaataaatggaattgctaaagagtaaacatattttaaaggttttttgatacatagtcaaattgccctcctaaaatgtataaattagtagtgctcagtctgccaattcttttaactcttgttaatcatccaaagggaaaataattgtgtgtgcgtgtgtgtgtgtgatggagtttcgctcttgttgcccaagctggagtgaaatagtgcaatctctgctcactgcaacctctacctcccgggttcaagcgattctcctgcctcagcctcctaagtagctgggattataggcgttacaggtgcgcgccaccatgcctggctaattttttctatttttagtagaaacggggtttcaccatgttagccaggttggtttcgaactcctgccctcaggtgatccgcccacctcggcctctaaaagtgctgggattacaggtgtgagccactgcccctggccagagttttgtggttttaatcttttattactagtgggttcaaatctgttttcatgtatttattgtctgtactttttgtgaataagagtcaagcttcctatttttctattatgttaactttttcttcttgacatataactttatattaagtatattgtctcatatttgcactgaagacatttttcctaatgtggctttgcttgcggtggcttttcacacatttcttaattttatgaatcaaattgatcagtttttcaatgagacttaaaattccttctggggtgggatgcaatataatagaatgaaaaaggcagaggactttcacacaattcagtccatgatcttagtacctatgtctagttatcacctagcaggatgtggtaggaagagcactggactgggagtcagatcaccttgcctctctgggtccctacttcctcatctgtagaatggagataagaacgaaaactccctccgaggcctgtaaaaaaataattgaagagaatgcacataaagagctttcaccaggccttgtatattagaaaatcctctctgaatctcagcttttgttagggggagagggcaacacagacttttgtaaaactattttcactcacttgtatgtgagtctacgggaatgaggtggggatgaggaacctagaaatctaaccattcacccaacatctctgagaactgcatggctagagtcagaacttgggctcccatcctggtcctgcccatttcttggtatgcaaccttggacaagtcacctttacctcttccgtgactcagtttcttccacctaaaaactattatagatatatgacagaccacctgccctcattcccagccctgctgctgggcgaaggaaacgcttcaaaaacagctcacaaagggcggcaaacaagtctgctacggtgcagcctaccgccgaggggtggccccaaccccggcccccgcgcccctgccctgtcgcaggaacaatagctcccctggaggcggcgccggccgcggccgggggcggagctgtcggcgcgggagctgggggtgtgcgcggggcggggtcgcagccacccctcccgccggcggctccgtcacgcgcccctcaccgggcgggccggggtctttgtgacgcggtggcaacggccacggacacaaagggaaggcgaggaggcgagcaagaggctgggcctgcctccggcccgcgacccccgcccgccgcgcgcgcgcccgcccgctcccctcgccgcggtgtcccccacgccggctcgcaccctcgcgcgcacccttgcgcgcccgcgaccctcgcacgcgcccggacccgccgactccgtcccgagcgccgcgggcccgggcctggcggacgctgcgggtggggcggggatgctgacgggctgctccccggctcagcggcgcggctgctaggaggcaccgaggcagcggcggggctctgggcgcgcggctggatgcccccggcctgcggctccctgcgcttcccgccgtccaggggcaccagtcatgggcgccgcagccgctgaggcgccgctccggctgcctgccgcgcctccgctcgccttctgctgctacacgtcggtgcttctgctcttc

SEQ ID NO: 42411 - DNA, 2300 bp, Homo sapien
gaagaggtctagcttcatccttttgtgtgtggatatccagttagcaccatttgttgaagaaacagttctttccccattgagttatcttagcacccttgtcaaaaccaattgaccatagatgtatgggtttatttctaggctctccattctcttccatgatccacatacctgcccactgcttgtttttttttgtttgctggaaagcgtagagcccaatgtgaaatgtactgggaagtgtctaggaacctcagggactggattggtagacttgcagcacccctggatttccctgtttccctcctcccacatttcttttttgttgttttaatgtgtgctttgcgataagctgcctcaaattcttttcttaatgagttgtgggacattcataaatactgtttttatacttcaaatgttttattaatcagttctcactgaaggctggctaatttatacatttcactgctgtcagcttaaaaatgtaaattgtctgttaagtgtcttaaatatttctccctgtcaaattatcatcagctgatgcagttgtctttttatctacttttaattggaattcagataatttccaagattagcacctacagcttacctccttgactgcttgacattgtttctgttattaataacttattttcatcttccccttgcatcttacatgtttatattttatacactgaaaagtgtcttgaatataatttggtgctatgttcagaggactgtaaatgtttatacctattttttcaatagtcttaattttcaggtacttagccctaaggaataacactaaatatagaaaagcgcatattcaccaagatgtttaccacatctaatttataattgtgaaaaattgaaaataactgacatgtcttagaactgggaatagataatgctagctatattatagtcactggatggagtattatatttctgttttgaaattatatgtatctattttgaaaaaaatgctaagagagtagattttaagtgttctcaccacagacatgataactatatgaggtaatgcatatgttaattagcttgatttagccattccacaatgtctatacatttccaaatatcatgttgtacatcagtggtccccaacctttttgttgccagggactagttccgtacaagacagtttttccatggactggggattgggggtgggggtgatggtttggggatgattcaagtgcattacatttattgtgcactttatttctattattattacatggtaatacttaatgaaataattatacaactcaccataatgtagaattggtgggagctctgagcttgtttttcctgcaattagacagtcccatctgggggtgatgggggacggtgacagatccttaggcattagattcacataaggagcactcaacctagatcccttgtgtgcgcagctcacaatagggtttgcgctcctatgagaatctaatgccagtgctgatctgacaggaggcggagcttgggtggtaatgtgagtgatggggagtagctgtaaatacaaagaagctttgcttacttgcccaccactcacctcctgctgtgtggcctggttcctaacaggccatggaccaatatctgtccatggcccgggagttgggggggatccctgttgtacatgataaatatacgtaattttatttgtcaatttttaagcaaatttaatttaaaaagtgaaaaaaaggagtaaatctttgtggctttagattaggcaataatttcttagatatgacaccaaaagcaaaagcaacaataacaaaaaaagatatacattaacaatattcagcaactttaaaattaatgtgatataacttaggtgaaagacgcaccatgtaggcatatcagaaagacagtagggaaacatacaaatgacatttttcccccagatggtaggaaagtgcatgatatcctattcctgtttaaattttattactattttgtattttttaatgtaaaagcttgggagtatcaaaatttgtaattttcataggaatatatatatttttccttttcagatgtgaatctggctacactggacagcactgtgaaaagacagactttagtattctctatgtagtgccaagtaggcaaaagctcactcatgttcttattgcagcaattattggagctgtacagattgccatcatagtagcaattgtaatgtgcataacaaggtaggtaatgatgtaagaaatatcaactttaaattagaggcaggcaactgtttatttatagatgctttgaggccaccagtctattaggaaaaa

SEQ ID NO: 42412 - DNA, 2300 bp, Homo sapien
ttctgtggtttgccccaggagggtgtggacagcttcttttgagtcattgtctaaaatcagtagacattcctatgtattcatagctgaggttaataagcacacttcttcctgatttctcccttcatctaagctcttcttgtcattttagagctgtcttctcataatgcacagggaaagtacataggccagagtcctttctcctgtcaggggtttcatgttatcagtcactgtgactagggagtttctaggctggaggaagggtgggatatctgtcagggatgcatacatagtagcatagacactggtaatgagttttgcttgtgccagtacctatattacatatctaatcctctcaacttccaggtttgtagaggaggtagcagtctgaattgtgttcatcttcatcttgtcttgcaacagataccatctcatttccctttcatgtaattgcttgcaatgtggctttatgtgcaaaatgtgtattactttggaaacatttgaaatatcctgaacaaaatcatcaaaacaatatttttctctctttctttttttaatgcaacagaaaatgccccaaaaacaatagaggacgtcgacagaagcaaaacctaggtcattttacttcagatacgtcatccagaatggtttaaactgatgacttttatatgtacactgaccatgtgatgtacatttattatgtctttttttaaagaatggaaatatttatttcagaggccttatttttggacatttttagtgtagtactgttggctcgtatttagaatattcagctacgacagttttggactgtttagtagtctttgttttatgtttttaaatacagaaattgctttcacaaatttgtaccacatggtaattctaagacttgttctttacccatggaatgtaatatttttgcaaagatggactacttcacaaatggttataaagtcatatccacttcttccacaatgaccacagcaaatgaccaagcatgaactaaaggtaaagatgtttacagattacttttcttacaaaaaaaatctagaagacactgtgtttaaatagatatttaaatgtttttgagatttagtaactgattttttagacactgcctatcgcatgaactgtaaagctgtgtgtattaggtgtaaaatatttataagatatatggactggggaatttgattattcctccctttgaaaaaatagtcctaataatttgaacaaatatgttagtaatgatggaacagatcaatgaaaagtagatatagatattgtgaaaataggctgtttaacaaacagattggaataaagcctattctaccagttaaactactttaatacacattcatttttaaagaaaatgtttgttttaacataaataaacaaatcgtatcagtgtttgtgaataaaatacaaaaatgattgttaatgattggtgctcttaaagtgagcttaaaatttatccaagacgtatatccaaatttgtcctgtagtaatagattaatattcatagattgttggtgtttaaagatctgaagtgtgagtagaatgtattcagctgtttaacatgtagtttagatattcaaaagtatgcatgtagaatttaaagaatatgttaaaaattattaattttaatattttgtttggaaaagcatgttataatataatgttttcactatatggcctctgttttggtgtgtttatttaccaaattttttgatattggtgtttcagtatatttaatatgtgaaattagtagaaaaagcagatttcggttcagaattcccctttactgttacaaatactgattgaaattatctaaaggcaaaagctttacccaacatttggagtttgcttttttgatcatttggcttctaggtttaatattagttacatggtggctttagtgaacttttttaaaaagctttactcttctacccacacagtcttatttgagtcccttagtcagtcagcaagcatgtttggaacagtccccggtgctttgcaagggttcagattgcagaacagtcacatatgggtatttgtagttataaatacttgaccgttctctaggggtggggtttccaactctttaaacaaccctgttgcctgttatcaagctgactttttgctccaagtgccagaattgattgtggttaggacatcttacgctgagaaataaataaaatggaacataatgggtctgcttcaaatgctgataaaatccaccagaatcgcctgtcgagtgttacagaagatgaagaccaagacgctgctcttaccattgtgactgtgct

SEQ ID NO: 42413 - DNA, 2300 bp, Homo sapien
gttggagctactttctgctttgagatggcgaacaggtccatctgcttagagatggtccctaagcattgaggggagtggtatccctttccctctcacccaaggccaggctcagatagagtgggcttcttggccaggcaaccctggatacttatcattgtaggaggaagtgccttagaattgtctcctattgagtgaactgtaaaccccagcccctcttagttcatgaattcaaagccgtcactcaccttgtgcttacgcaccagggcaaagagaatggctatcttgcctcaaggaagcaattggccctaccaatactaacaccttgcaattctagtgaacactgtttactgttctgaggggaacgtgacaacaaggcagatctatcttggatgccttccaagaagccgagcaccaaagggaagtcctgatataaacaggcatggaaggaggagctccaaataccctacatggttcactatagaggctttgctgctcttcaggagaacctgatctcccctacctggtggatggagacttactctcacttgtcctttaagcaaagagatgctgcaattctacttctttcaaggatctactgagaaaataaacctgccactacacccagggcactttctctttttaagaactttcctttttttctctccttcctctaagtctgttctcctaaacttttgttggtggtatttagacatgctgtttttttctcctctgggtgtgctctaggatttgatctaattgtcctgctgttcgagtgtcacttggcattattattgggaagatgaatggtatgtgggtcagagttcagcaagaaggcatctgctcgcttccactgtaaagtggaaatgcttagaggtgatctttaatgaaagcttggaaaagatttgcacaaggcaggctgtcctctattcctccaaagcagaggggaccaaaggttatccttttctggagggacagaaaatgaataaaaaggaggtagaaatctctttacagggagtttcctgcttgggatgtcttttcttctgtaggaaagaaaatggggtgtggtgtgtggggagacagaacgattaaacagggaagagattgaaaatagaagctcttgaatggatcctaaccattctgttttgctcacagaacaatctgatccaagaagtttccactctacttgcaacgactctcacctgccatctcccctggcctcaggttactgtgccatagcaggctcaggttctcttactggactctcttcgagttgacagttctcccactttaccaaatagccagaggcctcacaaagacctagaattgcgttggcattctaggcaaggggacaatgaacccattgttcttttttttttttttttttgccttcttaaatagggcaaatatctcttccatttacccctatcatcaaaggaggcttagtatggggtcctcagagactcaccttccttccactcctcctttgttgtttggaagagttatcgctagcccccttctcgccctcgccccattaaagctgttgtgggacccgactggacgttgccttttcttgctcttaaaggagtggaagttgggaggggaagaaagaagcacacaccaggaaactcattttagttcggggcgacctgcagcctgtggttcctcctggacctctggggagacgcatctcggttgcccgcagggtagaaagcaagagaatggcccacaggaacgcccgcgccagcgctaaaaccacaccgggagaggacagccccacgttaccgaggactcgaggcagaagcggtctccaaggatgggtggggatcccaccactggcttccagctctgcatgcgccgcggagtccccgcgcagggcgcacctttgcggcggggtttccccgctgccttctgggaaccccgcggagcgactgccgctggacgcaatctggctggcttgcctctaccccgagctcactctctctgctctgtctgggctctggagccagagctgagtctctcttgagcatgcgcagcccggcaccctccccgcctctcccctcctccgccccctccgcgccagccttttgctctttcctttcattaaacaaacaggagatcctgaaacctggaccctgtgcaagctgcagcgccaggaggaggcagcggaggaagcagagcgcgggatgggcgcccagcggcatctgtgatcccgcgcacctccgccccacgggcgcgcgcacaaacacggacacacacatacacacactcgcgcacacactcgcacaaacacacactcgtac

SEQ ID NO: 42414 - DNA, 2300 bp, Homo sapien
caatgagatatcatttcacgcccagtagaatagctataataaaaaagataaacaataaaaatgtcaatgacagtgtggagaaatgggaactctcatacattgctggtgggaatgtaaaatgatatagctactttggaaaacgttttagtagtgctgttaaaaaattaaacataatttaacgtatgacccagcaactctcttaggtgtctaatatccatgagaaatgaaaatataaatccacacaaagaattgcacacagatgttattagcatggttttccataatattgaatacaaccaaatactggatatagccaaaaattcaaaacaatctaaatgtctaccaactggtaaaagtgcaatagccatacaatggaatattattcggcagttaaaaggaaaaaaattactgaatgtgcaacaacatgaatgaatctcaaaaatatgctacgtgaagaaatgcagaaataagaggtcgtgtattatattattctattcatttaaaatatccagaaaaggcaaatctgtagagtcagaaagcagattacctggctttgggatatggtgaaggagttgatggtgggaattaacagtaaatagacatgataattcttttaggggtgattaaaaagttctaaaactatcttatgggaaagttgcacaatttggtaaatttatttaaaatattgaattgtacacttaaaatgagtgaattggtatatataaaatatacctcactgtagttactcccgtctctttgtgtgtgtgtgtgtgtgtgtgtgtgtgtgtgtgtagccatatacatataaaaagcttggttgcattttggaccagaaaaatgaaaatagaggggaattttgtatcctaaagcttgtcttatattctccactttattgttattctttattaattacatggagaagccatctaaaacactaggtgtttgatgcctttgctttttctcgtgcctctgccttcttgaacatgattaatatttaattttcttttcagatatacaacactgtatttggctgatgctaacaggaaagttcatttatatcataaatactaagtaaattctaagatatttgggttaagtaagggcaaaattaaaatggttgtccattttaaaatgatggttatccaatcaattcaatgtgttttctacatatagattcctttcttattgtagaaaataacatcctaaaatataatggtgaaataacacatgtagtatgggtatgattttataacagaaaatatccaattttaattgaaaaaaattaagttgcctaaaacttaaatactgtggttggtatggatttataaagcacataatattaaatttgatcagagaaacttttaattgacaagtgaggagttgatatctcaaaagggaaggatatgtattttaaagtttcattctggaaaagggcagaaagaaacttaggaaggatagaaatgaagacattaaaattaatgtctgaccttttaaaaagtacagctggccattcaaatagactggtacttcctatgttacctttcatactgtaatcaaaatctacaagaactgttggtagggatgacagagaaacagaacaaatgaaaaataatgactttaagagcagatatctgaaatgtgtagtattgctttggctagagaataaaaaatgtactggatttttaaaactctggactggaaatttcattaaagcttaaaatctttacttcattgtattaagaagaatcaaaactaactaatctcctaatacaattatattttcagttcaaggcagggaagatgtgttctaataaaatatttaatgacaatctgctattgcccagctactccattcttgtaagctaagtgaatgtcttataagttaaatgaaatgtgttatgcctttactgttttatgtttgggtcacacacagggctgaggggaaccagtgaaacagatcggtgacatattaacctgaagttgttcatggctgtgtattcaagagagcaaggacaaataatggtcaaggaaggaagtcagggattggtggctctgtactaagtgtcagcttcaaagggagagaccagagcataaacagacaattctctaggttgcaaattgggaggattaggaacaagtaagagagatccatgcaggatggacaagaaaaaaaagttttataccaaaaattgtatttcatggcattagggcagtctactggggtaaggcactatgcagtactaggcaattagaattctattcactagctatgtgcacaagcggctcctgacctggtcatt

SEQ ID NO: 42415 - DNA, 2300 bp, Homo sapien
ctttgaaattttcactaggttgttacacagtgcaaaaatcctaaagcttttacttgaaaagtttccaaatttaaaaatagtctgtaacctctgatcctatagaattccaaagttaatctcagctgtacagtaacagactggagcaatcatcaaagttttgctttccatcatgaaataccaaattcaaactatgtaacactgatgtaacaataatcatatactgtccatattcaaatttcaccaatgtcctagtaatgacctttatagcaatttcacttccaatccaggatccaatcctggtttattgagttggtcgttaattattgtttcttggtctcatttattcttcaataaattttttcaagtaattgatttcatgtaagttaccaaattaattagcataaaattgttcataatattccctaattaatgtcagttggatctataataataggcccactttcattttgagctatttgttatttgtgtcctatcttgtttttatttaatcaatctaggttgtggcttatcaattttttagctttggcttcattttataattttaaaaattatattattcttcctttatcattcagtttgaaatatttcctaatttccagtgtgatttctttttgactcatgacataaatatgtttgattttcaaatatttgggagttttctagatggcttaatgttattaatttctaatttcattgagatatatgatttcagtatttttacatgtatcgagattttatggcctaacttatggcctatcttgttgaacatgccgtgtacatttgaagttgttgaggcgattagggtaaggtcattatagtgttcaaatctatgcctttactgatttttttcaagttttctaccaattgttaaaagggatttaaacaccttcactcatggttatggaattgttatttttcctatttctccttttaattctgtcaatttttgccacataaatcttgaaatccattattcggatttatggtttttatgatcttgtcatatagatatatgatatatatatattttataatcttagtcattactactttaggtttcttatgcttattgttgcatagtatgtgttgcgggaagtcagggaccccaaatggagggactggctggagccgcggcagaggaacatgaattgtgaagatttcattttaatatggacatgtatcagttcccaaaactaatacttttataatttcttacacctgtctttactgcagtctctgaacataaactgtgaagatttcatggacatttatcacttcccaaataatactcttataatttcttacgcctgtcttattttaatctcttaatcctcatatcttggtaagctgaggatgtacgtcacgtcaggaccactgtaattgtatctgactgtacaaattgattgcaaaacgtgtgtttgaacaatatgaaatcagtgcactttgaaaaagaaagaataaccgtgattttagggaacaagggaagacaaccacaaggtctgactgcctgtggggtcaggcagaatagagccatatttttcttcttgcagagagcttataaacagacgtgtaagtaggagagatatcgctaaattcttcttgtagcaaggaatattaaatattaagaccctaggaaaagaattgcattcccagggggaggtctataaacggccactctgggagtgtctgtcttacgcagttgagataaggactgaaatacaccctggtctcctgcggtaccctcaggcttattaggatggggaaaaaatcctgctgtggtaaatctgaggtcagaccggttttctgctcttgaaccctgttttctgttgtttaagatgtttatcaagacaatacatgcacagtggaacatagaccctcatcagtaattctaagtttgccctttgccttgtgatctttgcattgccctttgccttgtgatctttattggcctcagaagcatgtgatcttgttctcccttttgccctttgaagcatgtgatctttgtgacctactccctgttcatacaccccctccccttttgaaatccttaataaaaacttgctggttttgtggctcggggcctcacggtcctgctgatatgtgacatcacccccggaggcccagctgtaaattcctctctttgtactctttctctttatttctcagaccagccgacacttagggaaaatagaacctacgctgaaattttgggggcaggttctcttgctaggtatgtatttttttcatttacttacttccattcttttaatgtaattttt

SEQ ID NO: 42416 - DNA, 2300 bp, Homo sapien
aaaataaaaaaattagccgggcgtggtggcgggcacctgtagtcccagctactcgggaggctgaggcaggagaatcgcttgaacctgggaggcggaggttgcagtgagccaagatagcgccactgcactccagcctggagacagagtgagactccatctccaacacaaacaaaaaaaaagtcaaattcatagaaacagagagtaggatggtggctaccaggggtggcggaaatgaagagacgttggacaaaggtaaaatttaaattatgtagaatgaataagttccagagatctaatgtacaccatggtgacgatcattaataatactgtactgtatacttgaaatcttctgagagtaaatcttaagtgttttcaccacacacacaaaaattctaactggccaggtgtggtggctcacccctggaatcccagcaatttgggaggccaaggtgggaaaattacttgagtccaggagttcaagaccagcctgtgcaacatagtgagaactcctttctctaaaacaaaacaaaacagaaagtatgtgaagagatgaatatgataattatcttgactaataatcaacatcaagttgtatatcttaaatatataaaatttttaaaatagtaaagaaaatataatcatcattctcagtaatctatttcctctagttttcttcataatttaccactttctgaaattacattacacatttgttcatttcttcctccattagaacatatgccctacgagaacaaaaatttggtctgttttagtaaccactgtattcttacaacacctaagatatagcctggcatatagtaaacagcctaaaaaatatttgttgagtgaatgaataaaacaaacttggaagagatttgagagataataacaaatattgaccaaagaagagggaaagctaatatctgaactgatgaaaaagatctttcctaattgtagtggtttttgttttaaacctaagagagcatacattgctccctagggttcctaccatacgttttgatttcctaaacactatctaagtcaaattagatttaccttcaaacaattacacatggtgcagccgtgcagcagaaaaagcagtagatggggagttaggagacatatgttctagatccagctttgcaattaacttgctttgtgactttgggaaaatcacttccctcctgtgggcctgtttcctcatatgttggagtacctcgaggatgagaatggattttgtttttcctgctgtatcctaggcgcttagagtaatgctggccctaagaaatctgttgaatgactgaatgaatgaacaaacaaaaggaggaggcagtacttcattactgaaccttgcttgtgaagaaacacagccggcaaatgagtttagtttaccaagcgctttcatgtgtttgcagacaacacactcggtgtctcgcacacgaggttaatcctgcttgcttaataaataaatgaatgagtgaagtgaaaaggaaagggggtggtatttccgttataaaatgagaaaactaaggccgagagtggaagagactgggtcccaccactcaatgagtgcttctcaactcgggaccctaaccggacctccttgtccttgctctgatcaggcgcgggaccacgatggcgtaacactctattttgaattcgtccctaatcctccttaactttccttgaacatgacccaccgtccaccataaagctttacctgaatcgagaccaaaattctctacatggtgtccctgagactgtccacatgaagactcttctggtaatgcccgacacagatcgcgccgccatcttcgatgagatccacgggcctgagcgcagccttcagccagcagtgacgcgcccagaccagccaatcggatacaatcccagtggcaagagctttctttttcctgtaggctccctcgccctttgcacgctgggaaatgtagtccagtagctgttgctggcggcgtctggaccgcggcgctctttccgagcatgacgggagttgtagttgagggggcctcgggaagaatctgggtgacgccttctggtccgggggcgggcggtcatagcgttacttggctgcaaggaggaggaactggcagcggggaggaggctctagcgaggcctgaaaggctgcgtaaccaggcaggagtaggggttggggttcggggttgggggacagccagggatcgcgtctgatatgctgttggggtcgtgaccgtctgggggccgaggcaggcactggccagacccagccagggatcctcgtattcgtcgagcctaatttccag

SEQ ID NO: 42417 - DNA, 2300 bp, Homo sapien
gcagggtccctgaagatccactgaggctgaagtattaactgggtcatccatggcacgagttaaaatagactatgaaacatgtgacaaagttatgtgtgaaggaccaaactaaaagttgacagatagtgaaaaggaattgagtggaaaaagcaagactgctgagacctcaaagaaggagagattttgtttgaaggtggaaaactaatgctttggggacagcatttaaaagctgagtgaacaataacttcccccttccaacattgagacaaaggatggggaaggaggaggatgtgggagaataagcagcccccacttgaaaaactgccagagaaacgttgtccttgggatagtgccaggtttcagttaaggccaggagggaaggaacattatgtgaagacgaacaggggttccagaacgcagagtgaaaaggggtgggaggaaagctgtgggaggatgagccaggacggaaagtacagaacaatatgggaatgagattatgaagacaggatgcccgaaaggcttgcagtttggtcacctcaaggaagctagggatgagagttatggaaacaattaatggctaaaaggtttgaatcagaactttggaacaaagcagttttggtactggtttccgtccaaatgttctgttagtctgatttctctctaccttcttagatattttaattagagaaacagcagattcttacccagtgagaccaggtttccataattctccatcatgacatctttatacaggcttctctgagctgggtccagataatcccactcctcctgggtaaaaaacacagccacatcctcaaatgtcagcaacccctgaaatagtatgatttctgtagtcagttcctgttgtctcaaggacaattctaccactaaaagtgacagaggcaatcacttattgtggccaagtaggctaggaggaacatgataactgaaagttccatatgttgcccaattctgggaacgaactgtaactgacagacatctcagactagaaaggacctacggataaggcttttctgatttattatgccctgagagtttaattttagtaaactgccccaaggcctctccaagcttccctcacctcattgcctacttcaattttccatttgcactggcttgtgactctattcaattcaattccttgaggttctctaagcgtgtaccttggggtccaggcactgtgccaggaacagaagacacaagggaaggtcaaaaatggtgcttcacctggagaactcacaaatgagagagctagtctggagcattacttattttctcaggccgatttatcaagtctctctagaaaaagaaaaaaaaaaagggagccagtgggcagtttgttcgcgaaccgcaccccaatgcactagtggggagttccttgcaaggcgctggccctaaagaggcggtcaggaggttggtggggggcctgggggagaaagcagtggtgcggcctagctggggtagcggcgagacaaccgggatccccgggggggtgcttacttaccttcgactccggcggggggctcggggaagccatctcccaggcagagaataggggcaggaattgggggcggcctcacggaaaggagcctctggtgaggcctacccggctgctggaaattaggctcgacgaatacgaggatccctggctgggtctggccagtgcctgcctcggcccccagacggtcacgaccccaacagcatatcagacgcgatccctggctgtcccccaaccccgaaccccaacccctactcctgcctggttacgcagcctttcaggcctcgctagagcctcctccccgctgccagttcctcctccttgcagccaagtaacgctatgaccgcccgcccccggaccagaaggcgtcacccagattcttcccgaggccccctcaactacaactcccgtcatgctcggaaagagcgccgcggtccagacgccgccagcaacagctactggactacatttcccagcgtgcaaagggcgagggagcctacaggaaaaagaaagctcttgccactgggattgtatccgattggctggtctgggcgcgtcactgctggctgaaggctgcgctcaggcccgtggatctcatcgaagatggcggcgcgatctgtgtcgggcattaccagaagagtcttcatgtggacagtctcagggacaccatgtagagaattttggtctcgattcaggtaaagctttatggtggacggtgggtcatgttcaaggaaagttaaggaggattagggacgaattcaaaatagagtgttacgccatc

SEQ ID NO: 42418 - DNA, 2300 bp, Homo sapien
gttaccaaaatgtaagcagctctgctttagatcactgtcttggaatgagacaaactctccagctacctgtactgtgactctagacaagttacttgccctctctgaaccagagttttgttatgcataaaatgggggtaataagcgtttcttcagagagtcgctgatattggagataatttatgaaaagaaccaggtacatcatagactctcaaaaaaaggatagctattattgttgtataacaagaataattagtactagtagcatctctcagcaggtagaatgttttagctatggttctgactaccccagccctgactcctaacaactttcattacacccactctctattctttcatcaccatccacctcttgttcctccattctcctttaccaaaaatcatagaggatgaaacctcacatagccccaaagctggtcacattggtctgacaaatatggtagcaggtgcttcaatgagcccagttgaagatggggaaaccaggaaatgtgccatcagatactaagtggagtcaagggagctgataggacctttccctggtctatccctctactatcctcaggacagggcttggtgggaacttccctagccaaatgagcctcaatattgtgtttcaaatacttcaatttccttcaatattcacattcagtgatgaatacttactgttctcagaagcctttgttttcaggaaaaacttgatggtggctgaaaacatgatggctctgcttggagggaaatgcttgttttcctctctctaagtataaatgctcattcacacctttcctggctttttgagaggtggcaaaatgcccaagattgattgccagttacttgtgttacctgaatgaggcccttgtgagtctctgatctaggaaaaacaaccaaaactaaaccaaaactctttttagatcacctagttccgtttattttttccttcattttgttgacatttcaccttttcatccataaattctggtgttacactctgcacaatcaagcatcttagttttgttttccattttatgaattattccagaggaacatgttcatgagaatttacccttttttgtaattacggtcattccatcacttttagatttccctcatttatttgcctcattcatcatttgcctctggaagcatataatatttttatttaccttttctggaattaaatttgggtttcatacttaggaaaaagccctgcagaatgaacccatacccagacagtaccatatttaggggtgttgatggcttagttcaatcactttaattctagtttttaaccaaatttgaagacaaaagtacaaaggttaaaagagaatgggaatacaaaacaatgatttctggcattaaatacatcagaaagcccagctaggttttggaggactggagaagatgggagagacaatgatttttaaaaacagaatgttttgaattttatttccaatttggacaaaattcacacatgggaaattcaaggattcagaatcaatttcttttattgaaagattatttaaatttaactataaattatagaataaattgttggaattgactactaatgatatactgaagataaataatgaaaatatagcattgattacctaatttggaaataataattcttgaatgcctactgcgtacagacactatacaactcacttaatgctcctgtgaaattgagatcccactttacagagaagaaaataacggctcagacaagtaaaaaacaaaaccaaaaacccgtcaccaagttcatgtgttttgtaagtgttacagctacactaacattcttcctagtatcatttaatggaccctagagctccatcattgactagctgtatgacttaagggaacctccttatcttccttgccttagtttcctcatctgtgaaatggagggtctggattaggaactccacggtctaaagacattccttgcagctttaacattctatgagcataaggagtatatgggcatgattttaaggactggttgtttatgagccaatcagaggtgttgaataaacacctccctactaggtcaaggtagaaaggggagggcaaatattggaaaaaaaaaacatgatgagaagtctataaaaattgtgtgctaccaaagatctgtcttatttggcagctgctgcctcacccacagcttttgatatctaggaggactcttctctcccaaactgtaagtaaaaaagcttcctttgtatacctggacagcaccagtgaataaggggttaataatactactaagcttatagaagggaaga

SEQ ID NO: 42419 - DNA, 2300 bp, Homo sapien
actcttacttctatctgcgccattggcatctgaaccaaatgagccaagagttcctgcagcaaagcttgaaagagggtgaggctgccctccactattttgaggagcttccctctgccaatggctcagtgcccattgtctggcaggccaccccccggccctggctggtgatcaccatcatcactgtggacaggcagcctggcttccactacgtcctgcaggttgtgtcccagttccaccggcttcttcagcaatgtggcccccagtgcgaggggcaccaactcttcctgtgcaacgtggagcgtagtgtgagccattttgatgccaagttgctctccaagtatgtccctgtggccaatcgctatgagggcactgaggatgattatggtgatgacccttcgaccaactcgtttgagaaagagaagcaggactatgtctattgcctggagtcatccctgcagacctacaacccagactacgtcctgatggtagaagacgatgctgtaccagaagagcagatcttcccagtcttggagcaccttctgcgggctcgcttctctgagccacatctcagagatgccctttatctcaagctgtatcaccccgagaggctccagcactacatcaatccagagcccatgcggatcctggaatgggttggtgtaggcatgttgctggggcccttactaacctggatatacatgaggtttgccagccgcccagggtttagctggcctgtaatgctcttcttctccctgtatagcatgggtctggtggagctggtgggtcggcactatttcctggaactgcggcggctgagtccttccctgtacagtgtggttcctgcctctcagtgttgcaccccagccatgctcttcccggcacctgcggcccgccggaccctcacctacctgtcccaagtgtactgccacaagggctttggcaaggacatggcactgtactcgctgttgagggccaagggagagagggcctatgtagtggagccgaacctcgtgaaacacatcgggctcttctccagtctccggtacaactttcatcccagtctcctctagggtgccaagagatgcctttctgaagttggccacttcttgaagattcaaatatttatctctttatttagacatggttgcctgcaggtatttcactgtttactgttgttagagatataggcactggggcagctgaggaacctcaatatgttaagagccttggctttggtagcctcctggcaggagcagcagtttgccacaggtccggacctctccctccacacagccacactgcctcatgcagtctgacccacccagtgagggtgcatttgaacactgattatattctccatttgtttttaagctctgctttgtgttagagcttgtgactgccaaaaattttgtgcacagtgatatgactgttttaggatcttaagggtagaattttgtgaaaggtgagatcctttggaattgagttctttctcattgggtatgaaaatggatgtatgtttagaatatatgcccaacgaggcaggaccatgtggatagattccatttgtttccttgacctgatgtaataaaaactgataaaagccgtgcagtgcccggcatcttggaggcaggtgatctggcttttctgttacctgggattttcttttcctatatatctgtagtgcactgataattgatattgttagtgagaactttaaggcacgacaagatctggaagagcttgtgaaccatcaaagtcagattgcttatgttgagtagtgatttaacattgaacatttctgtactactctgactctttgaaaattggacatttcagaatgatacaatataggggagctctttacaagtagcatatcatttttcctgactttcctggctgactgcttaccttcatttctttttcttctaggtagcatgatgttatagaaaaaaaaaaaaaaaaatcatggactgaagtcagaagacctgaccttttatttcagatctctgccatggcctaacgacgtgaccaccttgggcaggtcatataatcactctgggtctcaatttcttcacctgtaaaatgaggacagtaatacttacatgttaaagttgccttgaggattaaatggcagaatatatgtaaaacacctagcaagtgcttagtccatagaagacgcttggcaaacttttctctcctataataaacatatacaactcaagcttatttcggaaaaagatattggtgatgttgtttaaagtatgagatagggcatggagctgccacctatgtaccagcta

SEQ ID NO: 42420 - DNA, 2300 bp, Homo sapien
tactataataattgtaatagtacccactactagtgtctaacctcttattttattattcttcttttttttctatttttgctttgctttgagaagaaatatagcatgttgattaagagaatggactctgaagccggatttcatcagtttggattttggcttttcctctttctagcagtttgggtaagttacttagcttacctgtctcatggggttgttggagtgattaagagttagtaaaaagcactcaggacagtaacagccatagaaagtactagggaagtgtttgatcttactatttaaaatatttatcaatacctgatatagtatgcatttatttgcttattatctattgtccacccaaatgtaagctccctaaaggcagagacttggttttgttcatagctgaatccttactctctagaaaagcactatctcatagaactttctgtgatgatgggatgttctatagctgtactatctaatacagtagcactaaccacatgtaggtactgagcatttcaaatgtggctagtgctactgagggactgattattacattttatttaattttaattaattaaaatgtaagtagttacatgtgactagtgaccatgagattggacagcacagacattgcctggaacatcataataggtactcaatgaatttttgttaaacaagtgaataactaccaaccatttatagaaagctagatattttgacaggtagaatgctaagcactttatatacattatctcatgtaaacctctcaacaaacctatgagggaaatatcactgtccccaatatatagatgagaacattgaggcacagaggagttaatttgtcatagccagtaaatagattagaccccagcactgagccaatgacagtgaactgaattcaacttgtgttggttacaatcctccaatttcggaatatcagactcccattttttctcccaggaaatgaaactaccttcccaagctccctttctgtgctatatccagctctcatactttccagcctcagatataggttttccagcattcctaatgacaaattccttgagtgaaggatccacacctcattcttacttcattgtcatctatagtgatggcagtatgtcagaaccattcttcagtaaatgctggctgaaagagtagatgatgaatgggggctcaggtgggtgtttgtaaggttctaaaggaagttaatatctagtatcaattttacttacacaagaagaaatcatatgagcatttactggctttaatgctttatcttgtgaccactgaacagaccttttagagcaggtgttggcaaatcaggcagtaaatattttaggttttgtgggtcataaggtctctgtcacaactatccaactctgctgttctttcatggtagcagccatagacaatatgtaaatgatgactatgttgcagtaaaactttgtttacgatcatcaaattttgaattcatataattttcgtagccctgaaatattcttccatttttaaccatgaaatattgcaaaaaacattcttagcttgtgggctgtacaagaacaggcagcaaactgtagttgctaacctgtggcctagacaggcaaacctaggattagaagcactgagtaaggccgtacaattgtgtgctgaaaacccattcagaagggaaagtccaaggtggaatgtaggaggctgttacttttcttttgacccccacatttttcctccctcggatcattccgtatctttttcctatttgctttgccgggattgttctcaatcaatgtgcatactttctcatacctcaggcgttatgtctctcgtggccgtttgtgtttaaattgagggtttggggaagactgaaaaacattcaagacccaaagtaacagctttctcatgaagcgtttacacgcattgagagatatcgttccattggtgtgaataagtctctatgtacacacctgatgaaatataatgctggcttctagtcccctcacaaaagaaacaggcttcctgtttgcgtgacttgggggcgactcctgcttttccctggctgcccatcagttggcgccttttgccgtcctttttccccaagccgctttgggggccgcggtctctccgcagctcgcgggtcacatggcccgcctgagcaaggggagccctgcgcctgagctgcgaggcgggaggaggtgaggctccggcgcacacccaaaccgcgctgcgcccgctccttccgggccccggagatggcgcctccaccgggatgagctagccagcctgggcaataccagagg

SEQ ID NO: 42421 - DNA, 2300 bp, Homo sapien
tcctggttctgctaaggtgagggaaggggaatagctgttgggtagatcaccaataatgtccaccagacacttacgtagtaccagcaattgatttatcacaatgtaacacacaagtgatgatactcaaattaaactatactagtgctaaggaaccagtaaagattagtggggattatggtaaacaagaataacatgatctattaataaaagagagccacgccaagcgtggtggctcattgccagtagctgtggctcaggcctgtaatctcagcactttgggaggctgaggtggatggatcgtccgaggtcaggagtttgagaccggcctagccaacatggcgaaaccccatctctactaaaaatacaaaaattagccaggtgtggtggcgtgtgcctgtgatcccacccacttgggaggctgaggcatgggaattgcttgaacctgtgaggtggagtttgcagtgagccgagattgtgccactgcactccagcctgggtgacagagtaagactctgtctcgaaaaaaagaaaaaaaaaaaaaaagaagaagccactactttgctctaagcaatgtgaccatgcaaaaatataacccttctgttgcaagatcatcaacattttttagagaaactgataatttggatttttatgtaaaatagccatattttaaatgttggcaactaagttcatttttgttcttgtttttaaccacgcaggacagccaatactgtctaaaataaacaaagcataactgttggctaaatgcagtctgtgaacctctagttttctgggctagaaaaaccattacttgccattcagtagttctatgaatgaaaggcttgctaagagtagaggaaccaaagaagatgagagaatgagtgtcattgtctcatacaatgcttttcggcaggtgtgtccccactcacatgttctcaggctcccacttcacggaatgaaatgtgaagtccacttggggccagttaattctttccaagatagtcaaggtgttccactgccaggcaccaggaacacttgtttccctggtgttgaccatcttacttcatttacaggtaagccctagcaggtacagggacaaaagtcttcacactaacagaaatccagtgtagattagcttctttttttcccaagatgcctaaattctattttttaaaaaagatatagcgatcattcttccatttctagacccttagctgacgtcattaggtagtttatcatagttctgcgagacatacagcttttcattaataggttagattaattaccgtcctatcattaaaacgcatttagtttaactgaatggaaaatagcagtttgtcataaacttaaaaaaaaaaatcaatgcttaattagcttaaaatagactagtactgagatcagagactgattggcgtttatcttttccctggacaatttcttgttcccaaaaaagcacaagggcagtagttgtcactcctgcttacgcattagaatctagtggatggaaatgcggggtttggggggaggagatgaggggaacgcttttttaaaaaagcttttgtccaggccaagtgattctaatgtgtagacagggcagaataccgctccctgtgcgggggaaaaaatccccaacatctgaaattcctcaaatccctcagattctctccagaactcttcatttcagcacgtaggggtaccaacgaacaattttctgaggtgtctgaggctagtcatgtccccggagattgacgggaccgtcagccaatcggccgtctgaacgagtgatggcaaccccaatgacaagcaacagaatgaggaactttatccccgcagaaagaccagatcgcagtagcaaaggtcaacaagtcaacaaaagccaagggctctccgtcaggcatcagcgaggcccgagtactcttagaggtcgtagccaggagagggtcccgcgcttgcccagcgttgctagggaggcggcgcttgctcaagcttctcgtgccctctccgtacgtcacttccgcccggcggggtctcatagtcctatgggctgggttgaagccacttccttttttctttccctttttcctctccgtggccccgcctcccggaagttctgccttgtctccgccgcgggtcaggggtgagagctggaatctctgcacgggccttggtgagtaactgctgcgagttctgttcccgcgcggcgccagttcaaagaacttaggttagatcacgcttagggcccaacaggactgtgccaggcctcaggagtctccaccctctccagttttggggccgtcagtctc

SEQ ID NO: 42422 - DNA, 2300 bp, Homo sapien
gaagagacacctcctagcttaattgtttccactgtggtccctgaatcttcaacagctgccttcttctcaggaggcatggaggtgccaggttctccagctgctcttttatttccaattcctgacattttggcagaagaagacagtcgttttcctgatagaaaaaaaggcagaaactgacataatatatgtaagcaaagcaacaatagagtaaaacaatagagtaaaaactagcaacttttctggccaaccctttaacctggatccattaattccacaaccatctccatatttctctttgaggaaaaaaaaaaaaaattaaattgtagagtaaaagtcaaggcgggccgggcgcggtggctcatgtctgtaatcccagcactttgggaggccgaggcgggcggatcaagaggtcagaagatcgagaccatcctgcctaacacggtgaaaccccgtctctactaaaaatacaaaaaattagccaggcgtggtggcgggcgccggtagtcccagctactcgggaggctaaggcaggagaatcacttgaacccgggaggcggagcttgcagtgagccgagatcgcaccacagcactccagcctgggcaacagagcgggactccgtctcaaaaaaaaaaaaaaaagaaagtcaaggctaaatttacatgactataaatttctaaataggatggtgataagaatggtgataagaaatgagacaatgggcaaagggtgaagagaccaaaaataaagttctggaatctctcttcctgtaatgccaaaatcagaaaagggcagtttgattatgccagaagttaatactacagtgttgaaagaatcacagagctgaaagagatctgtgaaatgcctactaaagtcattagtactagacaagtcagttatcatctctaagcctcagtttcctaacccaggaataaataaccacagtatatacttcctatgcttattataaaataaaatggatgatataattatagaaagaatttggcacaaagccgaacacaaagtaagcactcagaaaccccagctcttctttaacgtttgcagtgttttccctatttccaaacgctctctccactgttttatgcaaccctacgttagttagacctgggtgcgaatttcagttctgcctgttagaggccgtgttgctttgaaacagtgaattcgccaagagcttcagtttcctcaactgcacaatattaacgaatatatttttcgtctgccctgcctacctcccagggtgctcaaaggaggcggaatggatgctaaagcactttggctacttcaggaaacaacgcagccatcaccgagactaacaagactactctgcttccaattcaagctccaggagaggactatcgctggcaacaacctcagtaggacctcgcctggagagagaagacacagaagcagaacaaggctgcaatccaactcgctaaaagccaaagacctcagcctcagcgtggataattgcaggcccaggagactgacggccccaaaactggagagggtggagactcctgaggcctggcacagtcctgttgggccctaagcgtgatctaacctaagttctttgaactggcgccgcgcgggaacagaactcgcagcagttactcaccaaggcccgtgcagagattccagctctcacccctgacccgcggcggagacaaggcagaacttccgggaggcggggccacggagaggaaaaagggaaagaaaaaaggaagtggcttcaacccagcccataggactatgagaccccgccgggcggaagtgacgtacggagagggcacgagaagcttgagcaagcgccgcctccctagcaacgctgggcaagcgcgggaccctctcctggctacgacctctaagagtactcgggcctcgctgatgcctgacggagagcccttggcttttgttgacttgttgacctttgctactgcgatctggtctttctgcggggataaagttcctcattctgttgcttgtcattggggttgccatcactcgttcagacggccgattggctgacggtcccgtcaatctccggggacatgactagcctcagacacctcagaaaattgttcgttggtacccctacgtgctgaaatgaagagttctggagagaatctgagggatttgaggaatttcagatgttggggattttttcccccgcacagggagcggtattctgccctgtctacacattagaatcacttggcctggacaaaagcttttttaaaaaagcgttcccctcatctcctccccccaaaccccgcatttccat

SEQ ID NO: 42423 - DNA, 2300 bp, Homo sapien
gcagaataccgctccctgtgcgggggaaaaaatccccaacatctgaaattcctcaaatccctcagattctctccagaactcttcatttcagcacgtaggggtaccaacgaacaattttctgaggtgtctgaggctagtcatgtccccggagattgacgggaccgtcagccaatcggccgtctgaacgagtgatggcaaccccaatgacaagcaacagaatgaggaactttatccccgcagaaagaccagatcgcagtagcaaaggtcaacaagtcaacaaaagccaagggctctccgtcaggcatcagcgaggcccgagtactcttagaggtcgtagccaggagagggtcccgcgcttgcccagcgttgctagggaggcggcgcttgctcaagcttctcgtgccctctccgtacgtcacttccgcccggcggggtctcatagtcctatgggctgggttgaagccacttccttttttctttccctttttcctctccgtggccccgcctcccggaagttctgccttgtctccgccgcgggtcaggggtgagagctggaatctctgcacgggccttggtgagtaactgctgcgagttctgttcccgcgcggcgccagttcaaagaacttaggttagatcacgcttagggcccaacaggactgtgccaggcctcaggagtctccaccctctccagttttggggccgtcagtctcctgggcctgcaattatccacgctgaggctgaggtctttggcttttagcgagttggattgcagccttgttctgcttctgtgtcttctctctccaggcgaggtcctactgaggttgttgccagcgatagtcctctcctggagcttgaattggaagcagagtagtcttgttagtctcggtgatggctgcgttgtttcctgaagtagccaaagtgctttagcatccattccgcctcctttgagcaccctgggaggtaggcagggcagacgaaaaatatattcgttaatattgtgcagttgaggaaactgaagctcttggcgaattcactgtttcaaagcaacacggcctctaacaggcagaactgaaattcgcacccaggtctaactaacgtagggttgcataaaacagtggagagagcgtttggaaatagggaaaacactgcaaacgttaaagaagagctggggtttctgagtgcttactttgtgttcggctttgtgccaaattctttctataattatatcatccattttattttataataagcataggaagtatatactgtggttatttattcctgggttaggaaactgaggcttagagatgataactgacttgtctagtactaatgactttagtaggcatttcacagatctctttcagctctgtgattctttcaacactgtagtattaacttctggcataatcaaactgcccttttctgattttggcattacaggaagagagattccagaactttatttttggtctcttcaccctttgcccattgtctcatttcttatcaccattcttatcaccatcctatttagaaatttatagtcatgtaaatttagccttgactttcttttttttttttttttgagacggagtcccgctctgttgcccaggctggagtgctgtggtgcgatctcggctcactgcaagctccgcctcccgggttcaagtgattctcctgccttagcctcccgagtagctgggactaccggcgcccgccaccacgcctggctaattttttgtatttttagtagagacggggtttcaccgtgttaggcaggatggtctcgatcttctgacctcttgatccgcccgcctcggcctcccaaagtgctgggattacagacatgagccaccgcgcccggcccgccttgacttttactctacaatttaattttttttttttttcctcaaagagaaatatggagatggttgtggaattaatggatccaggttaaagggttggccagaaaagttgctagtttttactctattgttttactctattgttgctttgcttacatatattatgtcagtttctgcctttttttctatcaggaaaacgactgtcttcttctgccaaaatgtcaggaattggaaataaaagagcagctggagaacctggcacctccatgcctcctgagaagaaggcagctgttgaagattcagggaccacagtggaaacaattaagctaggaggtgtctcttcaacggtatgaggaaacagtgccatgaaagtgtgcttgtcttctgtcagttgcaacttgaaactaaaaattcatggaagctttctggagtatg

SEQ ID NO: 42424 - DNA, 2300 bp, Homo sapien
tttccacatgctggttctttgcttgttatatcctccaatcccacctcccaccaacccctccctggtttgtcctagggaaggagctggagagagaaaaatattgagagggatgtgaaattactaatggagtgagggttttgtagagacagaagagaacaggatcctgagcacaagctgaggttttaagaatgtgtgcataattgtgttaatgggtcaaagagatggggaattgttttccatctgatggcttctattttctcattaaaataggaagtaaagccatctgttttgtatgatgtaaaagggggcagggtttggtagaggttgatgttgccttgctggagaatgggaaatagctcacttgataaagaaatatttctagacaaattataaaatctgtttaggctaagaattcattttgtaaaggcaccggtttcggtggtttgatgaacttctctagaagtctcagcatactgggtacaggaatggaatagccagataactggattaattcagattggggtttgttgacagagatagaataaaaggattaagggcagagaaccaaggaggctgttaggcaggtgtttgaaggaatgtactatatagcatatgattaagatatggaaggtagcagagatagaaggagaccgaaaaggagaaagaaaagaattcaacattctggagatcttgatgaggtaaagggattggtatattgggttaagggcatgagatacctggaaagacgtggtgtttttcagggaatgggaagttggaatataagatttcagatgtggtacagttccagataatgacaaaagtctgagatgtgtcttttgaagtgcatggctgaagcacagtggaggagataatgtttggagtgaaggaactggaaaaactgacagcctagatgctagaggattagatggtttgtccacatgtatggtgaagtcaccagatatattggcaggaactgggatagacagggacccaggtgctgaagtctttaatgaaggaaggatggtgcttacgagatagaagacagtgttgattggagtcgagggtgatctagctggatggtggccttaaagcagcattactttgtagatgtttatgtgactagaacagcgagatgggttgaggttctggtgtatttgtgtgtattattctttcctcacaccatcatatacctgttgtttatctcttctgcttctacttcttaattacttgtaagattttttaaaagtcaatagctttattcatagaaaataactaatgaataattgtgaccttgttgagtttaacggctcatttttcttatttctttgtggagactaatacgattggtttactgggcaggaggaactagacattagaacactgcaaaccaaaaatcgcaagctggcagaaatgttggatcagcggcaggccattgaagatgaacttcgtgagcacattgaaaaactggaacgacgacaggccactgatgatgcctcactattgattgtcaaccgatactggagtcaggtagctaacttgtttatttgttcagatttttatttgaccaatttagttctccttactgttctcttcatttccaaagttgtgtcctttgtttcttcataattgtacctacccttctccagtttgatgaaaacatccgtatcatccttaaacgttatgatctggagcagggcttgggagacctactcacagaacgaaaagcccttgttgtgcctgaaccagaaccagactctgatagcaatcaggagcgtaaagatgaccgagagagaggcaagtgttcgtgatggattctatcactgcatgctatctgggtttttaaagtagagctctgctttgaggctttccatttgagggaaaaaaaatggattttgttatttccagtttataattttggggggcttctttttttccccctgtgtcctcaggggaagggcaagagccagctttctctttccttgctactttggccagcagttccagtgaagagatggagtctcagctgcaggaacgtgtggagtcttcccgccgagccgtgtcccagattgtgactgtttatgataaattgcaagaaaaagtggagctcttatcccggaagctaaacagtggaggtgaggcaagaccctggaggccgggagtagtggaggaggaataagaattcatttttgcatgctaatttgtagtttgcaagcttacatatttatttttatttatttattatttactttttaagagataaggtttcactgtgtcacccaggctggaacacagtggcacca

SEQ ID NO: 42425 - DNA, 2300 bp, Homo sapien
atgccatgtgcatagactatgttaaacttgatttcataaatgaatatcaagtgaaacaattgttttatttaaaaagggaataaaatgagtagtatatcaaacgactttaaaattactatttaatggcatgcattttaaggtcgggtttaagttaaaaagtagaaacattacaaatagccatgccattatttgtaacacaaaaggcaattgccattggtaagctgaactttctaagagataaagatgtataaagtatgaattatagcatcagttgtaacttgtttgaaagttcatccccctgacttagactgaaaattgacattcctcaaattcctaggacatcatcaatacagtagtttctacttccccattccctgtggaatttctaccacgccattcctcaataacactatacagtcttttatatttagggtaattcattatttggaggtttggagttgtgttgtgttttacaaaatcccctatgatatgataggccttctagagtaaggtaaggccttctagagcaagtataggccttatagagtaaggtctataaattcatctaaccctgccagagcggcactgtctaacctgccacggcagtactgtctaaccgtgccagggcggcactgtctaacccttccagggcggcactgtctaacccttccagggcggcactgtctaaccctgccagggcggcactgtctaacctgccagagcggcactgtctaacctgccagagcggcactgtctaactctgccagggcggcactgtctaacctgccaaggcagcactgtctaaccctgccagggtggcactgtctaaccctgccactgcagtactgtccaaccctgccagagcggaactgtctaacctgccagggcggcactgtctaacctgccagagcggcactgtctaaccctgccagggcggcactgtctaacctgccagggcagtactgtctgtttgtttggtctttgattcaaaagaattgcatttatgggcttgtttataaattcactaaacatttattgaattttattgtattctagccctgtcctcagtgcttaggatattgagaggactaaaattcagtctctacttcttaactcaggttatgaatcagaataaccttgggagttttctgagcatattcttatttttggctttgcccatggaggttcttattaagtaggtatgagataggtcctagggaaatgtctattttaaaagttccacaagtgattctgatgggcaagcctagcttgaaaaccatgaaaaccaccatatgaccaacctgttctgtattgatactaagagtaatgccaagaggtgatatgagaaagcatatttttcttcctgataactctctttgatgggtggtatatatcctgagagtatctggtttcatttaattacatttggatttcagctatagtatttgcaactctaattttaaacatacgaacttggtgtaataagttctatggatttacctacctgctttgtaaatagtagtgtacattttggtttttaagcttcagaagtgcccctaacatagtatttcagaatatatgatatgagaatatgtgataagagcatatgattcttgctttgttattcaggctggtcttgaactcctggcctcaagtgatcggcctgccttggcttcccaaggtgctaggattacagcgtgagctgctatacctggccaaggatacacagttttaaaatttgacactataggccaggcacggtggctcacacctgtaatcccagcactttgggaggctgaggtgggtggatcacctgaggtcaggagtttgagaccagcctgtccgacatggtgaaaccccatctctactaaaaatacaaaaatcatccgggtgtggtggcatgtgcctgtaatcccagctactctggaggctgaggcaggagaatcggctcgaaccctggaggcagaggttgcagtgagccgagatcgcgccactgtactccagcctgggcgatagagcaagactccgtcttaaaaaaaaaaaaaaaatgacactctagatgctaaattaaagtatagttcttcttccccagataatctgatagtggaggaagcagtgcaggagctgaactctttcctcgcacaggagaatatgaggctacaggaattgacagatcttcttcaggaaaagcatcgcaccatgtctcaggaggtacttaaccaaaaaggagagatggctgtgtctagtgggctgtggcagatgttgacttacaattctgagcacctcaaagattaccttac

SEQ ID NO: 42426 - DNA, 2300 bp, Homo sapien
gcaatgctagattctgcttctgactttgctttgggccctcctaaggtggaattgcggagtgcagtggagcaagtcgttaaggaaactccagaatatcgctgcatgcagtcacagttctccgtcttgtataatgagagcctacagttgaaagcacacttggatgaggctcggaccctgcttcatggcaccagaggaacccaccagcaccaggttgagcttattgaggtaatagccttgccttgtcttttgtatgtaagctttcttgcctcctaaattttacaattttactccctcatgtgcaattaatctctcattcattcagctgtcattcatagagtggcagtaggtctttactctggtaggtactgggcatataaagatgagatgacaaaattcctgccctcacagatcttgtagtctgcagtaatgggagaatagtatccattagaatgcaatgtggtacaatggcagcatagccaaaagatgtgatacatgagaaaagagtgtctgatttgactgtggaagtttcctgattccacttaaaaaagtaaggtataaatattaaggataaattattggtagttgaaagtaggagaagaagaattcccggcatgagaacagcacatataaaggtatgagagagcatgagaaatagtttaatatggctagagcttacgtgtatgtgagaaaatagtgggtagaagctgcaaaattacttacatttcttaaacaaaaagcatataatggcaccagtagatgatttttttaaaagatagaaacttttattcatatgttcatttctgtatcttccatagtttttaaggtaatggttataatagttggtcttttaatatatgcctgacaaatgaattgaatactattttacatatgtttatatactgttttatagtttagttctccaactaaattctaatattctcagaattggtggccattttctttatttttcagtatcctgtcagtttccaaattagtcttttgtagatatctggtttcattacgtatagattgaactggaaattttcagagtaatccatagaatatgatgatatttctacattttaataagaatttttttattggttcctttatctgtgtgtagcgagatgaggttagtcttcataagaagctgaggactgaagtaattcagctagaagatacattggcccaggtccgcaaggagtatgaaatgctgaggatagaatttgagcagacccttgctgccaatgaacaagcaggtataatgattctcactccatgctgtagtttgctcttaataccttccttgaaagatacaacacagaccccagggtttgttaatgctgacttcaactcagaagtcataagtaccttaaatcctataattcattttggttcacagcctggatgtttgttttttaactcaagttgaccagttttgttttcatcttctgagaaggaatcttttatttggtaattctccctatttctcagtgcctcctgatgtgttctgttctttctctccttgtgcctttgcccttaccacggttcctcataacattgttgttcctgtatttaaggccctataaacagggagatgcgccacctcatcagtagcctccagaatcacaatcaccagctgaaaggggaggtcctgagatataagcggaaattgagagaagcccagtctgacctgaacaaggtaaccagagggaatagaataaatatcatttgctattaatgtcgtaaagctgcttttgaatgaggtcggcaatgtggttatcataagagatgtgcatctttcttttctttattctcccagacacgcctgcgtagtggtagtgccctcctgcagtcccagtctagtactgaggacccgaaggatgagcctgcggagctaaaaccagattctgaggacttatcctcccagtcctcagcttcaaaggcatctcaggaggatgccaatgaaatcaagtctaaacgggatgaagaagaacgagaacgagaaaggagggagaaggagagggaacgagaaagagaacgggagaaggagaaggagagagaacgagagaagcagaagctaaaagagtcagaaaaagagagagattctgctaaggataaagagaaaggcaaacatgatgatggacggaaaaaggaagcagaaattatcaaacaattgaagattgaactcaagtaagaaccacatttagagtaacagtttcgactgaaaagctaagattaagacatcatgcatgaaatgtttggttgatggcatggcttgtctgatcgttttaatgttt

SEQ ID NO: 42427 - DNA, 2300 bp, Homo sapien
tgtatagacacagcaatgaatctgccaagttcttttgagcaactaactattcttctgggcaaaataatcaggaggcaataaataaataaataaataaataaaatagataccaggtcttcaaaattagaaatagcatttgcttcttccttgtcctgcttccaagcatctatgagtcatccatatttcagaagcaccacagcctttttcttttccttacctctcattaaaatcattatttctccccctgccaccagctctcttattaaggaaaaaaattcttgaacatcgcatttggctgtgcagatccagagaggagatgatacaaagcttagtgcattaggtcactgaaaaatacaattattttcccaggttcttgcagtcattttgctctggggaaaaatatttaatagggaatgtcagagtaaatgtaattaagttacttttcagacatgtgctttttattttttattgaacttactatatactaggctgctggagacaggcaaaagcaacacagccttaccctgtcagagaagacttcctaaaacaggctccacccgttcatttctgagatctgcgtcaggatacagtctatctcaaaagaagttatattcacacctcggagctagaggaccttaatcctttaaacagtacatatattgaatcagattatttggttgcaagcaacagattttttttttttttttttgagatggagtctcgctctgttgcccaggctggattgcagtggtgcaatttcagctcactgcagcctctgcctcccggattcaagcaattctcctgcctcagcctcccgagtagctggaactacaggcacctgccaccatgcctgactaatttttgtatttttagtagagacagggtttcaccatgttgatcaggctggtctcgaactcctgacctcagatgatccacttgtctcggcctcccaaagtgttaggattacaggcgtgagccactgcgcccggctgcaacagatttttaaacttaagcaaaacctatcaaaagaataacgggaaagctcaatgttttgaagtaagaaagagagtgacagatgaagcctcgaaccacagcactccaaggatgctagtgcaggaactaggggactatgtctttggggcactgacattggaaatgactcatctccaaacacctttgatatccagtgtttctgtttcagattcacattgactggccttgagtctcatgctttgcctggtgaacagggagcagggagtctgtgattggtagatacaccaaaaccacatgaagcaggaagagggcagttccccaaagaaaggatcctaagaaaacaaaatcaatacattcctcctgaaatttttgcattcagtttccagtgttttacttcagtaatttaaaaaattttttgtcccagtttcaacagtagatccctagattggtgaatattagcatgatcaggtcaggctagcaaaactgggccttgtttcctctccttttaattgagaatgtccatctccacccttctctcttaaacaactgttctaggaagcttctgtgatataatgagactgtttgggatcgggggtgggggaaattatgcaaatttattttatacaaaaaatcctagttttcatatgctttcattcattcatttaaaaaatattcaccgtgctgggcactgttctaaacaagagtatgtatcgagcaaaatggacaaaagtgctgccctcctgtagcttacattctactttgctggggaaataggcaataaacaaataaacacatactatgtcaagagagaaataaagcaaagtaagagagatagattgtatctgaaagaggatggaagggggaaaagaatttgcctttttaagcacagtgattagggtaaacttcatggataggtgacatttgagaagaaacctaaagaaagtgagggaaggagcaatattgattcctggcagaagagtttacaggcacgaacagaaaatgaaaataccctcaagtggcaagttgctcaatagatttaaggaacaataaggaagcccaaatggctgagcaaagtcaaccagcgagagagaagaaggatatgaggaaatagatcttgtgaggcctcatagcccattgcaaggactctgaatttactccgcaagagacagaaaaccatgaccaggcattgagcacaggagtgacatgacagtcattctcactgctgtgaagaagacagaaggggttagggaaaacaactaggaggctgtctcaataatctaggtgaggtgagaggggatggtggcttg

SEQ ID NO: 42428 - DNA, 2300 bp, Homo sapien
gcaatgtggaagaattgctttaccataggagagagtgaaggaaagagaagcagaggtgaaaggcacagagaggtcaatgggcccaactccttgcagggccagcttcatgggcatgtggcccacgcagtctcataaggtcccgtacttggtttaatgttctgctgtggccatcttgaagctctcaatcattttcaaacaaaggacactgcaaattacataactggtcctgaggcgttggttccaatatttccttaaacccagtgggatcctcacccttcctaagactgaatcattcagctcttctttagattatgtgagattcttccaacaaattatctttcatgttaagcttcttagaggtagattcttttacttgcagccaagaaactggactacactgtggtcaaagacacaagatgagagaaataacacaattctagaggctcccagccccagtgcatgcccaaaagatagagttctgtccttgcccctgaggtttctgattttttcagaactgcacctgcagggcctggatatttcccccagagagtccagaaaggtctttgtgctttagaaagaacacaggctatagtggttggtatcatttagagaccaacactgattttaggcatcttgtaatataatttaaggtggtatccttaatattgcaaattcaataggcttatatgcaaactgtaccatgctcatttctctgaataactgaaaagcaagcaaataaatgaaacaaaaaaacattccaatataacagtctaattgggaaagggggtttcatttgtgtaatgcccataatcagctttaaaacatatccatggattatcatttgtttatagaggaaagtaaaatggccagacttaatgataaggtgatcagtggcttagttttgctagttccagcatggttatctttagactgatattttggctgaactatagaacacagaacttgccaacattttttaaagcgaaggagtgtttgcatctttcagtttgatgtagtggcctgaggttcccccaagtccctttgaactgtttgctcttgaaccacatttgtttcttatgcatttggagtaattgatgcgctccgaaaggaagaaggaataagagggagcatgtgagattagtcttcaacagaaagaacaaatctagttgaaacaaaaggagaaaagtgagatcatccagaggcgactgtcactctcaacacacacaaaaggcttctttgggcacattgcagaccttcccccaaggtattctgcagaatagccgccaggcaccaacaacaaagatgtgactcgggcatgagatgatggataagagggaacagagtaacagaggttgtgttcttgagacctgtgtcatcttgaaaaacgccctgaattcagcattgtttatattcctcgggaatatgttagtgcctgtaggtgatccatgtaagaaattctgcgcggtatctgcctggtctcttacaaacactctgaatcctacgtcctgaaaaaggtacagaaggatgtcaatcccggcttcccctcccagggaatcgtggaaaacatactatatcaatgccttgatgtgtcaccttgtttcatccttacactaggtctgtaaagcaagtatacagtgtccttggttgcagttcagtcattcggcgtatatttattaagcacatattgcctgtgaagcactgtgcttctgggatactgcagcgaataacacaggtgcgatcccttctcctttggggtttactttctcagagaaaaaaaaaaaagaaataagtagataaaataattgccagggaaattggggttatcatggaaaggtacaaggagtttgagagaaggaaaaagagaaggggcagcccagctttccacctctgcctctcccgggcacccccaggctccattctctcctccctatactcctgcccagacagcacccacctccccttccgcccccttttccctccttctttccctcctctctccgctccctctctgacctgccgcccctccctccgctcccctgcccttttgctcgaccagggcccccgggagccctctacccccaccccatggcccaaccgtccgggcacgagccccgcccgagctcaccgcccctgctcccctctccgaccctttgagccgtggccgttgccagatgtccacaatgggaaacgaggccagttacccggcggagatgtgctcccactttgacaatgatgaaattaaaaggctgggcaggaggtttaagaagttggacttggacaaatcagggtctctgagcgtg

SEQ ID NO: 42429 - DNA, 2300 bp, Homo sapien
tcccaggatttaaaacatgatggaaactttagctcatgaatcaaaacaaccctccagagctaaaagccagctgtatttgcataacaatttagcagatccaaacagcagggcaaggtcgggtgaaataagttgccaaggtcatggtcatgaagtagtattagactcagaaaggctgatccccagtgcttgctccaccccatggatctctcctaccctccttctaaacgatactgtgggataaaataaaattaatctactgtatatgtgcaaaccacaggcctgcccttaactctttccttaccttctagtttcagattattcaaatcatggaggaaaagattagatcacaacacgttgacttcactgtattaccatacaaatgaaataacttagtacaaactgtgatctggggactcttgatctaaactgggaactgctgttgactgcattttaaactctaaaagtattttgaaactctttaatttcttgaactgaaaaaattgctttgaattcactttgttttaattctgagaacctaaaaacagggattctttaaaaaaaaaatgcaaaggctcacatgccagaaagaaagaagctgaggagataaaaatgtgtaaataattcttactttaatacccttagctagaaaaaccttaaaagcgacacatccagaagctcgttaagtcacagcctctttgaacctatttcagtgaaccaccgaatttcagatccctcaggtgcgactctgaattcagaattctcaccggctcatagtcctattttccttcttaggttttagggaattttgcaaactatgacgcccagcctttgaggggagaggactttccaggggcgcgggatgtgccactcgggaatctcaccaacagtgggcgtttagcgcagccaagcgacaggcaggcgccagggctcagcaacagggaggcgccggctgaggcggggagaactttggcgctcggagcagagccaccctttgctggccagtcgcgttgctcctccgaggaagcaagcggcggtggcgactcggtggaaaaataacgaaagaaaggcagagaggaagtagcgagagaagagagaaaatgaagtcggcgctgggggagcctgcaggagggtggccaacagtggaggaaggtggatttggcttcttttccgcaccccgggcgtgaaagccctctccaacgcgaccccaggaaataagtgggtctcgcctgggcagaaaaggaaaagaatccaggcgagagcgcgtcgctcctctgtcactgctgcccccgaggaactccggctgcttctcatcccggccgcctcgcggggccggacgcagtgcccgaggcgccctgcagatggggcgggcagggaacgggcgctccagctgcgggtgacaggcgccggcccgcccgcctgcctgctcagcgcagtgaccgggcgggcagaggatgccaggcggagggacctgggagcgggatctgagactgccggaggcgcgctacgctccaacttgcatggcctagagaccgctccagctcctgggaccgcttcaccgagtggagtgaagctgcgcgcgggacctggaggcggagacctcaggcagcggctgcagaggggcgagccgggcgcaggagggggcgcgctttctccctgcgggtctcagtaatgaggagactgagtttgtggtggctgctgagcagggtctgtctgctgttgccgccgccctgcgcactggtgctggccggggtgcccagctcctcctcgcacccgcagccctgccagatcctcaagcgcatcgggcacgcggtgagggtgggcgcggtgcacttgcagccctggaccaccgccccccgcgcggccagccgcgctccggacgacagccgagcaggagcccagagggatgagccggagccagggactaggcggtccccggcgccctcgccgggcgcacgctggttggggagcaccctgcatggccgggggccgccgggctcccgtaagcccggggagggcgccagggcggaggccctgtggccacgggacgccctcctatttgccgtggacaacctgaaccgcgtggaagggctgctaccctacaacctgtctttggaagtagtgatggccatcgaggcaggcctgggcgatctgccacttttgcccttctcctcccctagttcgccatggagcagtgaccctttctccttcctgcaaagtgtgtgccataccgtggtggtgcaaggggtgtcggcgctgctcgccttcccccagagccagggcgaaatgatggagctcgactt

SEQ ID NO: 42430 - DNA, 2300 bp, Homo sapien
tgtttccaggatggtcctacaacaatgattgacacatactaggagcttaataattggttgttgaatttaagtgaactttgaaaatgatgacccttgacacatgaaaaaggtggacaagaaggagaaagggaaaaggaaaaagaagatttggggaaaggagagagaacaattttgtcagatatgctcagaccaccatgatatggacaaagaaaaccaagcagcaaaaggaaaacaggaaggacaccagtgaattataatgggaaagcccggaaagaaacaaaaggaagcccaagaagggagagccattcttcattgttcactcagtattcaccaggtttaagtagagttttatcacgacctggtgcagtattatcctcagaaacttgggaaggtcttctgtgtaagagcagttcagttattccctcaaggcagtcatgaacttgtgaaaaacctaatgcatatagagtgattctaggatgctattaatgatcagatcaaactattctccatcatcatgtttttcttgagaacctgatctgaacataagtgtaatgccaaggactaaaagtacaaggactaagcatggtcataacctagaaagttatacattatattcttcaaaacacacactcgagtacagacaaatatacctccttactacacaattagtagatacccaatcttcctgcaatgcaaggacctcagacttctacacttttattattcagatctcaatcagtggaatcctgtggatcaagggggaatttccagcacactagaggcagcttttctccattcatgggatgttctctcaggcttcaggagggtttctttccctcctcattcagcccactactatgattttcactttttttctcatgggagacttttcttctctagcaacccagtcttgcaaaaacgatgccgaatgtctggtaaatttgttctgagatacctttaaagatctgggctggggaaaacagcattcactttgcaagcttcttgggatttttacttaactagagtctcttcttcccaggatttaaaacatgatggaaactttagctcatgaatcaaaacaaccctccagagctaaaagccagctgtatttgcataacaatttagcagatccaaacagcagggcaaggtcgggtgaaataagttgccaaggtcatggtcatgaagtagtattagactcagaaaggctgatccccagtgcttgctccaccccatggatctctcctaccctccttctaaacgatactgtgggataaaataaaattaatctactgtatatgtgcaaaccacaggcctgcccttaactctttccttaccttctagtttcagattattcaaatcatggaggaaaagattagatcacaacacgttgacttcactgtattaccatacaaatgaaataacttagtacaaactgtgatctggggactcttgatctaaactgggaactgctgttgactgcattttaaactctaaaagtattttgaaactctttaatttcttgaactgaaaaaattgctttgaattcactttgttttaattctgagaacctaaaaacagggattctttaaaaaaaaaatgcaaaggctcacatgccagaaagaaagaagctgaggagataaaaatgtgtaaataattcttactttaatacccttagctagaaaaaccttaaaagcgacacatccagaagctcgttaagtcacagcctctttgaacctatttcagtgaaccaccgaatttcagatccctcaggtgcgactctgaattcagaattctcaccggctcatagtcctattttccttcttaggttttagggaattttgcaaactatgacgcccagcctttgaggggagaggactttccaggggcgcgggatgtgccactcgggaatctcaccaacagtgggcgtttagcgcagccaagcgacaggcaggcgccagggctcagcaacagggaggcgccggctgaggcggggagaactttggcgctcggagcagagccaccctttgctggccagtcgcgttgctcctccgaggaagcaagcggcggtggcgactcggtggaaaaataacgaaagaaaggcagagaggaagtagcgagagaagagagaaaatgaagtcggcgctgggggagcctgcaggagggtggccaacagtggaggaaggtggatttggcttcttttccgcaccccgggcgtgaaagccctctccaacgcgaccccaggaaataagtgggtctcgcctgggcagaaaaggaaaagaatccaggcgagagcgcgtcgc

SEQ ID NO: 42431 - DNA, 2300 bp, Homo sapien
ccctcccagaccaacagactacaccaagagagaatgaatatagccccaacatgtggaggttcccagcaaaggtgcaatccaagacatgcgtcagggcttcgcatatctagatgaaagctttacatatgacttgcaacaagaaaacaactatggtttggaagaccaccctttggcgtcaaacccacattaacaatggatgtggctaagagtacattttctgaagcaaacttaaacatgactgtaaatgctcaagagccttatcatttggcaaataataaaattagtgacatgccgtttgtacccacttttcttcagacacctctccagtctagtacagtagaccaggctaagagagttagaagctatacatgtcacctcatgtccccgcagcttttaaaaccatccatcttgattctgtgatacctcctccagcttctgaatcatctccaagcaggactgctgcttgtaagaagtctttgataatcacagcatgtaattcagcagaacttcagtcaacatcaagtaagaaaaaaaaatcgtacaactaatcggaatctgaaagcatctaagctctgccacccttcaggttctttcaaacaaaaacaaataaacaagctccaactagagcctcaaaacttctaagccaaacaagcaactcaaaaccactaagacaaataaaataaaacatgtagaatccaaatagcaatttacattttggggattctttggcctctaatcattattctagtcttcttaaaccaaagatatattaagtacatagctgtaacctgccaatttgttttttaaaaaacaatctgttctgtaatagttttacatgctgtttgctagtgtactgcaggctctattgaaaaacctggaaattttaaaattaaaatgtgaaagcttctgctagtttgactcttccatatcctggttccaaatacatgtcatttgagcgtacttatctcgagtaaacacaaatgtttgcttacccatttcggaggcctgccaaacgctctaatcatgttatttatccccctgtactttggaaaatttataatattatgcttagcaggcaagaagtgtgctttcctggtttaatcctgttagaatctctatttattgtggttattagaacctcactccttttcactcgtatctcctgtgaatatggctattattttaactaaagacacggtaattaatggaagttcgtagtctgtaaatagtgttctggccaatgctttatatatttaaaaggagtatacaaaaactttgtgatgaataaaggagtttaggcttctaataaataaatattttaatatttgcattatttaaatagattttaacctttaatgtttctcatcccttgaattctttgagtttaggtaatttcagtaaaaattctcaggcaagatacatagtttaaagctttttgaggttgccacataatgtggaaaattctatccttaaatgataatttagaaagacaattatttcactaaattaaaatgttttaatttatgaattttgagaaattttaactgggtagcaaaaaataggtaatatggaagtaaacagaaatatttttatacagttcatggttttttgtttgtagtaagttttaaatttcacaaatactttgttgaggtaaaactggtatataataagctacacatattaaaatgtacaatttaataattttgacatatatatgtgcgttatatacacacacacatacatacagttggtcccctgtgtctgtggttccacatcaaaccaaattcaaattaaatatattcaaaataatagtagtatatacagtttatgttctaataaacagagatagacattgttgaaaatatttctaatttttttagaatatttagatatggtttggctcttttccccagccaaatcacatctcgaattgtaatccccataattcccaattgtcaagggcgggacctggcgggaggtaatcagatcatgggatgtttcccccatgctgttctcatgatagtgagtactcacaagatctgatgtttttataagtgtttgacagttccaactatacacactctctctctcgcctgccaccacataagacatgcctgcttccccttccgccatgattataaattttctgaggcctctccagccatgcagaactgtgagtcaattaaactgttttgtctttgtaaattatgcagtctcaggcaattcttgatagtagtgtcagaatggattaatacaattggttttagattattttagatctcagtatcaataattcaatt

SEQ ID NO: 42432 - DNA, 2300 bp, Homo sapien
gcacatgctacataaatatgtgaaacacagattcactgaaattattacaagcttgaagaatctacaattatacatattgattttaaggatgaaattataagccatgtttctgagttaataacgtattgcaaattcttaggaaatatatcttgttcaaggacaacctcccctaacctttacattgttattatagaaaaaatgagttaatgtatacaaataactgtataatctttaaaacactaaaaatgtgtatatatacacatttataaagtagaatatttatgtttgaagacatgatttctaagcttaaaaacaaccacaaaaacattaatatatggttatagtgctgatgctggatagacattagcaatatctaaagatattatatatatatttatatggctgatatatataaatatatggctagtatattttgatatatttctattaatcctcatattctatagtagacttttagtcttaatatttgatatgttgtaggcaaaattttaaggctcccaacaacttcagagtgtgggcagaatttgtgaataacaggagatagcattcccattatatgctacattatgaagtacaattgatccttaagttaaatacattatctaggttgcttgaatctaagcatttgagccctttaggaaacaaaggttttcctcaactgatagtggttaggaaggctgaaaaaagataagactgatttaactatgaggactccatgaaatatttcaggtttgaagatgtagggggatgtatttgagaaggaacttaggcagtttctaagcacagaaagcagctcatagctgacagcaaggaagaaaacagagatatcagaattactgccacaaggacttaaattccaccagctgaaatgtgcttaggcactgattctttctttgagtctccaggtaagacacagttcagctgacaatttgatttcagtcttgtgagaccctaagcagaggacctagttaaacctgcctaagcttttgaattataaaattatgagataaaaattgagtattgttttatgtcttcaatttgtaataatttgctatgtagcaatagaagactgacacatgctcattataaaaatatcattggctaagatattactagatcatacacatttaattaagaatgacaataagagattaattaaagagatgataatgcagaaggcaagtattgcctgttgcccagtcattatttagattttaatgtatgatgatagagtcaatgcattagagattaatattttcaaaagccactatagactataaaatgctcaacaaaatattatagaattagacattatactttacttattaaactatcacttttcaggaaaacttcagtagatattctcattaagtcagatagtgaagtaatcagatcacagaaatctaaattatggaaaggctcccatcccagctccaatgcctctataatttatcattgtgtaagatcagctagaaactttgagtcaaactactaatatttctgtagtttaccccttatagaagcttatatttaataaaattatttcttaagacaaaaaatagctaagatattttaaaaagagctaaataagagcaacatgtttaaatgcctctctatatagtactagtattcatttattagtggggtaagattatgagtttaataaaaatgtactaactcatatatttataagtttaaaaagcatatagctttgtttaaaatattctatgtatgagaaaacaatacgtttaagatgagagaaagacatgtaaagttatgcattgatttaacaaaagttacaggaatgaaagggaatttaggattacagctgatcctcacagataaatgtttagacttaccttttttccatatcagtcaataaattacaattacatgaaaaaaataaaacaaatattttattaaagtgtaaaatcaattgattacttttaaaactcctagctagatttagtcagtaataagtgaaagtaaatattaatcttagaattttagagaacataaaaacacaagtgactccttttgttttacccctttaattccaagtgctcttggcttctttatgatgtcacctttcaacatcaccagtttgaacttacaatacttaagtcctggcaagtcataagtggggaaaatgtctctcccaagattgtaagtcaaattttatgttttaaaataactgaaatactcgttagctttacatttaacttctttagtatgaagagatatttattatattattatgatgccattcataagcaaaa

SEQ ID NO: 42433 - DNA, 2300 bp, Homo sapien
gacatgaagtggctcaggactaggccacaaggcacacaaaaccatgtcctcaagcacagcaggtaattcatttcagttaaagaggctgtgccctcatctctctttacagagaaatctaccaaagaggggaacaatccatcacctccctcttcctgggagttagcttgagacactggcagtggctagagttggaggcagtaggggtcaggggagacaagcaggagaagcagagggagcagggacaccccaaaagaggagcaggagatttctgtaaaagagaaagtgtctttagttctccaatttcctctccattttttctcaatcttttcttctgggattctatatcatttttttccccttagaattcacttcatcgcataaatgccagtaattcatttgcttgggatatggcctgtctaagaatctcagtaaatatgttaatttatccacataaaagtaactgacttttgtgtggccacagaccttcagctgtcccttagtttagggtgtttcagacatccttgtcagaattgttggggaaatgtaattaaaaccaaaatttccttctgggcacagtggctcacacttgtaatcccagcattttgggaggcataggtgggtggatcatgaggtcaggagttcaagatcagcctggccaagatggtgaaaccccatttctactaaaaatataaaaattagccaggtgcggtggctggcgcctgtaatcccagctacttgggaggctgaggcaggagaatcgcttgaaaccgggaggtggaggtcgaagtgagccacgatcgcaccactgcactctagcctgggtgacagagcgagactccatcttaaaaagaaaagaaaaaaggataaaacacacacacacacaaaatttcttctcaacccagaaaacctcaccttaaagttagaaaaaaagaaaacaattttattattaaataagcattaatccagaatatactgtgcatcctggccaatttcctaatagattgcaaagatataaaggattttcacccttttatataatgaaacagatacaacccattatatacatgttttccatataaacaacacctagtacttgctgtaagaaatgggagtgtagaaagtctcttctgttttcaacagggagaattatttctgatttttaacttgtatttccccttatatgtcacaccataacttccatgcttttctcttttttgccttttattctgattgattgaatttactctccttgaaatttatcatgcatctattaatatacagtgactgaattaatactttaacttcttccagaataaaggagctaaaatacttcctcctattataccccttgtgatatatgagcattttaataatttttatttgaatattttagcaacataaataagactgcattatagcttgtatacattcattgtttggtaaaatttgtacacatggcaacttttatttctcagatatttattttagtatcttttatcttttccatattactgaagtatattcttaaaattcctttagtggggatacttatgtggttgtctctaatttcgttcataaaaagtatttttgtttttttcttttttaaaattagttttgctgggttcctgattatttattgataagtattatagaattttgaggatatgattttactcttttttatttcagttgatgttgttctatagtctgctgttggttccttgcatatgagttatctttttctctgtctagagttaagacaattttttttcctaaaatccctcctacattttgtttacaaaataactctaactggatttatttttaattataaggctctgagtacaatgtgttctctttatctgttgattcatgcctaccatcacgttgtaagcaaaggtgtgactgttatactgtccatttaactgaacttttaatagtatgaaatgcctcctttatctctatggcagagtctactgtgcctgatactattacagccacacaaagtttcttttggttgatgtttgtgtgatgtcatagatggaattttgctaccctccgtaataccacaatgaccttcaccccatagtgtctagtatagagctatgttacattgaatggcaaaagtgactttgtagaggtaagttgtttaaaaatttgctttatatacagataaggaagatgtgctgaaaagatacaactacatggcactgtagacttatttattctgtcttctgggaatatagcagacagttggcttagcaactctgagtggtgggctcaacagaagaacaagctga

SEQ ID NO: 42434 - DNA, 2300 bp, Homo sapien
tagcagcaattccttagtgcttctggcacgcaataagactaaaactgagagatctccacctttataagcatttttcattttaatcaatggtcttaatgggagtagttagatctgcacattcttctaaccacccaggagtccttatccaacaacagtgcacttgtgtatgttttcatccatgtgacgtaagtgtatcagctagttgttaaagtgcaaagactaacagtctgtcttaacacatatttccataccaaaaaatcactttatttcacaacgtgacaaagtccacattaggatttgttggcaaattaaaattctttactcacaaaatgataaaaggaaggagacacagctcaaagttaatgtgtaagagttaacagaatcaatacaagtgaatagctgtggagcccaggggatgcaggaatcaaggcagacaaagatatctgttgaattaaattaatgttaggtcactacccatggttgacatcacagaagtggataagcataccagagtaaacaaaggaatcctttcttaaacaaaaaacccatacaacttattttactcccttatcgagaaatattttcaaaatataagcccattcctggtaggttaagaccaattcagatgactgcattgccattccagggccaagaaagcaactttaaaaacatgacctacgctatggtctaaatgtgtccctcaaaatgcacattttgaaatcctaactcccgaactgacggttttagcaagtggcatcttgggaagtgaggaatgggattaaggtccttataaaataggcccaagcgagggcctctgcctctccaccatgcgaggacagagccagaaggtgctatccactaaagagaaagcacccctccctagacacaccttattctgtgacattccagccttcagaaatgtgaagaataaacttctgtggttcataaactacccagtctaggatattttgttatggaagcccaaaaggatcaagccattccaaaatagcattgttgcccacaccatctttttgaacctcacttagggtaacaccatacccattcggagttaagcccttcctaactcttaagtatcaacgtgcttggaaacgtgagcaatcctgacacgttttttcttcctaaagaacaatacatactaataataggatcggctaataatactagattctatgcatgaagcctagtatttaaaagcatgcaatctggagctagaccgcctgggaacaaatcccagcttactagacaagctgtttaaccttttacttggtctcatttaactcatttgtaaaacgagggcaatttctgatttcatagggttgctacgtggattttaaaaagccccttgcaatatagcctaatattcagaactcaataacatgaactgtcttaaaaggtttccagaaaaaatccccaacaggttaggtcggcttatcattacaacgctttccggtataagggagatgaatagctatttagcaccacacaatttctcctctgggctcggaacagctctcggtagactacgatccctttccgacgtggaaacttcagataaaaacgctccccgaggtccgaggccagtacggggcggagccaggacgcgggccagagtcccccgaaggacggtgcctctctggccccaagaagtacagcttttattttgcagcaatctgagccaacccgagaagattctgaagcttccaaaacagaaccgacgagaacactcatagaatgcctctccacttcctaactgtcgctttgaggagagaaaagtaagccacagccagcaccgcagactggagaaggcggagtctgcagtgtgcctaacgcgaactagagggaccgaggcggggcggggctggcgaagcgcgaggacccggggccgaggtgtggggctgaccatagagtgccggacgccggtgtgaacatacactatctgctcctgtagtgcccaggcccctgccggggagtccccggagctaccattatcgagactctcattctattgccctgcggctttaatccttcgagtgtaggggaaaaattgaaccctaaagacaggcagctcctaggcaccagcacaggaaataagcaatggaggtggggtcctttgctcgcgccgaaattcaaaggaataaatagttccggcgcgggtgttgagagcggtgtggcaggtgttgtagccgctatggtgaagttcgctttgtagcggccccggctagagagttgttctgttccctgcctttgtgacccggaggagcttttggggtgcgtcaagc

SEQ ID NO: 42435 - DNA, 2300 bp, Homo sapien
ctacagcccccgcgccccgcgccccgcctcccgcctcccgcctcccgccaggaagtctggcccggcccaaccggccgtgctcacgcacacgcctcaccgctgcctcaggccaggggcttgacgcaccccaaaagctcctccgggtcacaaaggcagggaacagaacaactctctagccggggccgctacaaagcgaacttcaccatagcggctacaacacctgccacaccgctctcaacacccgcgccggaactatttattcctttgaatttcggcgcgagcaaaggaccccacctccattgcttatttcctgtgctggtgcctaggagctgcctgtctttagggttcaatttttcccctacactcgaaggattaaagccgcagggcaatagaatgagagtctcgataatggtagctccggggactccccggcaggggcctgggcactacaggagcagatagtgtatgttcacaccggcgtccggcactctatggtcagccccacacctcggccccgggtcctcgcgcttcgccagccccgccccgcctcggtccctctagttcgcgttaggcacactgcagactccgccttctccagtctgcggtgctggctgtggcttacttttctctcctcaaagcgacagttaggaagtggagaggcattctatgagtgttctcgtcggttctgttttggaagcttcagaatcttctcgggttggctcagattgctgcaaaataaaagctgtacttcttggggccagagaggcaccgtccttcgggggactctggcccgcgtcctggctccgccccgtactggcctcggacctcggggagcgtttttatctgaagtttccacgtcggaaagggatcgtagtctaccgagagctgttccgagcccagaggagaaattgtgtggtgctaaatagctattcatctcccttataccggaaagcgttgtaatgataagccgacctaacctgttggggattttttctggaaaccttttaagacagttcatgttattgagttctgaatattaggctatattgcaaggggctttttaaaatccacgtagcaaccctatgaaatcagaaattgccctcgttttacaaatgagttaaatgagaccaagtaaaaggttaaacagcttgtctagtaagctgggatttgttcccaggcggtctagctccagattgcatgcttttaaatactaggcttcatgcatagaatctagtattattagccgatcctattattagtatgtattgttctttaggaagaaaaaacgtgtcaggattgctcacgtttccaagcacgttgatacttaagagttaggaagggcttaactccgaatgggtatggtgttaccctaagtgaggttcaaaaagatggtgtgggcaacaatgctattttggaatggcttgatccttttgggcttccataacaaaatatcctagactgggtagtttatgaaccacagaagtttattcttcacatttctgaaggctggaatgtcacagaataaggtgtgtctagggaggggtgctttctctttagtggatagcaccttctggctctgtcctcgcatggtggagaggcagaggccctcgcttgggcctattttataaggaccttaatcccattcctcacttcccaagatgccacttgctaaaaccgtcagttcgggagttaggatttcaaaatgtgcattttgagggacacatttagaccatagcgtaggtcatgtttttaaagttgctttcttggccctggaatggcaatgcagtcatctgaattggtcttaacctaccaggaatgggcttatattttgaaaatatttctcgataagggagtaaaataagttgtatgggttttttgtttaagaaaggattcctttgtttactctggtatgcttatccacttctgtgatgtcaaccatgggtagtgacctaacattaatttaattcaacagatatctttgtctgccttgattcctgcatcccctgggctccacagctattcacttgtattgattctgttaactcttacacattaactttgagctgtgtctccttccttttatcattttgtgagtaaagaattttaatttgccaacaaatcctaatgtggactttgtcacgttgtgaaataaagtgattttttggtatggaaatatgtgttaagacagactgttagtctttgcactttaacaactagctgatacacttacgtcacatggatgaaaacatacacaagtgcactgttgttggataaggactcctgggtggttagaagaatgt

SEQ ID NO: 42436 - DNA, 2300 bp, Homo sapien
ttaggatttgttggcaaattaaaattctttactcacaaaatgataaaaggaaggagacacagctcaaagttaatgtgtaagagttaacagaatcaatacaagtgaatagctgtggagcccaggggatgcaggaatcaaggcagacaaagatatctgttgaattaaattaatgttaggtcactacccatggttgacatcacagaagtggataagcataccagagtaaacaaaggaatcctttcttaaacaaaaaacccatacaacttattttactcccttatcgagaaatattttcaaaatataagcccattcctggtaggttaagaccaattcagatgactgcattgccattccagggccaagaaagcaactttaaaaacatgacctacgctatggtctaaatgtgtccctcaaaatgcacattttgaaatcctaactcccgaactgacggttttagcaagtggcatcttgggaagtgaggaatgggattaaggtccttataaaataggcccaagcgagggcctctgcctctccaccatgcgaggacagagccagaaggtgctatccactaaagagaaagcacccctccctagacacaccttattctgtgacattccagccttcagaaatgtgaagaataaacttctgtggttcataaactacccagtctaggatattttgttatggaagcccaaaaggatcaagccattccaaaatagcattgttgcccacaccatctttttgaacctcacttagggtaacaccatacccattcggagttaagcccttcctaactcttaagtatcaacgtgcttggaaacgtgagcaatcctgacacgttttttcttcctaaagaacaatacatactaataataggatcggctaataatactagattctatgcatgaagcctagtatttaaaagcatgcaatctggagctagaccgcctgggaacaaatcccagcttactagacaagctgtttaaccttttacttggtctcatttaactcatttgtaaaacgagggcaatttctgatttcatagggttgctacgtggattttaaaaagccccttgcaatatagcctaatattcagaactcaataacatgaactgtcttaaaaggtttccagaaaaaatccccaacaggttaggtcggcttatcattacaacgctttccggtataagggagatgaatagctatttagcaccacacaatttctcctctgggctcggaacagctctcggtagactacgatccctttccgacgtggaaacttcagataaaaacgctccccgaggtccgaggccagtacggggcggagccaggacgcgggccagagtcccccgaaggacggtgcctctctggccccaagaagtacagcttttattttgcagcaatctgagccaacccgagaagattctgaagcttccaaaacagaaccgacgagaacactcatagaatgcctctccacttcctaactgtcgctttgaggagagaaaagtaagccacagccagcaccgcagactggagaaggcggagtctgcagtgtgcctaacgcgaactagagggaccgaggcggggcggggctggcgaagcgcgaggacccggggccgaggtgtggggctgaccatagagtgccggacgccggtgtgaacatacactatctgctcctgtagtgcccaggcccctgccggggagtccccggagctaccattatcgagactctcattctattgccctgcggctttaatccttcgagtgtaggggaaaaattgaaccctaaagacaggcagctcctaggcaccagcacaggaaataagcaatggaggtggggtcctttgctcgcgccgaaattcaaaggaataaatagttccggcgcgggtgttgagagcggtgtggcaggtgttgtagccgctatggtgaagttcgctttgtagcggccccggctagagagttgttctgttccctgcctttgtgacccggaggagcttttggggtgcgtcaagcccctggcctgaggcagcggtgaggcgtgtgcgtgagcacggccggttgggccgggccagacttcctggcgggaggcgggaggcgggaggcggggcgcggggcgcgggggctgtagggagggggaccagtggcagagggaccttaggtgatccttagaaataaaggctagcttctgttcgaccttggagtagggcgaagaggtgtagacaggcctggagaagcgaggtaaaagcctgagtaaaagcaagaagttggagaatatgagatacatctcatctctagtaaatact

SEQ ID NO: 42437 - DNA, 2300 bp, Homo sapien
cttggaaacgtgagcaatcctgacacgttttttcttcctaaagaacaatacatactaataataggatcggctaataatactagattctatgcatgaagcctagtatttaaaagcatgcaatctggagctagaccgcctgggaacaaatcccagcttactagacaagctgtttaaccttttacttggtctcatttaactcatttgtaaaacgagggcaatttctgatttcatagggttgctacgtggattttaaaaagccccttgcaatatagcctaatattcagaactcaataacatgaactgtcttaaaaggtttccagaaaaaatccccaacaggttaggtcggcttatcattacaacgctttccggtataagggagatgaatagctatttagcaccacacaatttctcctctgggctcggaacagctctcggtagactacgatccctttccgacgtggaaacttcagataaaaacgctccccgaggtccgaggccagtacggggcggagccaggacgcgggccagagtcccccgaaggacggtgcctctctggccccaagaagtacagcttttattttgcagcaatctgagccaacccgagaagattctgaagcttccaaaacagaaccgacgagaacactcatagaatgcctctccacttcctaactgtcgctttgaggagagaaaagtaagccacagccagcaccgcagactggagaaggcggagtctgcagtgtgcctaacgcgaactagagggaccgaggcggggcggggctggcgaagcgcgaggacccggggccgaggtgtggggctgaccatagagtgccggacgccggtgtgaacatacactatctgctcctgtagtgcccaggcccctgccggggagtccccggagctaccattatcgagactctcattctattgccctgcggctttaatccttcgagtgtaggggaaaaattgaaccctaaagacaggcagctcctaggcaccagcacaggaaataagcaatggaggtggggtcctttgctcgcgccgaaattcaaaggaataaatagttccggcgcgggtgttgagagcggtgtggcaggtgttgtagccgctatggtgaagttcgctttgtagcggccccggctagagagttgttctgttccctgcctttgtgacccggaggagcttttggggtgcgtcaagcccctggcctgaggcagcggtgaggcgtgtgcgtgagcacggccggttgggccgggccagacttcctggcgggaggcgggaggcgggaggcggggcgcggggcgcgggggctgtagggagggggaccagtggcagagggaccttaggtgatccttagaaataaaggctagcttctgttcgaccttggagtagggcgaagaggtgtagacaggcctggagaagcgaggtaaaagcctgagtaaaagcaagaagttggagaatatgagatacatctcatctctagtaaatacttaaatgacttcccctcctcccggagtcaagcacaattcggggatgcaatgacggacgtaggtgaagacactgcgggaacttacagacaagtaatgaccgtctaatatcagctttaagtaccatgaaggaaaaagaaagccgagtgaaggattgtggagaggtgacatagggaggtcagggaggactccagtaaggtgacatttgagcaaagacgtgagtgcagtagagagtaagctatgtcagtatcagagaaaagcacattataggcaaagataatgggatatgtaataatccatagtctttgtttaggtagagtatgataaaagtagaaggcaagcctggaaaaacgggtagaagaaatagttaagacttcccagttgaatggtttaatttccagatagtggctaactctggtatatttttgagtagatgaacgatgtctttacatcagacaagatagtttgtcaagtggctgttttatttctatcaccctatcgttgctgtttttgcctcgtgttcattatgattccaggtttacattccacttaggtggtggtatttctgtttcgtacagaactggtttgtggcctgtttgattcctgtcagaggtttgctgacccaagacagtatcgaaaatgcatattaagtcaattattctagagggattcaagtcctatgctcagaggaccgaagtcaatggttttgaccccctcttcaatgctatcactggcttaaatggtagtgggaaatccaacatattggactccatctgctttttgctgggcatctccaacctgtctcaggtaaagtgt

SEQ ID NO: 42438 - DNA, 2300 bp, Homo sapien
tttgtttactttattctgcaactctaatgcctaatgcagcgaaattcaaatatgttgattgctaaatattggtgatgttaatttgtgaagatgctgtactacataaattatcttaattcggtatgtaagtgcaataaatgctttgttctgtttgcagcattgtgtggaattttcgagattaatgcatttattcttgtctctttttggctatttttattttttattgataacataatgttgaagtcttaagctttaacaggaaaacaggattgtcctccccattgctttgcctgccatacctagttcttaaaaccttgtttctcaaactttacatttttttaggaagtatctctacctcacatgtagccacattctagtctgctctccctactctgatttcataatcttaaaagtcttgtcagtctattataatgtttctcagattttacatagtagtgcaacttacagtcctatgaacataagaattttgctagcagaaaaaatacatgtacacaggcacatcattgttttgtttttaatggaagacacagattttaaaacatgtacacaaatgtgtgtgattatgcgttaatcctcaggtttttctctttatatatttgcaactttttcattcaggcatgacagatgatagtcacaaatttataagaactctcaatagtagaaaagctttaaagtactctactctcagtttgtctattattttataagggaactgggaaaaatacatcattatacagttttggaggatacccccatctaaaaccccatctaggttttagaatactagttcatagttttaagaagcagtgttcaagtgtataaattcttgaaggcctgacacatgtaatttaaatagttctagcatttaattatcagactcagcatttaagtttctctgtcagtttagcttcttttcctgtataatcttacgtcttattgctcaattcagtttctttactgttattagatagcactcacaaatatatacacatacaaatatgaacaactaagcggaaaggaaaagaacgagagttgtgatttctagcgttctttttttaattaccagctactgacagttattcgatataatccttcaatttgaatatgtcatattttattaaaaatacggacttaaatttcaaattcttttacatattaatcatatattagtttatactttgagtagttttttgaggagaaaatactgggaaatgactaatttgttgaaatactaatccaagagaccaaacaattaaactttgaaggttaaggtctcttagtaaaaccaatctgaatcttcggccatttaattactagcactgtctgcctcatacatcctatggtctgttgcatttttctgccacaggctcagatgaagttgaagcatgctcaacaggaattaaagaataaacaagctgaagttaagaagatggatagtggctacaggaaggatcaagaagctctagaagctgtaaaaagacttaaagaaaaacttgaagctgaaatgaaaaagctaaattatgaaggtttgcctttaaaaacatgataatcagatcatgaggaggtagtgatttttgataaaaagctaatttaaataaagaacgcaagcaagtaggaaacatttcttagcctattaacaagcattagtataagaagtgttgtaaatatcgtcaaaaaatacctaattataaaacaactcttgaatttttgagaactcagtattgagaatttcctgcttcaatcatttgaaagctcaaaaatgtcatttgtgtatttctacattaggcattcagtttgtatgttattttttggaatgaaaattgtgttatttgccgttggaaataatgtctgtttgacagtggatagaaataggaaggttcagcatgcttttttaatacttacagaaatttgtattttttgcatgctttggaaatagtggttgctaatattttccttaaaacagtagagtgagcttttaaaacttggttttaatttattatgatttatccttcagaaaataaagaggaaagccttttggaaaagcgcaggcagctgtctcgtgatattggtagattgaaagaaacatatgaagctctattagccagatttcccaatcttcgatttgcatacaagtaagagacttaagccttgaattttaacatagtaataatcaagacatttttatttaagctggaagcagtgtgaaaattttgtcgaaaccaagatttttgtatgaaacttgttgtaagctgcttttctttcattggtatttttccttt

SEQ ID NO: 42439 - DNA, 2300 bp, Homo sapien
aggttatgaaaagatgatgatgggctgtgtgtgtgtatgtgtgtaccaggcagtaattgataataacctaattaatctaagcatcttaattccttgtgtcacatgtctattcaaaacctcataaaatcaaattatataatgtcaggtttgaaaggtagctaaagttacaggggctaagcaatcaccttgtgctgggtgttcttatctaataataagtcccttacatacaaaagggaatgccattttttttcttcctaacctttgggcccttctatatgcctgcctcattaacttttcagttgtgtttctgctgaaactcccctggtactgccaatctgctcctctaaaacattaagctgctctcccttctggaatagccctgtttctctcttctcttccaaacctgccccattccttttgtgcttccagacctggtataactttgaaattctttcaggaccctcacgtgatttatttatttctcctttacttcctccttctgaggttacttataatattcaccctggccacatgatataataatattctttatcaaattgttccatgtgtagtttttgtgtttttgttattgaattatgaactttttgatggtagacatgttgtgtcatactttttccacccttacttgtgttggaagaggactgtgctcaagttaggaaatcagtaatatcatacccatattatagcagtccagcaaaagtttatcctgctttcataaaatgtttcaatagcatttattttctgaagtatactgaacagcaagatgtggccctggagtatgctggcaaacacaaaagaattaggctttcagtcattttccaggttgttaagccagtccatataataacacaaaagaaaatctatttggatcagaaatctctggatactctactaaatcactatagataaaccaatgtcttgctacacaaaatgtgccctcatctcagtggttcaacataccctgggaacttaatagacatgaagaatcacaggccttgccccagacgtgctaacataaaatttacatgttaacagtatcctcaggtgatttatgtgcatatgaaatttgaaaaattgaaattccatcaaagctaaaaattttggatagtactttgcgaaaacaaggtaaaataacttttggtgttgccatccaaagagctgagctttaagtttccctttgtacatataggccacattctgtcttttacatttgagaaaagcaaattaaggataatgagaagattcatttgcttttgtaaagtgctgcacacacatacacacaaatatgtttgactattattcctcttttttcaggtttacttaaatgaattctcaagattaactctgaagccatggtaaaacaaatagagatcatgtattgttctccaaagattctccatcatatacttgtagagctggtctacaccatgatcttgtcatagggaataacaaaatagtaagagtgggatgttagaatgagatcaacaaataactttacctttgaacagatgttaaattgcagtgtgtggggctcaatttactattatcaaatatcttccctataaaaatacacatttatctgactggaaagacattcagagttttaggcagacaaacaaatgtatgtgaacatctaacctgctttaaaattctgaacatttctattaaacgctgggtcaaaattctggttcttgttgagttgtcttttttcttctttgcagctctctcactgggcttgactaaatgaagaagttaggtttgttgtctgcaataatctaaggcttttagaaaactcaacttgggatgtcctcaacaataagaaaagttgtgtctgtatttacttctgatcctaggtagatcttcacatattagatacagggcatagaaactctaaacatcctagtgtggctgtattctaggcacaaatactattgaagataactcaatggcagagctttaaaacaaacagtctctatttcaccctagagtaatgtttattcaagttattttttacatttgttgcttggctgtgaaaatattatacattgggtcttcctttggcatcctgaaagctgggacatggacaagataaaccagacatttgtgagagaattcattcttctgggactctctggttaccccaaacttgagatcattttctttgctctgattctagttatgtacgtagtgattctaattggcaatggtgttctgatcatagcaagcatcttggattctcgtcttcacatgcccatgtacttcttcctgggcaacctctc

SEQ ID NO: 42440 - DNA, 2300 bp, Homo sapien
aggatatttaaaacctgtgagaaagagaataggagaatattttagctacttagaagcacttaacaatgtttagccatctctcaattgtagccatgaattttgcccctatctgtattttcctcttggaaattcctcttggaagttccctgtatctttctgctggatggatgcagttaatgatgagactagggaatggcaaagccaccgggtagaagcctggctccctaattcactaagtatagaagagctacctgccaactagaaaaacccactttgtattcttataaaaaataaactcctatagtgtttgagtaataatacacttttttgagtgttgatttacaagagctatttaatctaccctaattaatatattattgaaagatactaccaaatgctgagtgttctggccttcttccctcctcagcctcaggaaactggcagcaaggcttttctcacacagataagatactggaagtttcccttccctaacactgactacacagataaataacttgcagataacagtttggggggaggggatacagccttcagtgaaatacccaggtcagatcacctcacagtgaagcccactatttgaagagattcacctgtgcttacagtgcttttaacatgtttttctcactccaaaatatatttttaatgtaaacatcaataaacgcaggaaggaaagtgtattttgagggagtggtatgaagaaacctaaatcctaaatatccaagtcaatagctagaatcctgaccacttttagaattccactagcacctttattcgtatcttactttatttttctttatattatttgacaatccctgatatatttactcttcctttttttatctgtttcctccatcctggatgttccaagaggacgggactttgaattttgctcaattctgtaccccagtttctggaaaagtgcctggaacatggaaggaatttagtaaatatctgttgaataagtaaatggattggcaattacagggtttaaaaaaaaaggtctaagaaaataatttactcatatagatccagtcctgatacaaatgatttttttagtcttgcatggttacaaatagatgtctctcttctagaaaaactgaggcaacccttccgaaataactaattttaaaaagtctcccttcctttgaacagacaattccaaagctcttccacaaggcacaaccaatacaacccaggtcatggccctgcaatccctccctagtcctcatgatgtaagcaatattacattaatgtttacaataatgtaattattagcaagaataatgtaaacattaatatagattactgtaaattaatagtgtaattaattactgtaaattaacataagcattattagatgcaggaagacaagtgaatttgggggcagtggcatctatgagacataaatcctcatctgccacagaaggaagtcaacacatactatccataactgaaaatgcaataaacagcagaaaacactacttacttaaaaatacagaaacaagcattaaatgaaacagcttgaaatgttgaaggtggttactctgggaaccaacactcccggactgggaggactagaccagggtatgtttaactttgactttttcatttcaggctcgatgctgccatttctctgagctcgtggaaaatttaatctaaatcttaattaggagccttctaagatggagaacacattcattgcagagaggtcaggctcaaatacacgtctatcacaacatctaaaacttaactcggaaaaaacctccacgattttaaatacaaagcactgcacatgcacgcactcaacacctctccttctttccccatggtcaacacacccacaacccctgcacatttaccaatctacacaactgagcactggagcgaatgaggtgagtgagggcccagaaagttgaagcaggaacgatccgagccttcagttaatcctaacgtcacctctaacgtttggggtaagaacgtttcaggaaaccaagggggaaccaacgctcagcacagcagagaaagacaccaagctacgggacccgccgcgcctcccgcgccggggtggagctgaccccgccgagccccgccccagcctgcgtctgccaatgatccaggagccgctcctttccactcgggaaaccttcagaggagtctcagaaaggacacggctggctgcttttctcagcgccgaagccgcgccatgctcgtcctcagaagcgccctgactcgggcgctggcctcacggacgctggcgcctcaggtaccggccacggggg

SEQ ID NO: 42441 - DNA, 2300 bp, Homo sapien
aatcaatttaagaatgggcaaatgatctgaacagacatttctccaaaggagacatacaaatagctcacaaatacatgaaaaatgttcaacatcactcatcatcagggaagtgaggtattatctcaccccagttaggctattatcaaaaagtcaaaaaacaaagctgatgaggatgcagagaaaaggaaaatcgtatacactgttgggaatgtaaactcttagaactactatggagaacactatggagtttcctcaagaaactacaaataacccactactgagcattatccaaaggaaaagaaatcagtatatcagaaagacatcttccctcccccatgtttattgcagcactgttcacaatagccaagatacagaatcagcctaggtgtccagcaagattaatggataaagaaagtatgttatatatacacaatggaatactattcagcagtaaaaaggaatgaaatcctgtccttcacagcaacatggctggaactggtggatattatgttaagtgaaatatgccaacaagagaaagttgcacaccacatgttctcattaatgtataagctttaaaaaaagttgatttcagaaataaaaagtataacaggattctagaggatgggaaagattaggaggaagacaaggatgggagagatttgttaaacaaaattatagctagataggaggaataagttctagtgctctataccacttcaggataactatagttaataatatatagtttcaaattgctaggaggatattgaatgttctcaacacaaatgataagcccccgggggagtggcttctgtgagacctaaatcctcatctgccacagaaggaaggcaacacatactctccataactgaaaatgcaagaaatagcagaaaatgactattatttaaaaatacgggccaggcgcagtggctcgtgcctgtaatcccagcacttagggaggctgagccgagaggatcacctgaggtcaggagttcaagaccagcctgcccaacatggtgaaacgccgtctctactaaaaatagaaaaattagccaggtgtcgtggcgtgcgcctgtaattccagctactcaggaggctgaggcaggagaatctcttgaaaccgggaggcggaggttgcagtgagccaagatcatgccactgcaccccagcctgagcgacagagcaagactctgtctcaaaaaaataaaaaacatacggaaacaggtattagaagaacagcttaaaatgttgaaggtggttagtctggggaccagtactctgggactgggaggactagaccagaggtcggctgttttgctcttaaggcttacagaacgatctagtttcaaactatctatgtttaacttcgactttttcctatcaggctcggtgctgctattccactgagctcatggaaaattaaatctttattaggagccttccaagatcacagtggggtggcaatggggacagataatgcagaaaagcgaaggctcactggtctacaaatacacgtctatcacaacctgtaaaagttaaccctgtcccagcctggccaatatggtgaaactccgtctctactaaaaaatacaaaaattagcggggcgtggtggcgggcgcctgtagtcccagctactggggaggctgaagcaggagaatggcgtgaacccgggaggcggagcttgcagtgaggcgacatcgcgccagtgcactccagcctgggcgacagagcaagactacgtctcaaacaaagaaacaagttaaccctgtcaacatctcgactttaaatgcaaagcactgcacatgcacacgctgaacacctccccttccttctccaggggcaacacaagcacaaccgccgcacatttacgaatctacacaactgcgcatcggagcgaatgaggtcagggcccagaaaggtggggcaggaacgatcccagccttcagctaattctgtcacctctaacgtctggggcaagaacgtttcaggaaaccaagggggaccgaggctcagcgccgaagagaaagacgccaactgcgggacctgtcgcgcctcccgcgccggggtggagctgaccccgccgagtcccgcccctgcctgagttcgccagtggtccaggagccgcttttttccactcgggaagacttcagagaagtctcacaaaggactcggctggctgcttttctcagtgccgaagccgcgccatgctcgttctcagaagcggcctgaccaaggcgcttgcctcacggacgctcgcgcctcaggtactggccgcgggggcgcgcccgagccctggccg

SEQ ID NO: 42442 - DNA, 2300 bp, Homo sapien
cataagtcccatgaggatcccagagttgtggcggctggtaagctgtttcactaagcacgaattatttttagaacaaatgtgattcaaccaataactgtatgccttcttatgaaatgtttttccagttcgggaaagtgtcaactacctagtttctcagcagaatatgcttctgattcctgcatcattttcaccattgaaatagttttctactgaaatacaaaacatttcattaactgctctaagatgtgtctgctaatggtgcttaaattctcccaagaggttctcgcttttatttgaaggaggtggtaagttaattagttaatttgctgtgcttcttgcatttttgaaagttacatattctccactgctttaagaaataattcagttcactttcaccttggcatttcagtatctgttacacattagaagtagttgtcactatttcatcatcttggtttttcatttgttttagaatacctcttctgtattttgataactcattgctttatagcattttcttttactcaaataaggattttacatttccttgcctgacagtatttttgaattatttatataaaatatctatcttttcatcatgtctatagttcctgagattttaaaaaaatttgcttagtaaaggttattttgtgatataaaatgggatttataaaaatattagattgtttatttctttactgtggaaaagtacaatgtcatctgtattaattattgcttttacattcattgattattagtcattctaacttggaaaataatgcaattgggtcacagtgttaaaaatctagaaaagacttgttggtttatatgctgaaattgttcatttataattaattttactaatttctacttagtttggatcactaacagagatcttgggacatttatttgttttaaagaaatatttatggttatggaaacgcttgccctaataaaaatcctgcatattcattgtttttttaaattcacattttatacttatatgatctctaaagctcttgctatgttgctataagacagtaatatagtgataatttaccaactttattgaaaatgttgttacatcaataaaatagcatgctgggaacctgagaaggaaggtttctttagtactgccacagatgtcctggagttttccttgaaacatctttcatttccattttacttgatgcctctacctactaaaactagatttggtacttccgatagtgtatatttacagctatattatatttacatttttacagactatcttctgataatctgtatttacagctatgttattttatatttttaaaatcttacagctataaaatagtaaattgtgaattagctgtccaagggcaatttggaaaacaaactgtacagtttcctctcatttatcaggctctaagcgatctgcagtttatctgggctattatgcaatgtgagatattatttatgagaggcaggcagtggcagcttaaacagacatacctcctcagcattcttttccatgcagagttcaaagaggcctaagacatctcacatttatgtgaaatagttgaggcacaagtatgtggttaactacacataaattaccaataaaattaaaagttaactaaaatactacagaagacatttaatattttgcttcagactgttatagtaccttagggttatgaacatcaattacctttgagccttactatatttaaagggaaggggaagctgacatttttatcttttttaatgggtacactctacgttaccttaaaggcttccccggtttaagcaaaaatagaattatgtggtttaaatcatataccttattcttcatacttagctccaagtagattatgacttttcctaaaacttaacatgacagagatttgccttccagggggtctaatttgaagaggaaagtaatttaaatgtataggtttatataatagcattgtatttttctctattttattcattctttcattctcttcgatgactcccagcacctgcgcgtccatcttcattcttagccaatgacctttccttttacttaacagagaaaataacaatcagaagagtcttcataagttcccaccccgtctgcccgctttctacagccaaccccacatgccctgccttctctcctttcactgtggatgaaccgcccgtgccccaagcaaagacaaaccctccacttgaacactcacttgctgaaggatgtggcttaggcagttttcctgtctcctgaagccacagtattccccttcaactggattcttctcctcagcatataa

SEQ ID NO: 42443 - DNA, 2300 bp, Homo sapien
ggttaaacggatcacctggcagctcattgttctgaatatgttggcatacagagccgtctttggcatttagcgatttgagccagacaaaactgaattacttagttgtacgtttaaaagtgtaggtcaaaaacaaatccagaggccaggagctgtggctcatgcctgtaatcctagcactttgggaggccgaagcgggtggatcacttgaggtcaggagttcgagaccagcctggcctacatgacaaaaccccgtatctactaaaaatacaaaaaaattagctgggcttggtggcacacacctgtaatcccagctacttgggaggctgaggcaggagaattgcttgaaccctgtaggaagaggttgtagtgagccaagatcgcaccgttgcactccagcctgggcaacaagagcaaaactccatctcaaaaaacaaattaaatccagagatttaaaagctctcagaggctgggcgcggtggcttacacctgttatcccagcattttgggatgccgaggcgggcaaagcacaaggtcaggagtttgagaccagcctggccaacatagtgaaaccctgtctctgctaaaaacatagaaaaattagccgggcatggtggcgtgcgcctgtaatcccagctactcgggaggctgaggtgagagaattacttgaacccgggaggcggaggttgcagtgagcccagattgcaccactgcactccagcctgggcgacagagcaagactccatctcaaaaaaagctctcagaacaaccaggtttacaaatttggtcagttggtaaataaactgggtttcaaacatactttgctgaaacaatcactgactaaataggaaatgaatcttttttttttttaagctggcaagctggtctgtaggacctgataagtactcacttcatttctctgtgtctcaggtttcccatttttaggtgagaattaaggggctctgataaaacagaccctaggattgtggacagcagtgatagtcctagagtccacaagtctgcttttgagtgatgggcccatgtatctggcacatctgcaggcagagcgtggttctggctcttcagatgatgccggtggagcactttgaggagtcctcaccccaccgtgataaccagacattaaaatcttggggctttgcatcccaggatttctctgtgattccttctagacttgtggcatcatggcagcatcactgctgtagatttctagtcacttggttctcaggagccgtttatttaatggcttcacatttaatttcagtgaacaaggtagtggcattgctcttcacagggccgtcctgttgtccacaggttccagattgactgttgccccttatctatgtgaacagtcacaactgaggcaggtttctgttgtttacaggacagttctgcagatcgatttctcaacagcttgggaagatttatgacaggactggacaccaaaaataatgtcaaggtaaaccgctgtctttgttctagtagctttttgatgaacaataatccttatgtttcctggagtactttcaactcatggtaaagttggcaggggcattcacaacagaaaagagcaaactattaactttaccagtgaggcagtacggtgtagtgtagtgattcagagaatttgctttgccaccagacataccaggtaaccttgactaagttacttaacctatctaaacctcagttccctcatctgtgaaatggagacagtaatcatagctatttccaaactgttgtgagaattcaatgagttaaaggtataaggtcctcaccacagcgcctgcccacatagtcagtgatcactatgtcctgaacactgtaattacttcgccatattctctgatcatagtgttttgccttggtatgtgactagaatttctttctgaggtttatgggcatggttggtgggtatgcacctgcctgcaggagcccggtttgggggcattaccttgtacctggtatgttttctttcaggtgtggttcaataacaagggctggcatgcaatcagctctttcctgaatgtcatcaacaatgccattctccgggccaacctgcaaaagggagagaaccctagccattatggaattactgctttcaatcatcccctgaatctcaccaagcagcagctctcagaggtggctctgtaagtgtggctgtgtctgtatagatggagtggggcaagggagagggttatggagaaggggagaaaaatgtgaatctcattgtaggggaacagctgcagagaccgttatattatgataaatctggattgatccag

SEQ ID NO: 42444 - DNA, 2300 bp, Homo sapien
gggcatcgtgtatgagaaggaggcacggctgaaagagaccatgcggatcatgggcctggacaacagcatcctctggtttagctggttcattagtagcctcattcctcttcttgtgagcgctggcctgctagtggtcatcctgaaggtaaggcagcctcactcgctcttccctgccaggaaactccgaaatagctcaacacgggctaagggaggagaagaagaaaaaaaatccaagcctctggtagagaaggggtcatacctgtcatttcctgcaatttcatccatttatagttggggaaagtgaggcccagagaggggcagtgacttgcccaaggtcaacccagccgggtagcagctaagtaggatgagagtgcagggttcatgctttccagataaccacatgctcaactgtgccatgctgtctcattggtagtggttcatggcagcatctgaaagctatttattttcttagatatattgggtggcgattcttcctaagtttctaagaacaataatcagaaggatatatattgttgcaggttagactgtctggaagcagaggctgaaatagagtttgatgtatgggtatttatgagggctcaatacctatggaagagatatggaagatgcaggattgggcagagggaggagttgaactgtgatatagggccaaccccgtggggcactctagagaatatgcagcttgttggagttgttcttcatcgagctgaaacatccagccctttgtgctcccccaaggcctccctcctgacaccacctacctcagccctctcaatcaatcactggatgtgggctgccctgggaaggtcgtgccccagggcctacatggctctctgctgctgtgacaaacccagagttgctgatgcctgaggccgtctactgacagctgggcaacaaggcttccctgaatggggactctgggcagtgcagttttgtgtctgaaccatacattaatatatttatatccgaattttctttctctgcaagcatttcatataaagacacatcaggtaaaaataaatgtttttgaagcaaaaggagtacaaagagataagaactaactaatttaatactagttaccatctgttacaaatagttcctactgattgccaaggactgtttaaacacatcacatgggcttcttcttctatcctcactaacccttttaacagacaaggaaatgaggctcaggaaggtcaaggactttattgaggttccacagtaggatacagttcttgctaaaagcaacccctccctcatgctctgttatctaactgcaaggggaaggtcagtggcagaggtagtggtcccatggttggtgcataagagctgctctgagacaactgcatgctggtgggtcctgcagacatgtacccatcagccggagataggctcaaaatatccacaagagtttggatgattgtgggaatgcagaatccatggtgatcaagagggaaagtcaagttgcctggccattttccttggcttttagacagaaaagttacgtgggatattatctcccacagctcttctgtggtgccaccagtcatagtccttatataaggagaaaccagttgaaattacctattgaagaaacaaagagcaaactcgcccactgaaatgcgtagaaagccctggactctgttgtattcataactctgccattatttttctgcgtagttttgggtaagtcacttatcttctttaggatggtaatgatcagttgcctcatcagaaagatgaacagcattacgcctctgcattgtctctaacatgagtaggaataaaccctgtcttttttctgtagatcatacaagtgagtgcttgggattgttgaggcagcacatttgatgtgtctcttccttcccagttaggaaacctgctgccctacagtgatcccagcgtggtgtttgtcttcctgtccgtgtttgctgtggtgacaatcctgcagtgcttcctgattagcacactcttctccagagccaacctggcagcagcctgtgggggcatcatctacttcacgctgtacctgccctacgtcctgtgtgtggcatggcaggactacgtgggcttcacactcaagatcttcgctgtgagtacctctggcctttcttcagtggctgtaggcatttgaccttcctttggagtccctgaataaaagcagcaagttgagaacagaagatgattgtcttttccaatgggacatgaaccttagctctagattctaagctctttaagggtaagggcaagcattgtgttttattaaattgtttaccttt

SEQ ID NO: 42445 - DNA, 2300 bp, Homo sapien
gaggggaggggaggagggagggggggaggaaggaaggaaggaaggaaggaaaaaaagatgaaaaaagaaaaaaacaagatgaaacagaggcagaaagactttacgtaaattgctcatcatgtggttgtcaagtttgaccccaaaacccaatttattgaccaaggttattctttgactgaggcaagggggtccgctctcctgggccttgggctttagaaagctcatctctggcctttctgagatccatccctttctttttatttttcttgacacggagtcttgctctgtcactcaggctggagtgcagtggcatgatctcgactcactgtaacctctgcctcccgggttcaagcgattctcctgcctcagcctcctgagataacaggcgctcgccaccacatctggctaatttttgtatttttagtaaagactgggtttcatcatgttggccaggttggtttcgaactcctgacctgaggtgagctgcccaccttggcctcccaaagtgctgggattacaggcatgagccactgcgcccagctcagatccatccctttctaagggcaaacagtccatggtgcaaaggggccatgccacccagagttatgagtacctgggactccagaattccttgcctggtggcctccacatgcacttccagggcctgcttgggcctcttctatgggtctgtcctgagtgttgatagaaccactgatgtgagtacctgggcttgagccgtggcctggagatcctgttgactgtagcatggagggggcttgtgcagctgaatgtctgtatgcaggtggtgggagttctggaatatgatggagctggaggtgggaagagaagtaggcttggggcagctctctcatgccacctcattctggccaaaactcaggtcaaactgtgaagagtctaaatgtgaatctgcccttcaaggtggctacaaaggtatctttgtcaaggtaggagaccttgtggcctccacgtgcacttccagggcctgcttgggcctcttctacgggtctgtcctgagtcttctatgaatctgcccttcagggcagattcatatttagactcttcacagtttgacctgagttttggccagaataaggtgacatttagtttgttggcttgatggatgacttaaatatttagacatatggtgtgtaggcctgcattcctactcttgcctttttttttgcccctccagtgttttgggtagttttgctcccctacagccaaaggcaaacagataagttggaggtctggagtggctacataattttacacgactgcaattctctggctgcacttcacaaatgtatacaaactaaatacaagtcctgtgtttttatcacagggaggctgatcaatataatgaaattaaaagggggctggtccatattgttctgtgtttttgtttgtttgtttctttttttgtttttgtggcctccttcctctcaatttatgaagagaagcagtaagatgttcctctcgggtcctctgagggacctggggagctcaggctgggaatctccaaggcagtaggtcgcctatcaaaaatcaaagtccaggtttgtggggggaaaacaaaagcagcccattacccagaggactgtccgccttcccctcaccccagcctaggcctttgaaaggaaacaaaagacaagacaaaatgattggcgtcctgagggagattcagcctagagctctctctcccccaatccctccctccggctgaggaaactaacaaaggaaaaaaaaattgcggaaagcaggatttagaggaagcaaattccactggtgcccttggctgccgggaacgtggactagagagtctgcggcgcagccccgagcccagcgcttcccgcgcgtcttaggccggcgggcccgggcgggggaaggggacgcagaccgcggaccctaagacacctgctgtaccctccacccccaccccacccacctccccccaactccctagatgtgtcgtgggcggctgaacgtcgcccgtttaaggggcgggccccggctccacgtgctttctgctgagtgactgaactacataaacagaggccgggaacggggcggggaggagggagagcacaggctttgaccgatagtaacctctgcgctcggtgcagccgaatctataaaaggaactagtcccggcaaaaaccccgtaattgcgagcgagagtgagtggggccgggacccgcagagccgagccgacccttctctcccgggctgcggcagggcagggcggggagctccgcgcaccaacagagccggttctcagg

SEQ ID NO: 42446 - DNA, 2300 bp, Homo sapien
attttatgaagcactgccacagtctgttacgcatttatctccttctacagttccaattacagaataagcactagctactacacggaacggcagcactagccaaaaagatttttctaatctgagagaaatgctcccatattgactctgcaaagagaaacaactcccctttccttgactataaagaaggaagacagatggcttcttgtttaggactgtagttttactttcagcctcctccccgagttaaaaacaagatgtacttttctggctttgagggaaaatctcaagggaatgttttttattcttggctgcactgaataattcaacaaacatttgagagagctgagggagatacaaaggagaaaatacttttccttgttctcagggagtttacaatctaattctggagtttacaaccagaattgggactagaaccattagttttatgtcttcacttgtatttattggtttaatggttatgggaaacacatgtaggattcgccagctccgtggtatggtggaccctctgattaacctgaaaggaaactagaaagaatgcagaagaattcaagatctcaatcagttgagtacttgctgacctagcagcactttcttatgttatttaatcttgaccacaagcctttgcagtcatccctgctaccagcatttcacagaagcggacaatgagatttggagagataactcgtccacagtcacgaactcaggaaatggcataggaaaacatcaattaggaattcttcttccctggccctttctgtagctgtccccttacaggctaccattccaactttccttggcttagattccctttcagtgcatgtaaagtcaatttaattctgtgttcttttcttccctctatactttaactaatctttaaaacttgatgtctcatatttggtgaatcagtccttttggaagtctcactcccttgcagctttgcaaataaagtttttcttttctttcctgtggctgtcttttgagacattctttgacaagatgaaatgacatatgaaggctataacagtgcctgataatgtggggttttttttaacatcattatctttagttttatttctttcactttttaactgttttcacctcatactgtatttcctaacgactcgtttggaattgtaaatttcttgaaggtagttaccacgtctactctaacttgttgctacttccttgagtcttactgatttagcaacaggaacttggtaagtctcttttgctcgcctctttattcccagtactagtcactggaacgtagtgtgtcttcagtaagtatttttaatatgaataaattaatgtccccttattgttttttgtagactatcctgtataagaaagtttagcttagatccagtatggctttgacttgcgagcctggataactttttgccttttcctcatttctggctatttattaccatttcaaccttgggaacatttcattaggttcttggtccctttcaagcctcagtttccacatcagcaaaatggggacagtagcaacagatgcttgtttcttcccgtcttcttatcacctattccttctccaggaaaggtttcttgtgtacgctttcctctggagaaaaaaaacagccgacggggcggtaagaagccatcaggatcctgagttgtgcgtccagtagggagagggagaagtcccgcttgcctcctagatccggaagcaatccggcccctttttggcagcgagttggcccggtctttggctgcctcagaccgcgttgccctccagcctcgaggcagagagctgcctcggtgccacagctaaataagcccggcgccgcgcagcctctgacacgcgcggaagggcccggccttgttctggctgccgccgccctgccaccagcacggcgctgcactgggggcggggagtctgatgggagacgcgcgcggcgctgaggaggcggcggcccgggagagggagcgggagagggactgggcgcgggaggcgggaggcggggggacagagggaggcgccgccgccgccgccgcccgcccctttccgctggggagcagctgctgcagcaggagcagagcaggagacgcgtagccgccgtcgccgccgccgggggatgtggccggcgcctgcctctagccgcgccgcctcttgagtaccagccgccgctgcagccgccgccgccgcctagccgtgcggtgccaggccgcgccctccccgggcgcccgccggctcgcatgccgaggggctccggggcgtagctgcgcgcccggcgccgcctccgggctccttc

SEQ ID NO: 42447 - DNA, 2300 bp, Homo sapien
ggatcacctgaggtcaggagttcaagaccagcctggccaacatggtgaaaccccgtttctactaaaaatacaaaaattagccgggtgtggtagtaggtgcctgtaattccagctactcaggaggctgaggcaggagaatcgtttgaacctcaaaggctgaggttgcagtcagctgagaccatgccattgcactccagcctgtgcaacagggcagaactccatctcaaaaaaaaaaaaagaagtattcttagtagtgatggtggtggtgatggcaatggtagcagtgatagtggtggtggtggtggtagcagtagtggttgattcaaaggttttgtgacacatttctcaaggacctgattgttccctgtccagaatctgtctttgtgcaattcattatacagggtcaaaggcatagacatgcttagtcagacgcccaggatagaagaagggagaattagtaagagaatgcttgtttctactcagaagttgccagaaacaattctctgtatgccctgcttccttgttatcagccatggaaacagtccacaaaacctacttctaaacctcatctttctgcctggctttttttctttccttctatctgcatagatagaacattaatgggtttggagtcactgatagggtcacacacacatttttttttttttttcgtttggtaagttatacctgaccttcatgccgggttcccagtccccttgctgcgctgaagtgtgcagtgttacttgatctgcaaaggcctctgtagtagcccccttttttttcctacttatttttttttcctttatagtttccattttagcatatgtattgactttaccttttctgcttttcagtttgttctcctaatttttatattaggttatatttcctgttccagatttgaaaccacattttgcatagcaacagagtttaactgtgtgaaaggctattgacagatgcatgattttataaaacttcctatggactcagtggaattgaaccctggctggagattcattttaggtggaagcattccttcttgtactcccttccttgatccgtgttattgcacttagcttatctcaattgagaatgtttagcccttactttctctttgagcaaatgttagcatctacaatctttatcatctcatctactttataacattaaaaatacatgctttggcgtgctttctaattaatcttcccttttctaaaatacaagtatacaggatgtaaagggtataatttcagatttggggattattttatctatctgtaatggacagtatttaaactattaataaacaatatttactgccgttatatcagttcaaaagtaattggcattctttctaaagatgcggattctgaaaggtaaaataaattaaaaatcactttattttaacacccagcgatgactgtagttgaaatgttggtgtatttccctctggtccccatttaactttgtatattcagttgtatatattcattgatatctataatatatattcatttttggaattatataattctgttcatatgaattatatataatgaatgaattacatttattaactaaagtttacagtttatatataaactgttattcatgctgtattatatagcagtattatgatattccaataattttttttggtacaagtttgacaaaataagaaaaaattaatgatttgaagaaaactaaaatagatgatttctgattatgaaatatgcatgtgcacaatacaaacatttaaatattagaaaaatagatcatgaaaattataagtcctacaattcccctattcccactgttagtctgttaataagcaatttttttaaaatgtatttatgatgagatttttatcgtggaggaatgtggaatagatgttctttgctctaggcttagtcaaatatgcagggacccacaatgtgttttgtgaagtaatatctcagtttttttctccatgctttaggtatgtattctttttggatccatgcaacctggacttgataaaccggaagattaagtctgtagcactgtgtgtagcagcgtgtccaaggcaagaactgaaaactctgagtgatgttcagaagtttgcagagataaatggtgagacattaggccatccaaatctatgtcctgtcaccttgttctctttgttaaatataaatttgccctagtgttaaataaattatcaaggaaccttagataattgaagtaattttggacttccttgctaaaaaatattatagtcacccagggagcttgttaaactccagattcctgggcccctc

SEQ ID NO: 42448 - DNA, 2300 bp, Homo sapien
tgagagttctggtcattctcttttaaaatcatctattatcatcctaaatttgaaaagaaaaaaaacactgaacatattgggcatcctgttcctgtataattttgtatcatcgatttatgggtgccctcttggatggtgatgatgatgatctgaagagacttacagagtgcttactcctactctttcagctaaccaatggagaaagtaagagagagagatggagttacaggcagggtgcaaggttagaagaattggggcttttatagttgcctagcaggaaaaagaaaacaggaaggcagggccgagaaaaatagtgggtactgaaaacaagaaaaagacatcagtatccttaagtgaatatattttatgttcaaggttggaggcaagtgagttaaacagagactaaatcacacatgatagggtaataaataaagaggatggagttatagataatcatgaaacagagaggattttagttttgaaggatagagaaccaggctttattttaaaaatatggttagaagagtccttaggcagagatattaacttgcagagatggcatccagacaacctcagaaaagaggcttcatcatgacaaagttgtcagtttaaaggtttctgtcacacatcagcttctattgacttagaaatttacagttaatcctttttttttttttttttttttttttttttgagacggagtctctctctgtcgcccaggctggagtgcagtggcgcgatctcggctcactgcaagctccgcctcccgggttcacgccattctcctgcctcagcctcccgagtagctgggactacaggcgcccgctaccacgcccggctaattttttgtatttttagtagagacggggtttcaccgtgttagccaggatggtctcgatctcctgacctcgtgatccgcccgcctcggcctcccaaagtgctgggattacaggcgtgagccaccgcgcccggccagttaatcctttttgattctcataatatttttaactaaatctacttcacttaaaggtattctataatttaatatctttttgcatcattagtgaagcactttttggttaaaaaaacaattatttgaatacctgtaattcaagcatttcttagaatgctgtggcttcctgcgctttctgatacaatatcaaacctttggcattaactttcactaataccattttggaggttgacacaaatacacagggatgcaagaggcaattttaaaaaacaaatattcatgtcatattgttatgtcatcattttttgatatatttgctaaagcaagactaaggcaaggctagatctttaaaattatattattttaacgttccaccaaatatgacagcatgaaagatgttactttttcttaccatcaatggtgctcatttactaacatttaagggaaactaatacatagtgtgcttatattcttatttgaaaagaagcatttttcgaggaaggaaacaaggatagtgttttgcttcaggtcatacaaagttgctttgctgagattagaaaccttgtagtgcccaaccatgtaattttatccactcattggaccaaaatatagtgccaaccaagactgaggaacacatttgtatcattccagttaaaaatgtagttgtagctgggacttaaagttctgtgaacatattttcatggataccatttaaaaaaagttgtaagaacaattctggaaatgtgggattcacgttaacgatggctaaattttaacataatgcacatataagtgtgtatttatgcatggacatacatatggctctcatagaatccgagtaaatcacaaccaaaggcatattcgtagttctttgcttaaaatctcttattgattagtgtatactgtcctctcagaagttgaaccatgttgtaacaaaacaggttaatgtcacagtttacacatagctctagtctttcacaagtaaaagtttcagtccatataagcctaatataaatgactaagtaattggttattttacatctttttagacacagataatcttagattaatagtaactgataaaaagaaaatagcccagaattatgtgatcctaacaagtccagtatttttcacttgttaattattttctgttctcatgattatgtgtaatcttttatgcagagatatcacattagatatacttttccccttatattattacattataagcatttccatatattagtactcatggttactgttttaaatagctgcctattatgctgtttgttgatgtctcagcatgactttgtttatatgagaggta

SEQ ID NO: 42449 - DNA, 2300 bp, Homo sapien
agtgtttgaaaattcatgcttaaataattgataatataagaagagttttattaaatataacaacttttaaaagctttatatgatgcctttgaggacatcaaaatgcataatagtacaattcttaatttcacaacttttcaagtgatagttatttttgtccctttatgaaataccacacagatcagaaggtttgtggcttggggtagggacctattgccttctacttaactgccgtatttctggatttgtactttatgtgcttcttctttccttccttgatattttcctaggcagtcctgttcagaatgagcaaggctttgtggagttcaaaatttctgggcctctgcagtacatgtggtggtaccatgtggtgggcctgatttggatcagtgaatttattctagcatgtcagcagatgacagtggcaggagctgtggtaacatactattttactaggtaagaatatgttgttattagaaaactcgagttcatctaagggatggtgtccgcaggctggaggggaagggaatcagactggggctggcaggagtttcatttctttaacaaaagaattagaaatgaatatgacagagtgttatatatagttgataattctgggaggtggtcaaatgagagattgttgttttattctttatacttttctgcagttgtctcataaaatttattgcgatgtcacaaattgtatttagcagaagaataaatcttatagtggtgccatatgtacttttgctttatataaaagtccatcaaaggacaacaagtctttttagtttgtttagaccggaacaagtgtgagttccctttgctaactttagagccaaatatgaaagctttaggtctcataattttctattataattagatgccaagtctaaatttaacatctttttaaattctgttttctgatgaccccataagtattcactaataaaagctttcagagcacagttttatttaacttgaagtattagagcatcagaaccccatgaaactaccatagagcaatgacattaattttatatagcatgtctgtagcatttgtaatagttatatatcacttggccattttgtcataaagctaaaataagaatgatgagctgattttttttttcactgcgttggactctaaaccatacctgtgtttccatcctgatctaggctttgttttaattgtctttttggtcattttttaaatagggataaaaggaatttgccatttacacctattttggcatcagtaaatcgccttattcgttaccacctaggtacggtggcaaaaggatctttcattatcacattagtcaaaattccgcgaatgatccttatgtatattcacagtcagctcaaaggaaaggtaaggggaaaatgcatttctgtactttctgtgggcacattccagacctcagttctgcatgtagtaaagcacccaataatgttaaatacaaagttgtgttttcttcaaagtctttacaaggcaaaatccagcccttctcccttgtctcccactcatgcactccatatgctctggcaaaattcatccagtcactagtaactaaaagtatcctgtgctgctcttcctctctgttgactcacataccttcctccttagaacttcttcccttccttgactgtgggaataacatgcacttcaactagtttagctcaaattctactcctttgtagaaacctttcctgattcctcccatctcccaaacaatgctgtctctttgttctccactctcataacacttagtatctatactatattctgattctaaccttttttgtgtttggtattttttttctcctactagattgtaagttccttgcaggtgttataaacttcactgtatatgcagtagagactaaataaatatttaattgaacttattaaaaataattcagtcattatgttttaaggagaaagtggacaagtatggaggctttgaagcataaattgtgatttttaaatttttatttatttttctaacgtttgaagtcttctatgtgacagtttgattctttggtttttttattatttccatttttcccccatccaggaaaatgcttgtgcacgatgtgtgctgaaatcttgcatttgttgcctttggtgtcttgaaaagtgcctaaattatttaaatcaggtaaaatattttaaaaataaatctaatatttactttcaaagataggttcattgtttcttctcccaagataaacttaattgaaagatgttatgtttttcttgtggtattgtacattgtgccttgataaagtatgtc

SEQ ID NO: 42450 - DNA, 2300 bp, Homo sapien
ctacccacccagccttagccaagctcttcttttcccttttgtaactttcatttcatttcttgtacatctctgtccagttaaaaaaggatgtattaagtgcatactatgtggcagactctgagctggggatacagatatggggtaaaagaaattcagccctcaaaaaaaaaatcacagtacagtcagggggatccatgtggagatgtaatgacaacattgtagaataaatgctgtttctcaaacacagagctccttctctccacaaggcctttgtatttgttgttcctactttctagaatgttcttccctagatccttgtacaattcctcttctcactttatactcaggtcatttccaagagagatcttccctgacatttctatgaaaaattaaaccctcccaattctctgaatccatttgccttatttatttatttaggagctggggtctcaccctgttgcccaggctggagtgcagtggtgtgatctaggctcactgcaacctctgcctccaggactcaagtgatcctcccgcttcagcctcctgattggctctggctacaggcttgcagcaccacgtctggctaatttttttttttttaatttctgtagagatggggttttgccatgttgcccaggctggtctcgaactcctggactcaagtgatccactcattgggcctcccaaagtgttgggattacaggtgtgagccaccatgcctggcctaagttttaattttagcacctataaccgtctagcacgttaactttttttttttttttggttggtcttctatactagattgtaagctctgtgagagaaacagggccttgcccactactgaattttgtttgtagaactggtacagaataggtactcaatatgtatttcccttttattcattcatcataaatgactgtctaattgaacttttgtgagcctctccagagtcatccaaatggaagatgaggcctgtctgcttgaggaagaactttctcaagcctactaaattccaagctttctaaaatcttcattgatgcctcaggccacaccgagcaggttctaactccccactaagaatgactataatgggcctggcacatgccctgtaacccacacctgtaatcctagcaatttgggaggctgaggtgggcggactgcctgagcttaggagttcgagaccatcctaagcaacatggctagaaccagtctccgctaaaagtacaaaaaattagccaggtgtggtgggggcgcctgtaatcccagctactcatgaggctgaggcacgagaattcctggaacccgggaggcagaggttgcagtgagccaagatggcaccactgcactccagcctcggtgacagaccgagactccatctccaaaaaaaaaaaaaaaaaaaaaaaaagagaatgactataatttattcactactaattatgtaccatacgttatttaatcctcacaatcctctgcaaagtccgcattatttctctcattttacagatgaaacaagctcaggcagactgacttgctcaaaatcatacaggtagcgaggtgccggggaggatgggtgggtccccgggaaaaactgtgccaggccccaaagctcatattaatcccacacccacgtttccgccactctcatccctatatccctcctcccacgtttccaccacatcccctaaaggtcttttcccacgttttcgctacatccccaccccagcccttttcctccctttggaccgctgggtccgctcaagcctggctgcccctcgaaggatagtgtggggaggggcttcagatgcgtgctgggtggagggtgggctaatccgtctccagcaccagatactctttccttcccgggccctccgcaccggccggctgctggatgcccagtggcctatttcagggccggagagaccgctatcgctggaggaaaaaggatgggggaagggagtgcagcctgcagaggcactagcggtagacagacgggcggcgctccccaccctccacggctacttcccgggagcagtcagccgctgcgcgcaggcgcggtgcgctcctcagcccctcccttctgcgggccgccctttcaccctggcaaccgcggcgtgactacggcgcgcgcggtctgggcgcggacgggtggggccgggcggtgccggtgcgggctggggcagtgcagtgagtagcggtcttggggtgtgcgatctcgctgagcctcctcacacggttcgtcgtctcgggttcgagcccagtgggcttagccactcgccatggactcccagaaagtaagcggg

SEQ ID NO: 42451 - DNA, 2300 bp, Homo sapien
taattttatgggaccacttttgtatatgtggtctgtcattgaccaaaatgttgttatatggcttatggctcatgaccatatgtgcattcagtgttataatttccctctaagcactattttcgttgcattcaacaaattttgataagttgtgttttcattttcatttagttcaaaatattttaaaatttctcttgagatttattctttgactatgtgttgtttagaagtgtggtttttatatttttagtagagatggggtttcgccatgttggccaagctggtcttgaactcctcatctcaagtgatccgcccccctcccaaagtgcaaagattacaggcatgagccaccgcgcccatgctagaagtgggttgtttaatctcaaagtattttgggactttgcagctatatatctttttctgttaagtgatttctaatttaatcattgcatgatttctatgcttttgaatttgttaatgtgtgttttacagcccagaatgtagtctttgtcttggcaaatgttctataggagcttgagaaggatgtatattctgccattgttggttgaagtagtctgtagatatcaattacatgcagttgattgatggagttgttgagttcaaccatgtacttagtgattttctgcctctctcccatcacttgtatcattgttgtcatttatttcacttatgcagcagtatgtgtaagcacagatacaccacacacattcaaataaatagttgcccttattgttttgaattaactgttactggttagatcagtcaagaataagaaaaataagtttttattttaccttcacttatccttctccattgctctttgtttctttgtctttaaagaactttttaaaaacatttcttcatagcatgtctattggcaacagatttcctcaatttttatttgtctgagagagtttttatttctccttcactactgaaggataatttcaaggtatacagaattgctcctctataggtaaggtcccctcctccgcccccacctggcttctttcaagtgttttccttgtctttgattttctgtggtctgaatatatgcctagatacagtttttgtttatgtgtgtatggcagggagcatttattttggttgatgttccctgagcatcctagatctgtagtttggtgtctgatattagtttgggattttctcagtcattattgtttcaaatatatcttctgttcctttctgtcttcttcttctgtaatttccattatacatatttactcctttcgtacttccacagtaaattttggatattctgttctgtggggtttcttccaatcttttttgtctttgctgtttcatcttgcaggtttctattgagagatcttcaaactcaaaagattctttccagtcagctattaagtccattaaattattcttaatttatggtacagtgctttttatctttagcctttctttgcggttttttcttagaatttctagcgctccacttgtattgcccatctgttcttttatgctgtctactttctccattttatgctctctgctttctccatgagagccctcagaatattatagctgtttttaattattggtctgataattccagcatttctgccatatctgagtcttgtaattttttcttgatgaccagacatgtattgggttaaagaaactgatgtaaactggcctttattaatgtggtagtaaggtgtgtgggaggggcagcattctgtagcaccataattaggtctcagtcttttggtgagcctgtgcctctggaccgtgaactttgcaagggacttctcagttttccccactccttattcctggatttttcggtggaacaggatggctggagtgggctggggttggtctgggtatttccctttgcccacatggagtagctcattggagttggatatttccctttccccaggtcacttagtctctgttaaaaccccaacagattagactatgattaaatagtttctcttaagggaacagaaactctgatgtatttcaaaatacttccttttctcctccccctgctgtggaagcataaggggatttttctctgttagttattcatggtgagaacctggtaagctcctggaggtaaaactcacaaatgtgtggggacactcctatgactgggtctccttggagctggactctcagacattctgctgtattccttaagtaagtacaatttcaattaaaatttaaataaaaattttgccaagggattataatctcaagcatttgagatagtttatttccctttcatttccaaa

SEQ ID NO: 42452 - DNA, 2300 bp, Homo sapien
aaaatggccatactgctcaaagtaatttatagattcaacgctattcccatcaagctaccattgactttcttcacagaattggaaaaagctactttaaacttcatatggaaccgcccgcatagagaagacaatcttaagcaaaaagaacaaagctagaggcatcatgctacctgacttcaaactatactacaaggctacagtaaccaaaacagcatggcactggtaccaaaacagatacatagaccaatggaagagaacagagacctaagaaataaaaccacacatctacaaccatctcatctttgacaaacctgacacaaacaagcaatggggaaaagattccctatttaataaatggtgttgggagaactggctagctatgcagaaaactgaaactggaccccttccttacaccttacacaaaaatcaactcaagatggattaaagacttaaagataagacctaaaaccataaaaatcctggaagaaatcctaggcaataccattcaggacataagcatgggcaaagacttcatgtctaaaataccaaaagcaatggcaacaaaagccagaattgacaaatggaatctaattaaactaaagagcttctgcacagcaaaagaaactgtcatcagagtgaacaggcaacctacagaatgggagaaaatttttgcaatctatccatctgacaaagggctaatatccagaatctacaaagaacttaaccaaatttacaagaaaaaaacaaccccatcgaaaagtgggcaaaggatatgaacagacacttatcaaacatatgctaacaaagatattaaaaaaaatgctcatcatcactggtcattagagaaatgcaaatcaaaaccaccatgagataccatctcacgccagttagaatggcgatcatgaaaaagtcaggaaacaacagatgctggagaggatgtggagaaataggaactgttctacactgttggtgggagtgtaaattaattagttcaaccattgttgaagacagtgtggcgattcctcaaggatctagaactagaaatatcatttgacccagcaatcccattactgggtatatacccaaaggatttataaatccttctactataaagtcacatgcacacatatgtttatcgggtcactattcacaacagaaagccttggaaccaattcagatgtccatcaatgatagactggataaagaaaatgtggcacatatacaccatggaatactacacagccataaaaaaggatgagttcatgtcctttgcagggacactgatgaagctggaaaccatcattctcagaaactatgacaagaacagaaaaccaaacgccacgtgttctcactcataagtgggagttgaacaatgagaacgcgtggacacagagaggggaacatcacacatggggcctgtcggggtgggggtctagaggtggaatagcattaggagaaattcctaaggtaggtgaccggttgatgagtgcagcaaaccaccatgacacatgtatacctatgtaacaaaactgcacattctgcacatgtaccccagaactttaagtataataatattaaaaaaaaaagagaaaaaaaatcacacacaggatttgggtctggagcaagagtcctgagacaggttatttaacctgttagaatttgggggactttcattaaagaagtggtatttaggccggttcttgagcaagtgggaaaatgtatggttgttagacttgcagtgaaaggcggaacagccatagcaaaggcactgaagcagatggtgtgagtttaaacaacattttgactggtatatttagctatatagtgctctctaggagttagaaggctagaaaggcagattaggactaaatcaagaaccagaatgtcatgctaagtcgtttgtaagtagtatagaagtaaatgatgatttttaaatagaggaatcagagtaagctttatcttgtaataatgaaaaagatgaattggacagtaaagaaattatttgggaagctggtaaaacagtccagactagaggtagctgaagaggcttacttaaattcagatagttaagtggtcagggtgtcctttagggaagtggggtgagggaggggatgggaggagatcatgcttgacataaaacttattataagttgtttcttgcaaaagtgacttaggattggaagtctggaatgctgcaatggaagagttttccttacttaacttttctctgaaattaaactgccaatgtcaatagttatgtctgtttttcttttctccatgcttccctttatttctttact

SEQ ID NO: 42453 - DNA, 2300 bp, Homo sapien
gataatttttcccttttcctgttacttttaattataatttccaaatatacagaaaagtagaaagccagtgctttgtgctcatcacctaatcaattgttaacattttgccatgtttgtgctatctattttgttttaaaatgtcacctgtaagtatgctatatgcatccatgatggcttttaaaaacagccacattctgttaacattcttagcaaaattaacagtaattctgtactattatctaatggatcagtccatactaaaatttcagttgtctcagaagtatctttttacagttatcttgttcaaatcaagatctagacagggtccacacattgtactccgttacatctcttaaatatttgattttacaatagttccctctgcttttaaatgccatttatgaaaaaaactgaggaatttgtctggtagaatgtcccgttttctgaatttagttgcttctctatatcctgtattagatctagagtttgagtaaatgcaggttcaatttttaggcaagaatccttcacaggtgtggctgtgtactttctatcacatcaggaagtacataatatatgcttgtcccaaatttagtgagattaagatcagtgggtttaggtgatgccagtctattataaagttccccatcaacctttcaccttaattttatcatctattgatgttgccctttcgattattttattaggagttacaaaatcgtgattgttttatcatcctccatttattagctggaactcttataagtactttggttacactaaaattcaattcatacaagaaaggcaggataaatgcttgatgttttcccttatcaagttttagaatatttaatcttcaacttggcaatcttcaatcacgactgaattttattttttaaggagtcattataaactcaagaatttttatatttgatgtgtttcaatcaatagcaagtatgtgatgctcaagttttcccatgtcccatcacgttagcacctgtgttaatgatgccattaagctttgataacttacttcctcttggtgtaaccttccacttttttttattaacctactgagtacctacccgttctgagtgcattggatgagaggacttcaacagtaagcttgtatgtgcataggaaatttctggaaggaaaaacaaaaagttggtaaatgtcataacctgtaggaagtgaggaagattttttcttccttttctttctgtactgatagaattaaaaacaaagcttagaaaacaaatatatgatgggagtattttccgttttgtagaaataaattataattacagtaactggtttagtgaattatggttttcaaaaatttataagaagattaatatctgagccttaacaaccaccttttggattacaccgttaaaagaaccaaagtgagaggatcgcttgaggccaagagttcgagaccagcctgggcaagatggtgaggacgccctcccccccacccccgccacaccccgccctgctagcccccaacgtctctacaaaaaaagaaaagaaaaaagttaatcaggtacaaaattgtatccagccttaaactggagggcaacaggtcgctaaatcttgaatgtcataaaggcacctcaacttcatgaggaatagtgaacgcagctgctattttccactctatcccctagctctactaattgtatccaaaccaaacttcagggagttatgctgaatccctctagcaaagcacacgcactaaaaaaaccactcgtttatcagaagttcacatttaacgggcttggaaaacggctcagctgctgcctccagttcatcttccgctgtcgaaagcgtttcagaacttaaactctcagattgcctcagtgcgctgctgtagttgtcaattaggcaagagataaaaaagggctttggctaagtggctagattataaaagcgaggaatcgccagggctcagtgaacttctggcggtgaggatgcgacaagagtcacaggaaagccgaggctggggctggaccgtgggaacgtcccagcaggaaccaagccagcctccgccgctcagcacttgacggcggcttttgcggcggttgctgtgagtgccgtaaagcggagcggctgcagcctgctgttgagtgaggtaaggtacgggaggctcaggtcggtacccggggatgggtgggcgccttcagacaggtaccgctggcgactcgggtgcccttaccgggcatcctccagcattctgggcacctgcctaccccttggtgaggaggccggccacaggctgagcgcgctccgggctgggt

SEQ ID NO: 42454 - DNA, 2300 bp, Homo sapien
tctttttttttttgagacagtctcgctctgtcgcccaggctggagtgcaatgacgcgatctcgactcactgcaacctccacctcctgggttcaagtgattcttctgtctcaacctcctgattggctctgactacaggcgtgcgccaccacgccctgctaatttttgcatttttagtagagatggaatttcaccgtgttggccaggctggtcgtgaactcctgacctcaggtgatctgccaccccccccccccccgacttggcctcccaaagcgctgggattacgggtgtgagccactgagtcccgccaatcattaaatatttattgagcctttaatatgcactagacactgagctaaggtgctttatgtgtatcatttcatgtgtcctcacaatgatgcagtactcctgtactgatctttacttatgaggcatttgaaacacagagaggttaagtagattgctcgtcacacagctagggtgagtataaccaacagccaaaccggggttctggccttggagcctgtgctcttgaccaccatgcatatggttccactgatggctgagttacgtgaagactcctgtagagtcagggcttggaaagggaagatctcacctgctgtttaaagaaataggtaagtagagagtggggaggaaattcaaggaacagaaaatgacaatgtgcgaaagtgtagagttgggaatattcatgagtcttcggaggaactagaaagggcccagtgcccagaggagctgagcgtggagcaggcagcagaccaatagcagtaagccaagaacatcaaactgcctggggctagacttgggcttgtttgccagtgcctcccaagtgttcctattagcacatgttaatccaagccacttgaaaaaagggactcttgcctctaagagtgaaaaatgcctgcataatgctcggcagtatgtgatgataaaccactctcctagacttggaaaggtcatccaatgcagccccaaagaggcccaagtatcttctacagaatccacgccaaatcaccactcccacctgccccttgtcttttcatttttgcgagactaaatacccccacttctgttcttcatacaccagggtttcaagacccttcatcattctgttcctgctcctctaaatatagtccagtctggatattttagttcttacagagaggggctgaatcctccaggtgaggtctgccagctaacaagagagctgtattgtcttctctattccaaattttattttattaacgaaacctacaatcattttctttttttacttcattctgataatacattgttgattcatattcaactctctgttggtggccgggcatcgtgactcacgcttgcaatcccagcactttgggaggccgaggcgggtggatcacctgagatcaggagtttaagaccaggctggccaacatggtgaaaccccatctctactaaaaatataaaaactagccaggcgtggtggcaggcgcctatagtcccagctactccggagactgaggcaggagaatcgctcaaacccgggagctggaggttgcagtgagctgagatggtgccatggcactccagtctgggtgacagagtgagactccatctcaaaaaaagaaaaaaacaaaaaacaaaaaacaaactttctattggccaaacatatgttgcatttatacataaactcaatcaatattgtacctgattctgaacaattaggaagagttggttataaaggaagaaacaggagtattgggacaaagcaatctttcaactggaggcttcaaaacagccagagagaaaaagctgaagggtgttgttcttaccttcccctgttgtttttaagttaaaaaaagaaattatgcataattcatagcgtcactgatgcctcgaaaggtgagaggcatatgtttgtgtccctgtggggttgttttcttttttaaaaacctgaaaatgaggaaatgaatctcgtaagctctgagtcgagaaaatctaacatctcaggttcttggcaggacatgtgataccaatcaggcctcttataagatattggccctgagggccctttctctttccatctcaggaactcaaacatgaccaggaagatcttcacaaataccagggagcggtggaggcagcagaatgtcaacagcgcctttgccaagctgaggaagctcatccccactcaccctccagacaaaaagctgagcaaaaatgaaacgcttcgcctggcaatgaggtatatcaacttcttggtcaaggtcttgggggagcaaagcctgcaacaaacggg

SEQ ID NO: 42455 - DNA, 2300 bp, Homo sapien
gtaaagtgcttgatttacttccttaaaaaaacctctgatgttattcattttgccttattgatgttaataatggatttaatggtaccccagaataatactggtatagacacacaattcagtagtgtcttaaagattacatcatatatttttttaagtccaaagactaaccatatattttgcaaaatttaagactgttaaaatgtaaaatatttaaagaaataatatccaggctgggtgtgagtggctcacgcctgtaatcccagcactttgggaggccaaggcgggcggatcatgaggtcaggagttccaaaccatcctggccaacatggtgaaaccccgtctgtactaaaaatacaaaaaaaacgtggtggcacgtgcctttaatcccagctactcgggaggctgaggcaggagaatcgcttgaatcagcgagttgggggttgcagtgagccgagatcgcgccactgcactcgtctggcaacagagcaagattacatatcaaaaaaaaaaaaaaaaaaaaaaaaaaaaaacaagaaaagaaaaaaaagaagtaatatccaaactctgagcctaaattcgcaaaactaaaattccaaaaataagcgaatgtgtaaaaagtatggaaagaacagacttaaacaggaaagtataaatattcacaggtggtttttttccccttagttttgctagaaagtgtgctacaggtctaaagacttttctctacgggaagtgcttgcttagaaaaccacacgtgaaaagtatttgaacaagtctattctttcttgataagtaatgaagtgtagagatttactacaattttcctacgttttaaacacttagtgtttagggcagtatttctgacatccagcaaaatgctggttacatagtaggcacgcaaaaaacattttgttaaatgaattaaaattaatgaatacatattcagataaaaaaaattctccttttgcagtgcatacacccgtgaagctgtcacctacctagcagctaatcacgtttctccaatttcctggtgccagcataatctgttcacacatcaaataagtgtgccaagctagttttttttcttacccaaacctattccttcttgtttcctatttatcagaatgcaaccacaatcctcctactcacccgttcctcattttatttgacaaatgcttcctttcccgcctgtacagactgacactcactgacgatattctgcttctacccatgtttcccacaattggtctcaatttctgctgccacagcctccactaccttttgcttggaccagtgaataccctctgattttccgttgtcagtcgcttctcatcaatctattcttaatcttgttgcttcgttgcacctctactccctcaccttccaccaaacaacccagttagcgtagagattaggagaagagattctggctctgagcttaacatagtgattgatcaagaatttaacctctggagccaaactgcctggctttgtctgccattcgaggacttttcccaacctcatttctcactttgtagtcaacccaaaacacctccctccatctcccacctagcttgtgtttctcacttaacttttaaagtccagctcacatgtcactttactcacttcccagaattgtaatcttcgtttcgaactgctctcgcacggcagctatacttctcagtacctgcttttgtaccattatgtgcgttttttctctttttataaaaaatctctttcagggaacgcatagttcttgaggtcaggatattattgttttatttttatatctccagtaagtcacagtgtgacttgcactgtggttgctcgataaatgttaggtgaatgacatcaatttacagaaataaatccaactctgagcgtctccccttgaggaccgtgttttgttcatctgcacgctctccaggtcctgcactgcgcccaggaccaagaagacgctggacccttactaggagaaccgaggcaagagccggctggagccgcggggaacccgctcgccccgcccacccgcctagcgccggtgagcctgcggctcccgcgaagcgcggccccgccccctcggcgccagggcgcacgcgcggagctggagccggcgcggaggagcgggcggccgcggctgtgccctctcctactcctcaccgcgcgagcgcggggaaccagtagccgcggctgcttcggttgccgcggtcggtggtcgttatggattctccatgggacgagttggctctggccttctcccgcacgtccatgtttcccttttttgacatcgcgcactatctagt

SEQ ID NO: 42456 - DNA, 2300 bp, Homo sapien
tccagacctaagtcattttggtaatttatgtctctctcaggaatcatctatttcttttagacttccaagtctattggagtaaatgtttacattatattgtagaaaatttctctggattctttggtagttaattcttaaatgttatctatttcacttgaatcttctggatcttaatcactttatgtcctatggtaatttttttacactccatatatgtctttttttcttctaactcattttgaataagatacatttgttcaggctcagtagatggagtgagtagcttgtattactctctatttatgtggtcagcattcctttttcatagtcagaactgaagctaatatgtgtgtactcctcctactccaacaccacttcttttagatttttacttagaatatgtatgcattacttaattggcaactttttcctatccccccagtgattgattctctagaactcacacctacagtaaactgtaattctcatatatcctactgccagagttcttcatatatttaccctctcagacgtgttactccttgagactttattttggtatgcactctgccactaacaatacctcactccgtactttcccaccatttatatcggatcttttgtactgtctgcctagatcttaaacaatgccaccagaagcaaaatgataaaggggattaactcttttctgcctaaggtgtgaaggactgcatcccatttttgtttggttcaggttttcggctttaaaatcccaggaaagataatactcctccagccttctatgtaacttttgcttcataagcaaagacataaaagacatcaggtaatacaacaagtgggattaattttttctttgtttacctccatttgtctcgtgaacaaacatgtgaatcctcctgaacccttgcgtgtgattggctatagttttcagtttgggctgatagtataagttttttttgtttgtttgtttttcttttctctgtctcctgggcattttattaggaagttggaatatgctgttttggtggttgctagtgagaagccattttaacaggaagtttacatcattacttttaatctatcttatcttacattttaaatgtctcttaagtcttcattaaaataaacacatttcttcaatcctacattcacatcaaaccaccattttgtgtaagacttcctgactacagtaatttctattacacacaaaatgtattgttttactctaaattctgccatgactattctgctaacctctctgaagtcatacataattaattttagcaaatattcattgaaactctgtattgggcattatattagatgtttaggataccgccatgaaagatgctgttatagccctaaagagacttattggtgctttttctttatttttgatagtgtcacataaggttgcactaccttttctacacaataatagtagccatcattgattttagatactgggagaacatttcagtatgttaattctattcctcacacattcctgtaaggtaggtattatttaactcattttatagatgaggaatagttttaagggataaaataacctcccttaagtcacatggtttagtaaattatggagctagttcttgactccagatctggttcattccaaaatttcttactattctgtgccttatctttgcatgaccatttactgttcctggtttcaataattagcaatttctcaataaggtgtcacttgacatggttattttctccaatgatttctgtcgtttctatgaattaaatcctggaataaagtttgtcattgttcctttcctgtaatttgtgggagatgaaagtttgtaagtctaggatttatcagttctgggcatcctggaaaggtgacagcagtggtggcagctgagttttgcaatatctttatgagtccccatgtaaaaacagggaaaagtgcaaaagtcataaatgtacagctcagtggattttcaaacacacccatatgcagataaaaatagaacatttatgacactccccaaagcccctttgttacatgatttaaagagccagaggccatgtgcacgggttcacatggcctgtggaggaaacacctgagcagtgtttcctccacaggggtctcagtctgggctctaaagagctcctccaccaagtttctaaattttaataatttcagcctattgttcccccagagtagtaactgctttctggaactgaactctgtgataatgtagtatttactttttgccttttcaataacctagttaacaattttatacctactgagttctatttaa

SEQ ID NO: 42457 - DNA, 2300 bp, Homo sapien
ctgggcctgggctggcatccaggacaggggcaacattgccatgcaagctccctttgtggccccaaagctcaggggcgacctgaagctcccccttggccggtgcaggaaccagcctggcccagccccatcgtggagaccccaagggtggctggtgggctgtggggggtgtggggctgtccgccttctccctgtgccctccctgaagcagctgacatgatggcagcagccacaccagatggcctgcggctgtcatcatttatagtaatattccaactaataaataagaagaaaagataaaactagactatcttcattttgcaatttctaattaataggcactaaatgtaaaagggtgctaatgtcacaaaatgggacctcttagaagtcttggtaaagggatctagcctaaatctgatttggattctgcatcaatcttccaactgtgaggaaacacaaagaacagaagaatataatgatctataccatgattatgcaatcagcaaactctggactatggaaaactgcaaatcgactggctctggttcttcaacagataaagtttaaggaaaagaaagaaattaagggttaaccatttttttaaaaagcttaagaaacaaatgaaatttttgaataggcatgactaaactatagtatctaaggataagcactgagtgataaaattattaaaatattcaaaaaagtgattaccataaaagtcaggatactggtatgttatcataatggttatttaaagtgggaagtcggtcgggcacagtggctcaagcctgtaatcccagcaccttgggaggccaatgcaggcaggtcacttgagctcaggaattcgagaccagcctggccaacgtggtgaaaccccggctgcactaaaaatagaaaaattagctgggcatagtttcatgcacctttagtcccagctactcaggctgaggcagaagaactgcttgaacctgggaggcagaaattgcagtgagccgagagccactccactccaacctgggcaacagagcaagactccgtctccagaaaaaaaagagagagaagggggttaggattggaatgggacacacaaaaaggacttctaaggtaaggaggtaagtgacaaagttgtatttcttttcttatcttttttttttttttttggagacagggtctcactcctacgtgcaggctggagtgcagtggtgcaatcacagctcactgcagcctcgacttccagggttcaggtgattctcccacttcagccttccaaatagctgggactacaggcatgcgtcacgacactcagctaatttttggtagagaccaggttttaccagttgttcgaactcctgggctcaagcgatgcctcagcctcccaaagtgctgggattacaggcatgagcaactgtcccaggcgcaaagttgtatttcttgatttgggtagtggttacaaggatgtaccttataataattcattaggtcttatgtttggctttgtggttttctgtattttcctttttcttttcttttctttttttttgagacagagtctaggtctgttactcaggctggagtgcagtggcacgatctcggttcactgcaacccccacctcccaggttcaagctgttctcctgcctcagcctcccaagtagctgggactacaggcacaggccaccacgctcagctaatttttgtaattttagtagagacagggtttcaccatgttggccaggctggtttcgaactcctgacctcaggtgatccgcccacctcggcctcccaaagtgctgggattacacgcctgagctaccgtgcccagctattttcactttttaatacaaagatttatttaagtgacaatttttttcctaatctaaatgatggatatataacttcattatatcacaattctattttgcataactttataaatactttttgtaactaattcagtattacttgaaattttgcatttaaaaaaatcaccagctgcctggtgatcttgcgggaaagaaccaccgtggtcccagctttgcgcagaggtaggaggtgggcagtggaggtgggagtgaagtctcaggaaaagaggcggttgccatagcggagccctctggctgtgtgtgtctgaggcttggcagccagagccatggacggtttgctgggcccgttagtgcacccagtggagacacgcagccttcatgtcccgctacctgccgtctccccaacatgtctctgtttgtcaggaacatagccaacgacaccaggtctgaagatttacggtgtgaatttggtcgttatgatc

SEQ ID NO: 42458 - DNA, 2300 bp, Homo sapien
aactcagcctcccaaattgctgggattacaggcatgagccaccacacctggctcttggctgacttttctactttccaagctctttaggtgattgccttcaataccatgagtttagcacgtgaacaccagtgtttccaaaatatgtatttccagctgagatttctctcttggaacttcagttacatatttccaatcatctaggtgacacatccttcgactatgtaaccaaaggcaattcaaactcaatacatttaaaactgaatttattttattatcttctccacaaaacacctggatcctcttcctatatttcctaccttggttaatgatgccgtcatataccttccagaaatccagaagttgaataataataattcttttctgcccatgcaattaatcaccaggtcctatagattctacccaataaatgtctctcatgtgtattttgtcctcttcattcaacatgccattgcccacataccttctaccaattccatcctctctactgccatcaaaattgtctttctaaagtatagatgtctttctaaaatcttggcacacacctggttaaaaactgtattgaggccgggcatgatggctcatgtctgtaataccatcactttggtagggtaaggcaggtagattgcttaagctcaggaatttgagtacagcctggacaacatggtgaaacatcgactctacaaaaaaaatacagatattagccaagtgtggtggcatgtgctgaagtgggaggatgaagtggcgggaggctgaagtgggaggatggcttgagcctggaaagtcaaggctgcagtgagctgagatcatgccactacagtccagcctgaatgacaaactgagaacctgtctcaaaaaacaaacaaacaaacaaaaaaccccaaaacaaagcaaaaaaaacacaccaaaaccaaaaaaactttattgaatgaaaaatgaggtttaaactccttaggaggaaaaacatggtcccttccatgaaggaaattaatctcctacatactaccatggcactttgtatatacttctataatggtttttggaatataatatatggttactttattttattttttgagatggagtctctgtcgcccaggctagagtgtggtggcatgatctccgcttactacaacctccgcctcccaggttcaagcgattctgcctcagcctcccaagtagctgggactacaggtgcccgccaccatcctggctaatttttttttttttttttgtatttttgtatttttagtagagacagggtttcactgtgttgaccaggctagtcttgaactcctgaccccgtgatctgcccacgccggcctcccaaagtgctgggattacaggcgtgagccaccaggcctggccagtatgtggttattatatatactacatatgtgatttatcaaatggactataaaactccttgaaacaagagccatgtcttttatttttgtatttctagtgctaaccacacagaataaaactagatttaaataaagtgaacaaatggatgaactggggaagaaatgttgaaagatttgttctgtacaatgaccaacatcaaatgatcgaagtataagacattgatggggtgatatgaaaatagtgaaaatgggagaggtcaccagtttataaaagtccattaactggaacactggataatttgtcatttcagaacacgctctgtgctttttcaggacctgcctccatggtggttttaagatatgtctaaaaattcttgacactcctctcttttaaaaatggagcctgatttccctcccttgaatgtgagtcagacttcatgacttgcctctaacaaataggatgtggcagaaaagatgtcatatgacttccgaggctagatcattaagaaggtagcttctgttggctctttctcttcttttgattgcttatgttagggaaagcccatttccatgctatgaagacactcacacagcctatgaagaggcccctgtgaggaggaactgaggcctccaccaccaaccagccacaactttccagccgtgtaaatgaatcaccttgaatgaaaattttcttgccagtcaagccttcaaatgactacagccccagccaatatcttaactgaaactccatgagaaattgcaagataaaattgcccagcaagcatgctctggaatttcagacccacagaaactgtaagaataatcaatgtttatttttgttttaatctactggctttttaagtagtttgttatgcagtaatagatagctaatacatgctctactaagaataattc

SEQ ID NO: 42459 - DNA, 2300 bp, Homo sapien
taactacagtaaagactaaaaatcttactaaagattaaaattgtctccacaactaagtttatataattcattctctgaatctttcaaagaataattctcatttgatctaaattatcccccaaaaaataatagcctgggcaacacggtgaaaccccatctctactaaaatacaaaaaattagctgggcgtggcagcgtgtgcctgcagtcccagctactcgggaggctgaggtaggagaattgcttgaacccgggaggtggaggttgcagtgagctgagatcacaccactgcactccagcctgggtgacacagcaaggctccgtctccaaaaaaaaaaaaaaataataataataataataaatataagaatataagaataaaaaagaataatttgcctctcaaggagagctggtttaaaatttggaataattattattacaatagctactttgagagttgacttttttataccaaaaagtgagaacaaaacctgaggagtcacaaacagaaactgagtggacattagcagtgaatgtaatgagaaaaaagagagccgagaagagcaaaaagtggagggggtgtcattaaattctccttggggaatctgagaacttggacacagaaaggaggaggtaacatttcagtgtctactctgtaacacaattcaagctacaagatttatatgagttgtctgtaaattctggtagatgctttcatctctatctgcagaggagactcagagactttaggtgatttgctcgaggatcacaaaggtagtaaatagtgaagctgagatttgaaaactagcttgcctactccaaagcttttcgggaggtcaacgcaacatcaaagttgggcaaaggacagattgagaagagaggtcattagtgcagaaacactattttgtgaggggaaagacaaaatgacatttctggagaggcatattcatgggcacatcattctttgcatgtggggatttttgaagtttcatgctctctcttccaaggctaagtctgcttcctgttacggctgtcaagttgttttgtttagatagctaatgcctggaacccaactgtcttcctgtgagaggactacattattaacagtaatggaagaaaaaaggtttgaattctgggtccttataaaggctgtgcaagtcctattttctccagatccccataccaagaatcattctccacactgcagtcattttctgagtctcagtgttggatagtatggctagaaaaatgccaggccattttataaacaacgtagttgtaagtataatagctgagatttagagaacatgttcagtcatttaggattgtcctatactatactcctcatgttctttatcccactgaatcctcccaacagccctaggtggtgtgtatgctagtcattagggctgttcataaataatccggttctttccttccagccatatgcccttctttaccctctttgaagtttagcattagccttgtgaaatgttttccaatgtaatgtaagacgaagtgacaaatatcactcttgggtagaagctttatgaggtatgctacattcatttttcttgcctcaccaattatgggactatatgtcaagatgaaacttccatcagcctggatccccatgtgattatgatgattagggctcctcatgtgacttccagtggctataaagtatgggcaaaaattaaagtttttttctttcaaacctatgtcacattgttctaaagaggccaatatcaatatttcccatcttcatgttcttcttacatgatgacattggcactctcccattgaaaggtagggtctatgttccctctccttgaatctgggacagtctgtgaccatggcagaattagcactatataacttctgtgtctgagtcattaaatacagtacagctttcatctgttcctcttgagatactagcctgggaaatctaggctccatgcttgtgacaaagccaatggaaaggtcatgtgtaactattccaggcacattcctagctgaggtcccaaccaagagccagcatgaaccactagacacttgcacatgtgagccttcatatgatgcagtcctcaggcttggagccagtccaggtaatggagcagagactggagcagagacaagttgttcccactgagctctcctcagattacagattggtgagtgaaataaacatagttgttttaagtcattaatttttgggaatgattctttacaaagccatagataactagaataaatttactaaaactttggagttgtttgttattgcaggaggggtgtagt

SEQ ID NO: 42460 - DNA, 2300 bp, Homo sapien
gagaatgggtaagaggtacctaataaactggaatttactatactgaaagatattttaaataaaaatgagtgtaactagcatttactgagaacttacgtgccaaaatctccactcagcattttaagtgcattaccttaaggaaattaggattggttgctactgcctttagaagctggtgtgtggtgtgtgtgtatgtcttagaatattctccatatggagcagcaacagtcaattcaaacagtgtgttaaattgttttcactgttctaggtcatatgtgccttttctgcatgtgtgcatgcatgtctccagtattcgtttttaatagcaaaaagaatcacactacggtgtattgagtacctgccatgtgccaggcactatgccaagctctctaccttcatatgattgcatttaatcttctaacaacctaacataatgggtattattcctatgttactgtagaagaaactagggatcagagaagctaagtaattcacatgaagtcacacagccaggaagtgacatcctaaattcaaactcaagtctgtttgactcaaaagcaatgttatttctcctacattgagctgcatcccattgcagtgtgcctggaaaaggtcagaatatcctgctgatatgaacatgcccctaaatgcctcagtgctaatcctatgagtgagacctttgtgagcatcttaataggtagatctgtggctacaacccatagccagacatttcaagaatggtattaattgtctacaacacaagagaaagattatttatcgtcaaagctgtgcgggacttggggagcagcactcatgttcttccaggtaaggacactgaacctagagaagtgagctgcttggccaagttcacccggagttagagcttaaatctaggtttctctgtcagctcatctttctactccactgccacttcctcccttgcacttctgccttcctcagaaattttaattgagcatgtgaatgtgagagttggggggtgtgtgtgtgtgtgtgtgtgtgtgtgtgtgtgtatgtgtgggtgacagaaaaaaaaagattgcaggagagtgctgacagggaggagaccaggttgggaaagaaaggcagaaagactagtatattttaaagccagatgttgcatttttaatggcagtacaagaaaggcaacatcttgatggcttctcatgatagattgaagcagaagccagccttccagtgcttttctgaggctttctgtcacagctttgcaaaacctagaattgaaaaaaccaattaatgaatgccctggtgctttggaggtagcaaagacaaagcaattgtgtcacagggagctgaagctagggctgccacttcatttcctttcccatgggaaatcggagcattaccagctttgaggagcctctgtgatcctccgagtctgtctctctgccccctgtcttctgaatgcatttagaatctaatgattcttctcctggcatgaattgaagtgatccactccacacaccccgactccagtcagcaaggatttgtcagtgaaccccaaaaacggtaggcagcaagagcataggatacaggaagataccagggtgccccagattctaacccttcaatataataaataacatgtgagatggggctgggagtgggcagggaaaagatgcatcattcactttcatcgaggtcaccatgcccttctctgctcttttcagagaaaagcttttctttatacatgcacgccacactcactcacacatgcacactccctgcaagaagccatcagagcattttggtcatctataggccactcagcttcttcagagttgagtaagattaaaaaagcctgacatctccaatattcctcagcaacggtttatgtacctgcataagcagatgaaaaaagggcttggggatgtattaaaaaacatgcatgtatatgatggatggggagagagagcacgcaagaatctgatacagattaatggctctctgtatttttggagtctttttgtttcaggcctatggttgtggcgtattggaagggttctggaattttagaacacaaagtagcagttttaaataatgagagaagattccacatggaacgctcatctggctgtggcagcctgtgactgaatgagagaaaagtgccctagaagctattcattacgaattcactggaagctctcaaacgaggctggcagaagctgaaattgaagtggtctctgacctaattttcttctgcatgaaacatctgcatcaaggctctctttgatgtattccacttggctctgtctacggga

SEQ ID NO: 42461 - DNA, 2300 bp, Homo sapien
atggtggcgcacacctgtaatcccagctactcaggaggctgagtcaggagaatcacttgaacccaggaggctgaggatgcagtgagccgagatggcgccactgcactccagcctgggcgacagagagagactctgtctcaaaaataaataaataaataaaataaaataaaaaattgttaagcaatatttggcaagcacattatggtttacaaagcactcttttatcagatttgcattttacatttttcctaaaatgtattcattctttaatacagagaagaaaaaccatttctttataactccacaaacacgtaacccctcttaccatttcttaagcaaaaacaatacgtttataatctctaatgacagaaagcagatcaatggtttcctgggcccaagagtaggggaaatgactgaatgggggaagaagaaacttttcagggcaattaaagtgttccatatctcaatcatggtggctgcacggctatattcatttgtcaaaagtcgccacactatacacttaaaatgggtacattttatgatatgtagattatacctcaataaaattgattaaaattttagaaatactgatatatttattaggataatcaaattgggctcccagctaaatatgttaaatttatttgacttttctctttcccatagcctcactagaatggcagtaaaggaatggatgaaagacatccaaggacaaagagaagagaaaaacattttcagaacatgagaattcaacagatttcagaacttagcctagcagaggaaattacaaactcagtgccgacagatggatggaaaaatcatgagaagttagtgggcagtttcccctgcagaacacttaggagaaagaagtagggggaagcttagtacttggagggagcagtgaaacatagaaatgagagagagactggctaaaagtctatatggagaggaatgggactccccaagccctccttcagtataggcagtcagataattaccccttcttatcctccccagtggtcagacagaggcttatttcagagcgaccccagactcagaggcaccaggcacagtggcgagcaaggctgaggtggccgactgagacaggccctttacaaggaagctgacctcctgaaccgcaaccccttcagccctctccagattaccaccacagttcagtcatctaaaatgtttcaagtagaagatttaaagatctatctctggaaaaatgaagtagttctggagaccatgcaaccaagttccatgatttcaccagtggtcaagctgtcttggtccttgatctccccaaactgaagcccacaggttcacaagcagtcacccaacacacatacacacacacacacacacaaacacacacacaccatccaaataatggcttcattttaaacaaaagcaatcattaggcatcgaagaaataccatcaacattattttttcaaataaattagttgaaacaaactttttttaaaattatactttaagttctgggatacatgtgtagaacgtgcaggtttgttacacaggtacacatgtgccatggtggtttgctgcacccatcaatccatcatcaatattaggtatttctcctaatgttatccctcacctagtcccccaccccacgacaggccccggtgtgtaatgttccctgccctgtgtccatgtgttctcattgttcaactcccacttatgagtgagaacatgcggtatttggttttctgttcctgtgttagtttgctgagaatgatggtttccagcttcatccatgtccctgcaaaggacatgaactcaccctttttatggctgcatagtattccatggtgtatatatgccacattttctttatccagtctatcattgatgggcatttgagttggttccaagtctttactactgtgaatagtgcttcagtaaacatatgtgtgtatgtatctttatagcagaatgatttataatcctttggataaatacccagtaatgggattgctgggtcaaatggtatttctggttctagatccttgacgaatcaccacactgtcttccacaatggttgaactaatttacactcccaccaacagtctaaaagcattcctatttctccacatcctttccagcatctgttgtttcctgactttttaatgatcaccattctaactggtgtgagatggtatctcattgtggttttgatttgcatttctctaatgaccagtgatgatgagctttttttcatatgtttgttggccgcataagtgtcttcttttgagaagtatctgttcatatcct

SEQ ID NO: 42462 - DNA, 2300 bp, Homo sapien
cttgttctcgtctccttacttctcttccctctcctcgcctttcctctccctccccctcctttcttctccaccgcacgcgtagagtgtcatttatttatttatttatcacccccgccatcaacacccttttagggatcccgagcttttcaatgtgagtgggaggagaaaagggcaggaagtgttgactggaagtgggtgaaatcgtgcctcggggtgagagattctgctcaggaatatagggtcgggaaaatcttggaaaatgaggatttagatctgtttatgaagccccgctatcggatgggaaccaactccgcgcgcgtctcctcctcttcctttattgtatggatttataggtatatatcttctcggactgttgcttggggggagggaggagaaagggcgagtatttaaagaggacagacttgcccaggatccttaacaccgcgccttcaccggatgcgcgctcctcaatgcaaaggaatccagcaacatccccaattcagacgcggacaaaagaaactttaattaaggtctctttctgccccgcgcgctgcgcgtttctctctcctgaggctgttgatgtccaactccaagatccaagaaatagaaatggtacaatcagcccatgcccttgaacttcaattgctcctgacttgctgcattgatttttttgatactgtagaacccccatccccaacccccaccgctcccagtccaattaaaaccgtaggagactttcgacctggtggtggagggggggaaccactcctttgcaaaagagatagttcagaatgatacgggagagattacactaaataaaaattcaaggtgtgaaagcttcatcttggctcgcgtgtcttcaacaccatgacaccttatcattaagagcgctgattgttactttccgagcctttagatgatcagccagaaagtgcaaacaacgcggggctggagggtgtaaagttatttaagcaggcgttctttttttcttttggtgcgcagtcaaaacatttcacaagttaggaaaagaaagtggtggttccgaagctcggaatgatgggctcttttcctcctccacccccccaccttccatatcaggaaagaaataaaacgcacaatgagcctttatttcaggagagaagacttcaaaatacgtgccagtaatggacaatttgagcttttcactggaaatactcacaccgcaagctggaaagggattaaaaagccccacgtggttgatctgggtttatacttgcaacctccagttccccacgtatgttctttgcaaaggttggcctctagatggatgcaagtaagggaccctctggggctcgggctcggcgcctcgggcagggctgacgttgggagcgctatgagctgccgggcagggtcctcaccgggggcttcctctgcgggccagggctgccgggcgccaccgggacgcgagcgcgcacgcctcggcccggcggccgcgctcctcgcaccgccttctccgcaggtctttattcatcatctcatctccctcttccccttctccttctcctttgcctccttctcctttgcctccttctcctcctcttcctccccctcctccaccaccacctcctcctcctctgccgccgccacctcctcctcttgcatctcactggcctggctctgagtgacaaagacaatgtcccagccttaactttgcaaccaccttgcctccttctggggttcagcaggggggagggggaacagcagcagcagcctcagcatctcctccagcttctccttctgctcttctcgagctcttggataattcttcctcttttttcccctagcctttttcctcatttctttctttctttctttttttccttcctctctgctgcacgttgttgttgttattagaaaggcttcgcgcaccccctggtgctccggcgttttgtgtggcaggagaagattgtcttccttctctctttctgtcttgctttctctctccccctggttgctcattattcagagagagacacagagggagggagagagagagagcgcgcgagggagagggaggagaggagagagaagaggagagagaggggagagagagagtgagagggagagggagggagggagagagagagagagggagagagacggatatctcaggtcatctgcagctgcagcgagtctgaggagccgaggaaggcagggaagatggcgatcctccattgctgagacccggcagaagcacatgagactcccaaacaacttccacaacaataacccgagcaggaagaggagaaagagaaagagga

SEQ ID NO: 42463 - DNA, 2300 bp, Homo sapien
ggctcagatggcaacaaattattggagaccaaggggattccatttagaagattcatgaataggttccagtgccccttttgtcctttcctcaccatgcatcgacgtagcatctctcgtcacatagaaaacatccacttatctggaaagacagctgtctacaaatgtgacgaatgtccgtttacttgcaagagctcgttgaaacttggggctcacaaacagtgtcacacgggtacaacgtcagattgggatgctgtgaattcccagagtgaaagcatttcttcctcactgaatgaaggtgtggtgtcttatgagagctcaagcatcaatggtagaaagtcaggagtcatgttggatcccttgcagcagcaacagccaccgcagccaccaccaccgccgccgccaccaccaccatcacagccacagccactgcagcagccacagccaccacagctgcagccaccacatcaggtgccaccccagccacaaacacagccaccaccaacgcagcagccacagccacccacacaagccgcacctctgcacccatacaaatgcaccatgtgtaattactccaccacaactctgaaagggctaagagtccatcagcagcataaacattcattctgtgacaacttgccaaaattcgaggggcagccctcaagcctaccattggaaaatgagacagacagccacccctcttccagcaacactgtgaagaaaagtcagacctcaattcttgggttgtcctccaagaacaattttgtagctaaagcctctaggaagctcgccaatgactttcctctagatttgtcacccgtgaagaagagaaccaggattgacgagatagcaagcaaccttcagagcaaaattaaccaaaccaaacagcaggaagatgcagtgatcaatgttgaggatgatgaagaggaagaggaagacaacgaagtcgagatagaggttgagttggacagggaggaagaaccgacagaacccatcatagaggttcccacttccttttctgcccaacagatatgggtaagagataccagtgagccccagaaagagcccaacttcagaaacatcacccacgattacaatgccaccaatggggctgagattgagctcaccctttctgaagatgaagaggattattatggctcctcaacaaacttgaaagatcaccaagtttccaatactgctctgctgaatacccaaactcccatctatgggactgagcacaatagtgaaaacacagactttggtgactctggaaggctttactattgtaaacactgtgactttaacaacaaatctgcccggagtgttagcacccactaccaacgaatgcacccatacattaaattcagctttaggtacatcttggaccccaatgatcacagtgcagtgtacaggtgcctggaatgctacatcgattacaccaacttcgaagatctccagcagcattatggcgagcaccacccagaagccatgaatgtactcaactttgatcactcggacctgatctaccggtgtcggttttgttcatacacgagcccgaatgttagaagcctgatgccacattaccaaagaatgcatcccacggtgaagatcaacaacgcgatgatattttcaagctatgtcgtggagcagcaggaagggctgaatacagaatcccagaccctgagggagattctgaattcggctcccaagaacatggcgacttccacacctgtggctcgtggtggtggtttgccagctacgttcaacaaaaacactcctaagacctttactcctgaatgtgaaaatcagaaggaccctttggtcaacactgttgttgtttatgattgtgatgtttgttcgtttgcaagccccaacatgcattctgtcttggttcattatcagaagaaacaccccgaagaaaaggcttcctactttaggatccagaaaactatgcgaatggtgtctgtggacaggggctctgccctttctcaattatcatttgaggtgggtgctccaatgtctcccaaaatgtccaacatgggttccccaccccccccacaacccccgccaccagacctcagtactgagctttactactgcaaacactgttcctacagcaatcggtcagttgtgggagtgcttgtccactaccagaaaagacacccagaaataaaggttactgccaaatatatcagacaggctcctcccacagctgcaatgatgagaggggtcgaagggccccaaggctccccccggccacccgcccccatacaacagctgaaccgaagcagctctgagagaga

SEQ ID NO: 42464 - DNA, 2300 bp, Homo sapien
acatcttggaccccaatgatcacagtgcagtgtacaggtgcctggaatgctacatcgattacaccaacttcgaagatctccagcagcattatggcgagcaccacccagaagccatgaatgtactcaactttgatcactcggacctgatctaccggtgtcggttttgttcatacacgagcccgaatgttagaagcctgatgccacattaccaaagaatgcatcccacggtgaagatcaacaacgcgatgatattttcaagctatgtcgtggagcagcaggaagggctgaatacagaatcccagaccctgagggagattctgaattcggctcccaagaacatggcgacttccacacctgtggctcgtggtggtggtttgccagctacgttcaacaaaaacactcctaagacctttactcctgaatgtgaaaatcagaaggaccctttggtcaacactgttgttgtttatgattgtgatgtttgttcgtttgcaagccccaacatgcattctgtcttggttcattatcagaagaaacaccccgaagaaaaggcttcctactttaggatccagaaaactatgcgaatggtgtctgtggacaggggctctgccctttctcaattatcatttgaggtgggtgctccaatgtctcccaaaatgtccaacatgggttccccaccccccccacaacccccgccaccagacctcagtactgagctttactactgcaaacactgttcctacagcaatcggtcagttgtgggagtgcttgtccactaccagaaaagacacccagaaataaaggttactgccaaatatatcagacaggctcctcccacagctgcaatgatgagaggggtcgaagggccccaaggctccccccggccacccgcccccatacaacagctgaaccgaagcagctctgagagagatggccctcctgtggagaatgagatgttcttttgccagcactgtgattatgggaaccggacggtcaaaggggtactcattcattatcagaagaagcaccgagacttcaaggccaatgcagatgtgatccggcagcatacggccaccattcgaagcctctgcgaccgaaatcagaagaagcctgccagctgcgtgcttgtctccccctctaatctggagcgggacaaaacgaaactccgagcactcaaatgtaggcagtgctcatatacctccccctacttctatgcactgaggaagcatatcaagaaagaccaccccgccctgaaagccacagtcacgtccatcatgcgatgggcatttctagatggcttgatagaagctggctaccactgcgagtggtgcatctactcccatacggagcccaacggtttgctcctgcattaccaacggaggcatccagaacactatgttgattacacctacatggctactaaactgtgggctgggccagacccatcccctccctctctcacaatgccagccgaagccaaaacctacagatgcagggactgtgttttcgaagctgtttccatctgggacatcactaatcactaccaagcattccacccctgggccatgaatggtgatgagtcagtgctactggacatcatcaaggagaaagatgctgtggagaagcccattctttcatccgaagagttggcaggccctgtgaattgtgaaaacagtatacccacccctttcccggagcaggaagctgaatgtccagaggatgcaagactgtcccctgagaaaagcctgcagctagcttcagccaaccccgccatatcctccaccccataccagtgcacggtatgccaatctgagtataacaacttgcacggccttctcactcattatgggaagaagcaccctggcatgaaagtgaaggctgctgactttgcccaggacattgacatcaacccaggtgccgtctacaaatgcaggcattgcccatacatcaacacccgcatccacggcgtactgacccactaccagaagcgacacccgtccatcaaggtgaccgctgaggactttgtgcacgacgtagagcagtctgctgacatatcccagaatgacgtggaggagacgagcaggatcttcaagcaagggtatggcgcctaccggtgcaaactgtgtccgtacacacacggcactttggagaaactaaaaatccactacgagaagtatcacaatcagcctgaatttgatgtcttttcccagtcgcccccgaagctgccagtccccctcgagcccgagatgaccactgaagtgagcccttcccaagtctccatcactgaggaggaggtgggagag

SEQ ID NO: 42465 - DNA, 2300 bp, Homo sapien
ccaatacacagagaagggcacagaacctgtaggttataagagaagcagagccctcacagtccttgcctagtagtgccttacttatggacttcttgttgtatgtgttaacacattgatttccttataatttaaactcatttgattcagagttttctgttccttgcagcagaaggaattcaaattgttaaatcccttattacaggctcctattcttcatcatccatccttcaggttctcatgtcccatctcaacttccttctgcaattctccttgatttatagctcagctgaagctccaaagccagccatgcccacagtaggacacttcctgccaacccttacatcattgacatttggccttttctgcctaaacaagttgtggtattatggccacaatttcgagggctgcagagtattgacggagaaaagtaaaattatgtccagtggccatattatacggccatgcttccttctcctgccagggccttagctgctgctacagtcaatctggattacttggtgtttcctcctttatgggattattggtagaggagtccctgccagtgggtaagccctctcattctttctcccctagagcaatcttccaggccaatcccaaatgccacttcctgtgaactcccataacatcatttctcttttcaaatccagttcaacctcctaatatagatatttgtccatttcttttatactccctagtagaccctgatttacttagacacactctgttaactatgaagagccacacaaacattcattaagaaggaagccatggataaagacattcattaattcagccagaattcagtctgaagatgggccgtgccactgaatagctaagggaagtagggaaaatgattaaaccctgtgctacaatgtttatctgaaggtagaactaaaatacctacctaaggtagttgagaagattataggagataattgtataaaaatatacggaactgtcaggcacatagttggccctcaatattattttctttttttccttttcaccataagtctgagagagcacgtcctttctttatgctggccaaatgtgtatgtatgtatacataaaacctttctccatggatatcaagtaatctgtaatattataaaactaaattcattttggcaacattcaagtaaaaatcaaatgcttctccctgctttgcccatcagatggaggttgacatgtagacataaactcaacattcagtgcacaccatctgccggccagccctgtgctacatgaaatgatatacagatgaactgaatatggaacttgtcttttgccctaagatttctcattacaatttcttgaacacgtgggcctttcacagatagcaaatgcttctgtatggtggattgcctcactcagatgtttacacactcctctccatggataaaagcagagggaggactatgcaattttaagagtctttctgttactttcttggagtgcttctcaacttttcatcagcacaataatgagttgggggtttcctacacaggcagattcctagccttacccttagagattcggcttgggtagaatcatatcattttccttacttcctttagctattcagtggtatgagtacagcccaggactctgcatctttaacaagcatccagcgtgatcctgttttagatgagaaacaatgggtgctgggttgtggatggtagcaaggaagttggttcttgcagaagtgagtacattgtgacttttttttttttttttttttgaaacggagtctcgctctgtcgcccaggctggagtgcaatgacacgatctcggctcactgcaacctctgcctcccgggttcacgccgttctcctgcctcagcctcccaagtagctgggactacaggcgcccgccagcacgcctggctaatttttttgtatttttagtacagactaggtttcaccatgttagccaggatggtctcgatctcctgaccttgtgatccacccgcctcggcctcccaaagtgctgggattacaggcttgagccaccgcgcggggcacattgtgacatttcaagcaggcatggctaataaccaaggtcattcattggatctcaacagatggacctcacagtctcgcaactaacatgggaaccagtaatctcatgccagaggaagcactcctgaggcagaggagatttcaggagagaacaggttgaacattaataaggaggagctttggcactggtccaagaaacaggataagctaaatctctgcatctattctggacaccagaatggcgcggggaccatttag

SEQ ID NO: 42466 - DNA, 2300 bp, Homo sapien
tgggggaaaactgggagaggggcagtttgcaggggggaaggaggtccagagagaaatcaattgttctctttggccacattaagtttcagaggcttgttacatattcaggtgaagatattgcttaggcaattggctaactctatagctaaggggaaaggtccaggctggaggtatttcaaaacaagggccaagatgaaaccacctggtgactacgagtagatacaggaagacagagggcagaagattgcatatttaattactatgaagggagttatgtgttgtgaaaggggaaatatcaggttagtggagggagaagctggtcaaggaaagtttcttgaaaacattaaacccaagctccttgaagccactgaaaaccaagcagtgacattgtattagtgaggatgctgtcccagagaagtaatttgtaattggtcatagagctagtggcctgactagaactgtgttttatacttgaactaaatcaaatgtgccacaggcacagtataaaacagaggagaatagctgggagcgatggctcacatataatcccagcactttgggactccgaagcaggaggattacttgagcccaggagttcaagaccagccctggcaacatagggagaacatatctgtacaaaaaaataaaatatcagctgggaagcagtggtgtgtgtctgtggtcccagctactcaagaggctgaggtggaaggatctcttgagctcaggaggttgacgctgcagtgagccgtgtttgtgctacagcgctccagcgtggatgacagtcagacgctttaaaaaaataagaataatctttaaaacaaaaaacaggggaatagtggcacaccctgggacacagactctggagtcattctgtctgaggtcacattgtggatttgccatttactactggctgggttattccaggtgcattactcaacatctctgtacttcagttttctatctgtaaacggactttctactaatagctaactgcttacagactgtttatcatgattttacatacaatattcaacttccccctccaataatcaatgagtgacattattattctcattctactgctgaggatccagaagcacattcacccattccacaaatatttaccgtgcacctgcaatgtgccaggcatgttcatgggtgaacacagcaaaatctttgcctctgtgcagcttcagtctggggttcacaggaaaaggagaaagatgataaacaagagatacgtacattacagggtaattataaagggatacccgctatacaagaaaacagagcaggataacagagataggaagttgggattttaagtaaggcagccagaacagacctcaccaagaaggcaatatctgagcaaggatgttaagggagccgggggcaacctagaatccaccagtggggagagtaaggcgactcggagaaaggcgaggggctaatgcatccgttctaataactctgactttaactcggggctagatggggaaacactggacagttctaccccgaggtgtgacagaacttgaccttcattttaaatcggtccatctgtttaggctagtgagaaaaaacaatatttgaactcgggcagtccagctcaggagtctgtgctgtcgggattaaagaatcagtcgacacccccagggctgagccccgcagcaagcgccccgcgggtgctggcccccagactgtggttaccgccatcctttcacttaaactccgccccgattactcccccgctccagggctccgcatccactctgccgggtctccacgaagcgcttcccgggctacacattgcgtaacttcggcagccgggcggagcctgcacagaggcggagccgcggcagccggagagaacgccccagcaatagtcgctaggaggaagccccaggagcccttgccgcccacggaacgcgcctgcgtaatccgggtccaggccgccgacattccaggaccgccttccgccccgcccccaattctggggcggagtcctcggccgcgccggcgcaaagcgtcgccgcaccccacgcctgcgcgcttcgcccgcccggccccatccccccaggtttttcgcgtgggggagggggcacgtctcggcgagtcacgatgatggcggccaccatcctgtggtgagctagcggattccctgcttgtctcgccgaccccctcgcgccttctgcagactccgtggctggcgctcggcgcgtgaggaagcacggcggcccgagttcgcggggaaggccgcagtcgcggaggcagcggcgcggtccggggcacgggct

SEQ ID NO: 42467 - DNA, 2300 bp, Homo sapien
cgctttaaaaaaataagaataatctttaaaacaaaaaacaggggaatagtggcacaccctgggacacagactctggagtcattctgtctgaggtcacattgtggatttgccatttactactggctgggttattccaggtgcattactcaacatctctgtacttcagttttctatctgtaaacggactttctactaatagctaactgcttacagactgtttatcatgattttacatacaatattcaacttccccctccaataatcaatgagtgacattattattctcattctactgctgaggatccagaagcacattcacccattccacaaatatttaccgtgcacctgcaatgtgccaggcatgttcatgggtgaacacagcaaaatctttgcctctgtgcagcttcagtctggggttcacaggaaaaggagaaagatgataaacaagagatacgtacattacagggtaattataaagggatacccgctatacaagaaaacagagcaggataacagagataggaagttgggattttaagtaaggcagccagaacagacctcaccaagaaggcaatatctgagcaaggatgttaagggagccgggggcaacctagaatccaccagtggggagagtaaggcgactcggagaaaggcgaggggctaatgcatccgttctaataactctgactttaactcggggctagatggggaaacactggacagttctaccccgaggtgtgacagaacttgaccttcattttaaatcggtccatctgtttaggctagtgagaaaaaacaatatttgaactcgggcagtccagctcaggagtctgtgctgtcgggattaaagaatcagtcgacacccccagggctgagccccgcagcaagcgccccgcgggtgctggcccccagactgtggttaccgccatcctttcacttaaactccgccccgattactcccccgctccagggctccgcatccactctgccgggtctccacgaagcgcttcccgggctacacattgcgtaacttcggcagccgggcggagcctgcacagaggcggagccgcggcagccggagagaacgccccagcaatagtcgctaggaggaagccccaggagcccttgccgcccacggaacgcgcctgcgtaatccgggtccaggccgccgacattccaggaccgccttccgccccgcccccaattctggggcggagtcctcggccgcgccggcgcaaagcgtcgccgcaccccacgcctgcgcgcttcgcccgcccggccccatccccccaggtttttcgcgtgggggagggggcacgtctcggcgagtcacgatgatggcggccaccatcctgtggtgagctagcggattccctgcttgtctcgccgaccccctcgcgccttctgcagactccgtggctggcgctcggcgcgtgaggaagcacggcggcccgagttcgcggggaaggccgcagtcgcggaggcagcggcgcggtccggggcacgggctgggggagaggccgctccgctgggcgaatgtgacaagcccccacccccaccgccttcctccccagagcgcgaggagcgcgggcgaccccggggccccgccaggccacagaccccgcccagcggccagcacccggcgcaggcccggcagccgagctgcgcggcggcaccatgcaggtcaccctgaagaccctccagcagcagaccttcaagatagacattgaccccgaggagacggtatgcgcgcgggccgggggcaggggcagccgcgtgcgggccgcggggagcgccaggagctcgtggggccgggcggcgcgctccagcgggggaagccccggagggcgcgatgagggccctgggtcctggtgccggccctggcggcgtacagcggagccgatcctcctgtcttggccgtgggctttgtggcaggagaatggggaagcagtggccggacgccgaaggcctggtggcagatggcgtggagcgcacgcccgcgggcctgggcctaggagctcgtgctagcggggccggagggggatgggaaggtccaggccgtctcagccgtagagcctggctttctggtatgggtgcacaggtgggggagggagacgtaggcgtcgccactacccctgtgtggacctggttagccgcttagttcccagagttggtaacccgagaagatgagccttaagaaaaaaaaaagtatcaggttccgtttgccgccgagaggtgagtggtggtgaaaatgaatttgcccctttcccctcagaattgtttacccttttatttgcaaa

SEQ ID NO: 42468 - DNA, 2300 bp, Homo sapien
cccgcccgtggcccgcgcccatggccgcgcgcgctccacacaactcaccggagtccgcgccttgcgccgccgaccagttcgcagctccgcgccacggcagccagtctcacctggcggcaccgcccgcccaccgccccggccacagcccctgcgcccacggcagcactcgaggcgaccgcgacagtggtgggggacgctgctgagtggaagagagcgcagcccggccaccggacctacttactcgccttgctgattgtctatttttgcgtttacaacttttctaagaacttttgtatacaaaggaactttttaaaaaagacgcttccaagttatatttaatccaaagaagaaggatctcggccaatttggggttttgggttttggcttcgtttcttctcttcgttgactttggggttcaggtgccccagctgcttcgggctgccgaggaccttctgggcccccacattaatgaggtaggtgaggcgcgcggcgctgggagcagggaggggtgaggaccggtgggacgcgccggaacgacggccgaaagccgcccctgactctcctgtctccgctccctgccttgctcgcaggcagccacctggcgagtctgacatggctgtcagcgacgcgctgctcccatctttctccacgttcgcgtctggcccggcgggaagggagaagacactgcgtcaagcaggtgccccgaataacgtgagtatcgctccgggccgccgggaacgcccggtgggttttcgtgggtgtggtgggggcgggcggagccttggggtcaccaagagccactgaacgagggtaaggagcggccaccgcgcggactccgcaaccttcccgggatagcttccgtgtccttggctcagctgtgtatgcccgtggtgcgagcactgcggagccgcctggggcgcaagccgggtcttcaccagtccccgggcgcgctgtcggtagggcgggcgctctcgggccaccgggcgggaggtggccgcgtccccagacactggctgggccagagtgagtttagcgcgtaggcggccccgtggcgagagcgcaccgagagagcctcggtgtgccaattccggggacgtccacgggacctggagggggagggaccagccgcggcgctcgctcacacgcaattgggcagacaggacataacacccgcaatacagacgcatcacctcttcttcgacccgggagtgggccgagattgcagcgctggcgccctgggttcccgggtgcttcctgcctgaccagtccccatgtctgggcggtgcagtcgcgcgtggcccgccagcacgtcagtatgtcgggtggcaacaggggaccaccactgacaggtctctcccgccctgtccccgcagcgctggcgggaggagctctcccacatgaagcgacttcccccagtgcttcccggccgcccctatgacctggcggcggcgaccgtggccacagacctggagagcggcggagccggtgcggcttgcggcggtagcaacctggcgcccctacctcggagagagaccgaggagttcaacgatctcctggacctggactttattctctccaattcgctgacccatcctccggagtcagtggccgccaccgtgtcctcgtcagcgtcagcctcctcttcgtcgtcgccgtcgagcagcggccctgccagcgcgccctccacctgcagcttcacctatccgatccgggccgggaacgacccgggcgtggcgccgggcggcacgggcggaggcctcctctatggcagggagtccgctccccctccgacggctcccttcaacctggcggacatcaacgacgtgagcccctcgggcggcttcgtggccgagctcctgcggccagaattggacccggtgtacattccgccgcagcagccgcagccgccaggtggcgggctgatgggcaagttcgtgctgaaggcgtcgctgagcgcccctggcagcgagtacggcagcccgtcggtcatcagcgtcagcaaaggcagccctgacggcagccacccggtggtggtggcgccctacaacggcgggccgccgcgcacgtgccccaagatcaagcaggaggcggtctcttcgtgcacccacttgggcgctggaccccctctcagcaatggccaccggccggctgcacacgacttccccctggggcggcagctccccagcaggactaccccgaccctgggtcttgaggaagtgctgagcagcagggactgtcaccctgccctgccgcttcctcccggcttccatccccacccggggcccaattacccatccttc

SEQ ID NO: 42469 - DNA, 2300 bp, Homo sapien
gctatttaaagtatcaaaaccataactccccattcgtgcctctttccgcctgttcccggcggaacactcctctggccttctcttgaggctcccagttcacgctgcacagtgctgggcactgcctcctctccacacccctagcgccccccacccctcagcagaagggcccgcgaggaaccgtgcgaggtcaggccgagcgccggcaccgccaccggcactggcgctgagcgacgagagcggactcctgcgagcgcagagagggagggggagatggagggctggatgagtcacgcggataatcgcgctcttctccagcgcgcagacagcgcggcaagcgcgtatgctagcaggggtgcggacgcgtgaccgtgccgcccgctgaccccaccagtcttcgcgggcttcgaacccagggagccgacaatggcggtgagtacggccctggtcgcgcagcgaccgaacctgcgcccggttcctcgcgccccgcgctggggcggacgccgccgccgccgccgacaccactgccgccggcgtcagctcggctccagcccgccagctgcctggctggcgtcacggcccggcccagccccgcccgcgcccctccttcccctcccccgcccccacgtgcgccgagtttgttgatttagctgccatagcaacgatggaagggagcctcggggggggcggagagaagaaagggaggggcggggcatgggagaaggcggaggaaaaggctgtagcgaaggaagttataagtaaggaacgcgcgccggcggccggcagtttcccgaccagagagaacgaacgtgtctgcgggcgcgcggggagcagaggcggtggcgggcggcggcggcaccgggagccgccgagtgaccctcccccgcccctctggccccccaccctcccacccgcccgtggcccgcgcccatggccgcgcgcgctccacacaactcaccggagtccgcgccttgcgccgccgaccagttcgcagctccgcgccacggcagccagtctcacctggcggcaccgcccgcccaccgccccggccacagcccctgcgcccacggcagcactcgaggcgaccgcgacagtggtgggggacgctgctgagtggaagagagcgcagcccggccaccggacctacttactcgccttgctgattgtctatttttgcgtttacaacttttctaagaacttttgtatacaaaggaactttttaaaaaagacgcttccaagttatatttaatccaaagaagaaggatctcggccaatttggggttttgggttttggcttcgtttcttctcttcgttgactttggggttcaggtgccccagctgcttcgggctgccgaggaccttctgggcccccacattaatgaggtaggtgaggcgcgcggcgctgggagcagggaggggtgaggaccggtgggacgcgccggaacgacggccgaaagccgcccctgactctcctgtctccgctccctgccttgctcgcaggcagccacctggcgagtctgacatggctgtcagcgacgcgctgctcccatctttctccacgttcgcgtctggcccggcgggaagggagaagacactgcgtcaagcaggtgccccgaataacgtgagtatcgctccgggccgccgggaacgcccggtgggttttcgtgggtgtggtgggggcgggcggagccttggggtcaccaagagccactgaacgagggtaaggagcggccaccgcgcggactccgcaaccttcccgggatagcttccgtgtccttggctcagctgtgtatgcccgtggtgcgagcactgcggagccgcctggggcgcaagccgggtcttcaccagtccccgggcgcgctgtcggtagggcgggcgctctcgggccaccgggcgggaggtggccgcgtccccagacactggctgggccagagtgagtttagcgcgtaggcggccccgtggcgagagcgcaccgagagagcctcggtgtgccaattccggggacgtccacgggacctggagggggagggaccagccgcggcgctcgctcacacgcaattgggcagacaggacataacacccgcaatacagacgcatcacctcttcttcgacccgggagtgggccgagattgcagcgctggcgccctgggttcccgggtgcttcctgcctgaccagtccccatgtctgggcggtgcagtcgcgcgtggcccgccagcacgtcagtatgtcgggtggcaacaggggaccaccactgacaggtctctcccgccctgtccccgcagcgctggcgggaggagctctc

SEQ ID NO: 42470 - DNA, 2300 bp, Homo sapien
cacaaatattctgaggaaacctaataggtaccagaatcgcagggttcaaacaggtgacaacgacaaaggacattggcaactagaactcaaaaaggggtgagcgcactctctgcccggtgcccgagcttccaccactttccccagtgtcccctctcttctctttcctaggttgacaccagcctaagcgccagcgttcgccggtgagggggctccgtggagaggggggcggagtcccgcgccgaacgccggaatccaaagtaaacacctcgccaaacctacgtttagaaagtgataccgaacaccacattcacgttttaaaaaaaaatactgtttgctaagaagatgagagcaaaacatttcccagctggaaaattactgatcacaaaccaaggggagagtgggggtgggggaggcagcgttataagattgaagtaaagatcgccgtttcctattcccttcccggtgggcaaggacgcctgcggcgggctcggtgtgcactttttgagagctaggatcccaccgcatcgctccacttcctggcacatggtcacttcccagggaagtccctttaggggggcctgacctacccggagcctgagccgaaggaacgagttgtcctttgacctttactggccatttcacctctttatgactcaatttctcatccataaagtggaaaggagagtgcgtggcttgaaaagtcatcagtgagtgtttaattcttctttaatgggtgtcttctattattattattattctacagtgcaatttagtcatcaaatattacaggcagtggctcacgcctgtaatcccagcacttcgggaggccgaggcaggctgatcacttgaggtcaggtgttcgagacctgcctggccaacatggtgaaaccccgtctccacgaaaaatacaaaaattagccggcgtcgtggcgcacgcctgtaatccccgctactcgggaggctgacgcaggagaatcgcttggacgcaggaggcggaggttgcactgagctgagatcgtgccactgcattccagcttgggcgacacagcgagactctgtctcacaaaaaaaaaaaaaagaaagaaaaaaaaaggaaagggcttcgagatggctggttgaaaactgtctccgcgcctcacagtccctcttctctcccttatgcctctgagtaaatcttgagccctttcactccctttctcgctatttaaagtatcaaaaccataactccccattcgtgcctctttccgcctgttcccggcggaacactcctctggccttctcttgaggctcccagttcacgctgcacagtgctgggcactgcctcctctccacacccctagcgccccccacccctcagcagaagggcccgcgaggaaccgtgcgaggtcaggccgagcgccggcaccgccaccggcactggcgctgagcgacgagagcggactcctgcgagcgcagagagggagggggagatggagggctggatgagtcacgcggataatcgcgctcttctccagcgcgcagacagcgcggcaagcgcgtatgctagcaggggtgcggacgcgtgaccgtgccgcccgctgaccccaccagtcttcgcgggcttcgaacccagggagccgacaatggcggtgagtacggccctggtcgcgcagcgaccgaacctgcgcccggttcctcgcgccccgcgctggggcggacgccgccgccgccgccgacaccactgccgccggcgtcagctcggctccagcccgccagctgcctggctggcgtcacggcccggcccagccccgcccgcgcccctccttcccctcccccgcccccacgtgcgccgagtttgttgatttagctgccatagcaacgatggaagggagcctcggggggggcggagagaagaaagggaggggcggggcatgggagaaggcggaggaaaaggctgtagcgaaggaagttataagtaaggaacgcgcgccggcggccggcagtttcccgaccagagagaacgaacgtgtctgcgggcgcgcggggagcagaggcggtggcgggcggcggcggcaccgggagccgccgagtgaccctcccccgcccctctggccccccaccctcccacccgcccgtggcccgcgcccatggccgcgcgcgctccacacaactcaccggagtccgcgccttgcgccgccgaccagttcgcagctccgcgccacggcagccagtctcacctggcggcaccgcccgcccaccgccccggccacagcccctgcgcccacggcagcactcgaggcgaccgcgacagtggtggggga

SEQ ID NO: 42471 - DNA, 2300 bp, Homo sapien
agatcccagtgtggacacccaggtcccaagactgtgtccatttccccgaggtggaagggagaggagctgtcttcaggggcagatgtgctactgagcatgcaaatgtggatccggatgcttccctttccatgtgctccagcccagtgtcccacagcctagtgacctttgggcatctctaagtcagcagaccccaaatgtgagtgtgtgtgtgtgtgtgtgtgtgtgtgtgtgtatgtgtgtgtgtcaccatcatccacttagcagctcaaggcagagacctggaggctgtgggtaggggtcaagttgacgaggggacatagcaaaatggtaatcacattcaaacaacatttcaagtagtttacccaaagtcatacagattataaataataagtctatgtttgaacccaggtcttcggaatccagttcctcagtcttccatctgctctgtactgcctttctgtaaggaatggataaaaagtaggctctggcagtccatgaatactgcctttaaatagcctaagagttgtcgtggaagaatttgcttgccccgtagaacttcaagagtagacccaagaccatttaatggcttcagagaggtacacatgccaatccagtgtgacgaaacgtttatcactcatggctggccaaaatagggtgagctgtccatgtcagactactggatggaatgttctagaaggaactgaagggtccaatcctcagcttctgtgatttcatgatcccaccacagggcatttctgggtcatgatgttcataattataacccttagaaagttgttacccaaataatatagttgaatgctgccatgttccaagaaacaattcagcgggctgggcatggtggctcacacctgtaatcccagcactttgggaggccaaggcgggcggatcacgagatcaggagttcaatgtcagcctggccaacatggtgaaaccccgtctctaccaaaaatacaaaaattagccaggcgtggtagcaggtgcctgtaatcccagctactggggaggctgaggcaggagaatcgcttgaaactggaaggcggaggttgcagtgagctgagatcgcgccactgcactccagactgggcgaaagagcgaaactctgtctcagaaacaaacaaacaaacaaaaatttggcaaacaaaaatccccacacattcctcattagcattcttacatgctccatggcagtatttcttaactctttttcccccatgcatgttgcctaatcaattcctcaggcacctctgctcatcttaattctcccagaaaacttcctcaggcccagttgccgctcttcccctttttctgttgactcttcaccaccaaagccctaaactgcctttttgatttttggagtgggagggggcagcttaagttgcaggtccctctggcactctcgtgaatttgtcctttctggatgacaggccatctttctttgcccgggtacaagtaagcgattcatccttccctctgcctcacatcccacatcacaggagcccatgagggaagccctgaaatgtcagagtaagagcttggattaaagtgagggatggttggggaaaaaacagattggattctattctactttctaagtttctctagaactaggctcttccttgtttccacactctcacagccctaggtcaggccaccttcaagtcttatcagaagttctccaatggcctcgtttcgggtctcagtttctagtcttgcccctcccatccattctctacattacagcccaatgcagatctttctaacatttttatttttcttttctttttttttgagatggagtctcactctgtctcccaggctggagtgcagtggtgcgatctcagctcactgcaacctttgcctcccaggttgaagcaattctctgcctcagccccccaagtagctgggattacaggcacccgccaccatgcccagctaatttttgtatttttagtagagatggggtttcaccatcttggccaggctggtcttgaactcctgacctcatgatccacctgcctcagcctcccaaagtgctggtgggattacaggcatgagccaccacgcccggccctttctaacatttttctagagggcaaatctgatcattcccctgcttaaagtcttcatagcttccctggctctcctcagtttagtctaaacctactcctgccatttgatgccctttctatttggctctgtgacttctctagcttcatctgtttttccaaacactttgactgtgggaagttcttcaccgtgcctccatttgagcctttgct

SEQ ID NO: 42472 - DNA, 2300 bp, Homo sapien
ggcctgggtggggccaatgtaatcacaagggtccttatatgggggatacaggagggtcaagggcagagaagcagatgtgacaatgacagctctagtctgagagtcttccaagatggaggaagggactatgagccaaggaacacaggtggcctctaggagctggaggcaagaggaagtattgtctcctacacctccagaaggaatacagccctgaaagaaccttaattgtagcccactaagaagaattacgaacttctgacctccaaaatagtaagataataactgtgaattgctttaagccactaaatccatggtaatttgttacagcagaaacaggaagctaatacaggctcttctaggagtccaggttagtgaaaaggcaccaagcagctatagatttcgcaacattcaagtagggtttgggaagaaaaaaatggagggttttaaattacatatgcctttggttaccatatacagcacttttgaaataaagtcaaacaatctgagttgcccacgcaaatccctgaacggcagaggcaattaaactgtttttcaggcagccaggcatcaaaagtactttcctatttttcctttaaaattccatgctattatctcacccactaaccaatgaagcaagaaactgagattttgtccttgggatgacaccttgctgcccccatcagatagtcaccacaaacctcatgagactggacttggtccttttcttctctcatacccaacaaggaactgagagcaactcccgtagcctctctaaaggagaaagcccattattgtggtgactgcctcttttatgaagggctgggatcaggttcagggtgtggcataacataaggttggattctgccctgagtgtggcaggcatccacaccaatgtgtccagcttcagaaatggcatgcaagatggtggccaaacagcctaagagttgcacgctaggtcccatcaagctgtgtcccagcacatcctggggaggaagccacagtcaggagagcttggctactcctggttggatatccttgggtgagctatgcacctaaaagcctcagtgttgtcagtgggattttgtagagtctaatttcactgtctagccaatgaccctgatgaaggcacagtaagtgtacacatgtatatccaaaaataattccccttaaggttgttctaagggtcacccttagtgcccttagtcaccatagcagcaaaggattcccactaacatctaaatcagatggtgtcagtgctctgtgccaaatcctctagtgctttctgaccttacccacgatccttgcattggcctatgaggcctaccatgagctgcttgccttcccccaccccatctcatctacttttccttactccttctatgccagccacacttttcttcctgctcctcctttaactcgagaggtcggcaaactttttaagggtcagtcagtatttactttctttcagctttttgggcaatgcagtcttcaatgctgtgactcagctctactgttgtactgcaatggcagtcacggacaatacgtacatgaatgagcacggctgtattcctatccaacaagccggggaccggattggactgcagcctgctgacccctgatctaactcttcagtcacacatctgcctccagtcctctgcacctgctgctcccctgacatacacatggctctctccctcacctcctgcaggtcttcattcaaatgtcaccctctcaggaagccctgcccaggccacactagcactgccaccctgcttttgctcttaacgctcattttggttattgtctgtcacccccacccgccaccgactagaataagggattttgtctgtttttttcaccagcgaattcccagctgccttgtatatagcagacattcaagaaatattaattaattgaataaatcagtcttgttacgaaatttaggaaaaggggagccatttcaaaaacaatatcccaaatgtaccctaacacaggataagggtttgcaatatctagaaagcccaggtcaccagattacatcataattagtgatgtcactgttgggaaaattctcagggtatcctctgatgtaggcctttcaggccttgaatccagtgggattgagaactttctaagagtggtgcggctcttgacaacatgtgggctccaccagcagcaatcatgggggatgggcccaccaagaaggtgggcaaccaggcccccctgcagacacaggccctccagactgcctctttaagggatggcccggcgaagcgggccgtgtgggtccgccatacgag

SEQ ID NO: 42473 - DNA, 2300 bp, Homo sapien
atttttgccaaagcttgtttgatgttcagctgacccttgcacaacgtgagtttcaactgtgcgagtttgaactgtgtgggtttatctaaatgtggatctctctcaaacacagttggccctttgtgtccacggcttctgcatccacaatcagtgtggatcaaaagtacaatatttgcaggatttgaaacttgcagatacagagggccaacattttgtgtatccaggctccatggggtcaaatgtaggactggggtatgcttggattttggtatccttggggtgtcctggaaccaattccccatagatactgggggacaactgtagtttgattttatatattatataatatgcagttaatatataatacacatttaaaaattatgtagctttgggtttattgctatatgtaaatgctagtttctattcctatatatgaatatcacaagtaataaagttctcattaatcatttttttaggatcccaaagaatatcttccatttcttaatacacttaagaaaatggaaactaattatcagcggtttactatagacaaatacttgaaacgatatgaaaaagccattggccacctcagcaaatgtggtaagtgtggggattagtatgtttatctctacttcagatcttctttggaactaggcaaggtataaattaaactgttagtttagacagtgactgatttcacttcccactcctgaaaactctaacaattatgtatgctcacgttattttgtcctgtgttctgaaaagctgaaggtaatcacttttaatgaactggaggagctccctaggtaagaacgtcaagtagatccttttttggttaagaatgagcacctgtgaagttaacttcagtgtctcagaatcaaaattggttgtcagttcttccttctcatgctgtttgcagacatgtcagggaaactctgcttgtctggagagagtgatgaggccacctccccgtgccctgcaagacgcagttttaattgacagtgatggggtgccagttgttcttcccatgctggaacagttgtgattctttactgaggactgatgggggaaaggaagaatcacctggggtgcatgttaagccttcagctgctggcatccttggagaatctgattcaggtggtctgggataggactgaggcgtgcatgtgtctaataagcttcccaggtgatgtcttttcaaggaggctgagaaaacactgggctggaaagctgggactcttaagtaggatgctgatcccaatcagtgctgctcttgcctcagaatctgcagtggtgctcattaaaaattcaaattccaggatcccattcttcagattctctgattatttaggtcttaaaaagttcctcatttattttgtttggtgaccattggtataaatgaagtccattatgcttcccatgtcttaagcctgtctttgtgtgaatctttttcctgcaggacctgagtacttcccagaatgcttaaacttgataaaagataaaaacttgtataacgaagctctgaagttatattcaccaagctcacaacagtaccaggtatgtggtatgtgaaaatgaggctctcctggttttgctttttgctttagtaggaaaggagtgaggatcctaagttcataacaccatccttggcttcaaaatttatcttaaaactaattagcctcaatttgaacttcttatctgggagaatggtcctgacctgttctctgattcctcatctggaataccacagcaccttcctcgtggggttccctgcttctttcccacccctcctctagcccaaccttactgctgtaagtctgattatcctaacaagtacagatctttcccatatatttcagcataaagggaaatttttgtttgcttgaaaaagcatccctttagctttttttatataccacacactttgcttctaagttaaatgtgttatatgatcctcttaacagcctcatagggtgctgtacacaatttgtagatgaggaagcaacttgcctgaggatccagagctacaaagtgctggacctgggatacagagcccaggctgcctgaccaccctgcccatgccattaaccaccactctaccatgccaccagcatcaccattttcagtttgtcctcagacaatatacacatctttctttgatcaagcccctgccagcttctttagcaccagcttctgccactgtccacattcccagttacttgtaggtagttctacagatgtcacatcgtgtgattcctctgtcatttctctacccaccagccttcctttagccccatttg

SEQ ID NO: 42474 - DNA, 2300 bp, Homo sapien
gtatgtgtgtgtggcgtgtatgtgtgtgtggcgtgtatgtgtgtgtggcgtgtatgtgtgtgtgtgttccttattctaaaaagccaacttattttctttgcttccaacttggaaatagggaatctttctttcattgatatgattatagtacactgataatgctaagaaatagagaagttgccccaattcttaactgtgtttctccacatcatttgagaagctgtgtatgtgaatgtgcatgagggctctgtaagagagagggcaagttccagggatgagcgtgttcatcagcagggctgatagtcttgaggttcagtgggagagctaaggcacatggttgttatttgttctcttctatttcacataatgtgtgcggtttcaattgcagttaatggagagtggcttgttgtgataattaaggcttattagttaatggtgtgtttagcattacaggccggcctgagcagcaatcatgtgtcccatggggaagttctgcggaaagtggagaggggttcacggattgtcactgttgtgccccaggacacaaagcttgtattacaggtaagctggtttttcagacaagatagatagtctgattgtcattcagccaagtaccaagcataattcttgcaggttgtattttaggctttcttattctttgtatcgtttattgtaaacctttccttgatagttttctgttagctttattcaaaggagtgttgatacaggctgtgaccataaggctcaaagcgaaacttttcttgaaagtcaagataaatatagagaacaacaagattctgctaaaagtgtgctgattttagagagttgtggtaattctctgtgaagagttaggtaaaatggtgtatcctggctatttaaatgttttctacttaattaaaaatgttactgctttaatttatttaagatgccaaggggaaacttagaagttgttcatcatcgagccctggttttagctcagattcggaagtggttggacaagtaagtgccattgtactgtttgcgactagttagcttgtgatttatgtgtgaagacaataagtattttattacaatttcgagaacttaaaattatgaaaagccctcattacctatatcatcaatcagattcttagaggctcttttttttttttttaacttttttactttaatgcagtattttgtagtggagattcctagcagaaagaatcgtgacactcatcatataaaggagggcttctcttaacctgagggaacacatgtgggttttaggtggcctgtgaacccagggagattgtacacaccaaaccttgtctttgtgtatttattcaagtagaaagcccacagctttcaatagatttacagcggggcctatgacccagaaaagcctgagctactcttgtgaaggaaatgactgattttctgaacctatttggaggaaactttgtattggaaagatctatactaatgttttgtttaaaaagtagacctgaattccatgatgattttctttgttttttttttgagacagagtcttgctctgtcacccaggctggagtacagtggcgcaatctcggcttactgcaacctctgccttctgggttcaagcaatcctcccacttcagcctcccgcatagctaggattacaggtgtgcaccacgcctggctaatttttttttttgtattttcagtagagacagggtttcaccatgttggccaggctggtctcaaactcctgacctcaagtgttctgcccacctcggcctcccaaagtgctaggattacaggtgtgaaccaccgtgcccgggcttctgtaatgattttctgttgtatgtatgtgaagatgtagttctcagacagtcatgatgactaaattacaccttttaagaaggtaaatgaatgtggtacctgatttttttattctgtaatttcagagtagaaatccagtgatagcagcttggcattggggctgtaatctgattataactggtttgtatcataatgaaaatatgctgggcccatggagctcagtttttgtgaatatcttttctattctttctctgtcttctcacagacttatgtttaaagaggcatttgaatgcatgagaaagctgagaatcaatctcaatctgatttatgatcataaccctaaggtaactttctaagctgtcatttactctagcttactttgtacttaaactaatatgatctgaacgaagatgttttgtcctttttttggtaggtgtttcttggaaatgtggaaaccttcattaaacagatagattctgtgaatcatattaact

SEQ ID NO: 42475 - DNA, 2300 bp, Homo sapien
ggatggtagaatgcagtggctggaaaacaaaaccgcttgactaattcctgctcttctggaacttgtgatctattaatttcaatgtaatgattccctttgttgggagtgtgatggaaatggacagagtatactggtagagaatactgagatgtttgaggggtaatttgaggatggtggctatgagaatgggagtcctgcatctggtggtccaggaaggcctctcggaggcagtgatgtgtgtgctgagatgtgaagaaaaagaaggctctgtctccaggcagaaggaacaacaaactccttgagcttagcaagagctcatcttattcaagggactggatggaagtattgtggctggagctcagtgacagtcataggagggaatttgggttctttaattgaacaaagattagaaacttcttgtgatttttaataacagagtaatgtgttctgcttcatggtttggacagtgattctggctgcccagaagagacttgattggagagtgacgagactggaatatgggatcaacaccggttgagtggagttagtgaggggaaaaaggagatgggtttgagatatgtgtaggagatggagatgtcagggctcactgatggattggatggcttcacattccattttgcactggaccagccacgtcttaggtatctatctttagtcctgattacaggaacttaggtgtgaaatcatagggtggtagaactatgtgatagaaaaggtaggtttaactgatttgagatagaattgcttgtgatttcagttttatttctttgcaggaatgtgtccttggtctgactgacaggtgtcgctttttcatcaatgacattgaggtatcaaggcttggtttggtgttggatccttttcacagtgttagctccgagtaatctagctagctttcacccatgcctctctggccttctcttgcaggttgcgtcaaatatcacgtcatttgcagtatatgatgagtttttattgttgacaacccattcccatacctgccagtgtttttgcctgagggatgcttcatttaaaagtaagttttcaatgtataaaacagaaatggtcccttctccaatgtcttttggagtcttgatgactttttgaattcttcatttattttggctttttatcaaggagtcctaggctggagaaaatctttagagttattttacttagaccctaatctcaacataatatctcagttaaatcattctgcactttagtaaagacatccaaggaagggagttccttccttaagcagcacattctaaagttaaaaacttttcaggaaattttattatgtaactgatctaatattttatttggaattactatgtagatccccaatgttttaccttctgtgtagtcttttcccactgtgcccaccctccactgtacatctgcgctccatctagtggtttgtaggatattggctgcattttgtcttctgttccatgccctatctatctctgtgtgtgtggcgtgtatgtgtgtgtggcgtgtatgtgtgtgtggcgtgtatgtgtgtgtggcgtgtatgtgtgtgtggcgtgtatgtgtgtgtggcgtgtatgtgtgtgtggcgtgtatgtgtgtgtggcgtgtatgtgtgtgtggcgtgtatgtgtgtgtggcgtgtatgtgtgtgtggcgtgtatgtgtgtgtggcgtgtatgtgtgtgtggcgtgtatgtgtgtgtgtgttccttattctaaaaagccaacttattttctttgcttccaacttggaaatagggaatctttctttcattgatatgattatagtacactgataatgctaagaaatagagaagttgccccaattcttaactgtgtttctccacatcatttgagaagctgtgtatgtgaatgtgcatgagggctctgtaagagagagggcaagttccagggatgagcgtgttcatcagcagggctgatagtcttgaggttcagtgggagagctaaggcacatggttgttatttgttctcttctatttcacataatgtgtgcggtttcaattgcagttaatggagagtggcttgttgtgataattaaggcttattagttaatggtgtgtttagcattacaggccggcctgagcagcaatcatgtgtcccatggggaagttctgcggaaagtggagaggggttcacggattgtcactgttgtgccccaggacacaaagcttgtattacaggtaagctggtttttcagacaagatagatagtctgattgtcattcagccaagtaccaagcataattcttgcaggttgtattttag

SEQ ID NO: 42476 - DNA, 2300 bp, Homo sapien
attagccaggcatggtggcagatgcctgtaatctcagctacttgagaagctaaggtagtagaatcacttgtacctgggaggcagaggttgcggtgagccaagattgtgccactgcactccagcctgggccataaagcaagactccgtctcaaaaaaaaaaaaaaaaaaattgggtgagagggaggaattgaggaggataccaagggttgggcctgaacaaatggaagcataattatatgtagaaatttctatgagctactcttctagaatagatgactcaataataccctgcttgccatctacgttttctgtccttaattatttccagttctatttcatataatgcctatttcaggccttaacccttcagtaaaggaggtttggtttctataccctaggacagtttcattgagaataaattttgttaggctacctatgtattccctactgtgcagactacagtacagtactagcagaattcttaggctgttactagaatatgatgatgaatgcccgggtggtcatctgtctcccacccggtagagttggcttcaggattgagatacacgtggccctggaggagacgtttcttcccgtcatgctgcagaatgagaacatttccatgttttcgtcattgtctgctgctgcctttaccacctctgtggctcctccctattcaccttgttcacatcttaactcatctgtgccctgttgtgaagcttacacaatatgtaaacaaaactctaccctgttggacaaatggaacacttgtttccttgttgtagttacctgataggttccttagctcattatattcaggatctagatctgtagctcttttcctcttttgctgttctcagaggccactttttttttttttaatgccgaaaggaggattttgtttgttttacatttttttcttctttttgatgatttctgcgttctaagaaccaacccttggatggtttctgattctagaggcaggctttcaaagtagcttaaacctcttaaaaaacatctgtatctagtggtctgaggcttgtttgattctgggatacttaaggtcccccagtaatattggtgtttgttcccctttttagcatgagtctgctttgccctgggatgaccatagaccacaagttacctggcggggggatggacagttttttgctgtgagtgttgtttgcccagaaacaggtatggaaatatattgcagttaaacaacaataaaaaatttttatcttattaaaattaaggaaaattttctttcttttgctttgagtagggtattaattatacatatgaggcaaggatgtgctgctttaaatgtgaaatgaggttagagttaagaattagaagagtcctttgaggccatttggtccatcctcctacctggtggacacaaatttgtaacaaaattaatctaattggctatgtaaaaccatggcagtttttatttgtaaggaaggtgtttgaatagttctgaattgacaacttttatcataatgttttaagtgtgtatgtgtgtttgactccactcccgcacaggggctcggaaggtcagagtgtggaaccgagagtttgctttgcagtcaaccagtgagcctgtggcaggactgggaccagccctggcttggaagtgagtgggagaagaaaccttagagaaattcttggaaccagagtagaggtggtggtacacatggatacagatgatacagatgtttgtgtaacacaaaaggatttttacgtttcttcatttggttataaggctgtatctatctttgtttcttcttttttttttttcttattccctgaagtctgaattcaactcgaatagtagattttacgcttcttcacagatttcattgttccaaggccgcatatattttgcattcctaactcttaaaaggctgtggttttaaggcagggtatatatgaagccattgtacagagcagaaaatggtgtttagaagggaaggcccagtttgcaaggctctgtggggcaaatggtgcttttgtggaaattagggaaagagcctccttccttggcacaaaattcctacagcagaggatctgcttgccaaggagcatgcaggctggattcagaccctgctctttccttccattctcctccttggcccagtacccttgtgcaggttacaatttgcctgtcatatgtggctgcctgattttagatagaagatgtatctcctctgtttcggtgatatctgttgtatgtagacctcttgtttcccaccagtatctgaatggtattatatgatagagcagaagagaaatgt

SEQ ID NO: 42477 - DNA, 2300 bp, Homo sapien
ttgtcactttaatccaaggagacttctctcatcttggcaccccacatatgtatgacatagaaagaataaagatgaatcaatcctaatagtacacagaagataatgtcaagtgtcataggaattatataatatataatgtgggataagagaaaggtaagtttatatatgatggaagtgaggaagacaatgattttagtaagttttggtgacaattatattcaagaactgctagaaattacttgaacctctaacatatcatgcaggtttttttgttttttgagacggagtttcgctcttattgcccaggctggggtgcaatggcgcgatctcggctcaccgcaacatctgcctcccgggttcaagcgattctcctgcctcagcctccggagtagctgggattacaggcgcccggcaccatgcccagttaatttttgtatttttagtagagacagggtttcaccatgttggccaggctgttcttgaactcctaacctcaagtgatccacccgcctctgcctcccaaagtgctgggattacaggcctgagccaccgtgcctggctgcgtttttcatctttaaacatcataaaaacgcctcaaaactagtttctctgaaatttcacacccatcagccttattcccttatcttctcggaggaagacttccctccacttctttccaggctaggaaaggaatatcctccatattgccacaggacctaggcctattagtactctttcttggacatctgcaacctccaaccttcctgcctccactgattcaaactcttcgcagttcttaaatgtgctaaagatccctccacaccaaaggtcaatcgtggattctctcttaatttcctgataactgcttcattttcttcccttgctccttcgactatccacctcttggctagacatcacatgcatgattacatataccaggtagatcaccaatacgctgattaggcctaaatgcctagccctgactgaattagcccaaacttaccactaaacccacattttcaacctcctgatagaatcacaagcatgtctcacatgcacatcaaatgcgacctggaaagcaaagaacttgctattcttcccccaaatgacagttcccactatttggggacagaccatttctactctatgtccccaagctgaaaaactgtctttgctgcctttttgcttactcttcatacggatctattcattgattagttccgtggctgtcaatatacagttgaattctttacgatccggtttgtggcctacatccaacaccgactgagcacttgctaagtactgggatctgaagattactcagccactgtctccacggagatcatcgttaacgggagagaaagccacgtaaaacaccacgttagatggagaagcacagaggacaccacctccacgaaaaagtctcacacgcgagaaaggacccgcaccacagcacccgagcctctattaaccgccgccttccatcgtgaattaatactctcgctttcagcgttattatcaaccccctgcaagcaatcaagaggctgggttaagtccggctggaggggcagcaggcatccctgggctgtcgcgcctcccagcgcccccgatggagcaggtggcaaggctgcaaaaagaatttaaggctctaggaaagaggtggtgcagcccgcactccagtccccggcccgcagcaggcagaggaggctccgggtctccttcacccggacaccgccggcggagaggtccactcccgtgcccctaccctggatggatcgcttacctgaggacccccaaacagaggtgcgtccggcctcgcctccccagccacgcgcagccggctacccagagtcagctcccacagtccgcacccagagtcggctccgaattgcgcacgcgtctctgtccgcggctcccgctctctctccgacggcactaggcctccaaggatggaggcgccctccaggggaaaacgctgaagcgctgcaaagaagccagcgactcaatgggtgcgtcaactaggcagccgcagcactgggagtgcggcgcgggagtgacgtcaccaggcggagggggcgaggccgggcccgcttctggtcacttacggcggccggccttctttgtaggcctggcaccgtagaggtagaggagctacattggccgcgtcccctgtccctctgccctcttgcccatctgcccaaacttttgtatttgatctctgttttgatgtcgaaccccaaagcactgtaattggggggggcgggggggggggtggaacctgcggacctgagagcagcgcg

SEQ ID NO: 42478 - DNA, 2300 bp, Homo sapien
atttgtttagtcaaactatcatcttccccctttttcctttggctactattggggcataactgtagaatagagaatacaataataaaagagaaaacaagattgaatttctttcccaggaaagggaagagtaccagaggtctttaggtaggtagcactggggtagaagacaaagaaataaggcatgcctgtgtatacgagataccatacatgtctctaccgtagccctttctgtgggctctgaacagttcagtagttgggcacagactggccacttcaagtagcagctgatgatgtggtcctccatttggatgtttgagtaatcaaatttatatgttcagagtggccaggcactggaatactcattcttgccaaacaaactcctataataataccatttcaacacagtagaagataattaatgcatgtttgtttagtgaacatttgttcaatccaagaccacaagaccataccaggctacaataccaggaaaaaaaaatttttgataatttaaaattcccaatttgcttaccggttagagtgctgtagtatacagtggtcctcacaaaattttcctttgacatctagaagaatacatgagtctgttggtggctgaaatcaatatttactaccactatgtggtactttctttgggtcatatagttgataatgaagactggacacatacatgctgcatgctgatcacgggtatcccttcattactcaaaaagacatacctaaaggtttcctagaaagtatttaaagagatctggcccagatagaataatttattcaacattaaggtaattaactccttgctccatcttactttacactcacttcaaaatgagtacacgtagtatttttgctaggaaaatgcaattagcatcccgttctttatgatatatattttttgttggtggtttccaggactgtcctgatgttggtgcaagtccgacattctgggaaacccctcagtcatgggtgaactaggacaggttggtcaccctatgtttggccaacagaaaatatgctacaatatatattttttaaactgagtataaccattatcactgaatgaaaggaagaaaggagagtccccaacgatgctcccaccactggttctgcttacacaaaacagtacaaaaagaatacctacttctaagtggcagatggcgtctcttaaggtaaatgtatagattcttcttctttctaaatgtctctaatctaacccaccctcttctcgccatccctactgcctctaccttagtttcgatctgatcatttaaataattttatgtatcgctactccctgtgagagtgagcccctcaatccctccaggcacttaaggactgttgcaacctagccctccgcctacctttggggcctccgtttagagtactcatcttactgcgagcaacaccctagagctcgcactgcaatcgccggccccagaatgcgccctgaagtatttcaggccaccaggtctttgcaaatgccattccctggggctagacggaacacagaagtccagtgccttctgacgtggggacggagagccagggagagcgcgcgtggcttatgatctgtcaacatagtctacacagcattaggccagtgcggccaaggagggatcaacatcactccgcacttacccggtttgtaccagcgagtgaagtatcgatccacgagcgaaggcaccaccggctccgcggcttcgggctcggtagccatggcgacctccggcgccgccacccccgccctccgggaccccagcgcttcctccgcgcagcccggactgggcgtgctcttccggcgcacagcgcgtgtcgtgcgcacgcgcgctgctctcaggtccgcaggttccacccccccccccgccccccccaattacagtgctttggggttcgacatcaaaacagagatcaaatacaaaagtttgggcagatgggcaagagggcagagggacaggggacgcggccaatgtagctcctctacctctacggtgccaggcctacaaagaaggccggccgccgtaagtgaccagaagcgggcccggcctcgccccctccgcctggtgacgtcactcccgcgccgcactcccagtgctgcggctgcctagttgacgcacccattgagtcgctggcttctttgcagcgcttcagcgttttcccctggagggcgcctccatccttggaggcctagtgccgtcggagagagagcgggagccgcggacagagacgcgtgcgcaattcggagccgactctgggtgcggactgtgggagctgactctgggtagccg

SEQ ID NO: 42479 - DNA, 2300 bp, Homo sapien
tttttttttttttgagatgtagccttgctctgtcacccaggctggagtgcagtggcatgatctcggctcactgcaacctccgcctcctgagttcaagcaattctcatgccttagcctcccgagtagctgggattacaggcacacatcatgacgcctggctaatttttgtatttctttattttttattttttttgagacggagtcttgctctgtcacccaggctggagtgcagtggtgcaatctcggctcactgcaatttccatctcccgggttcaggtgattctcctgcctcagcctcccaagtagctgggattacagttgtgtgccaccacgcccggctaatttttgtagttttagtagagatgggatttcaccattttggccaggctggtctcaaattcctgacttcaagtgatctgcccgcctcagcctcccaaagtgctgggattacaggcgttagccaccacacctggcctaatttttgtatttttagtagagatagcgtttcgctgtgttagccaggatggtctcaaactcctgacctcaagtgatctgcccaccttggcctcccaaagtgctgggattacagacatgagccaccgcgcttggccaactttttaaaaaaagattatagcatctcctttgattagttttatttcagaatatttcaggatggcatgctcagtattttttgtttcagtgtcagaattgtagagtatcccatggacactgggaaacatgaggggttgcactacgaggggaagctctgtggaataggacttcttcctagaatatagttattggatagtagtgatgacattccagaatagaaaatggatttttctgtaatagataaataccttgtagcagttttcctgggcagatttatagcccttcttcaggttactgtttaaggttgtcttaataatttatatgatttcttaatgatttacatgtaatcattcatatttcttaataatttagatatttaaggttttctagtgccttatagtttttcaatatttcaaacatactagtaccttattgtttttaatgtggtttttgcttcatcatttcatttgattttcatgacggtttactggagaacaggaatgatatgttcacatctcctaagtggcagaactggttgctactagattccagattttctgacttatccctagtccattgctcttcttaatgcatttggttattcttattgtaatttacttttcattttttagagttcttaattcttcttggtagtttttaatctgctgttcctcaatcttctgatgagagtggtagcacaagtattattatgattgctttattcactcaaaatagaatgttcagtgatatgcctcatcaaggttagataactgagttactaccagaattgaaataagaattagaagtgaaatgtcctgagttttggtttgatcctctttccattacgtaacaaaggctttcggtcaagacattatcaaatctcacatatttaatttatgaagtaaaatgaaaaaggttaaaaagagaaatggaacttaaatattacttgtttaaaattttttatattatgaaattaacataaggtttacttggggaaaaatatcttaataaataattgtcaaatattaaagttgctttaagcataaagttacaatattatcagtctattcatattattcttcaaaatttaggatttgttaatacacaaatgctctaaaattttaatattataaagtcaattttcaggtaataactttttgttaccttcttaacaattaattttattttagaggagaggggccactgaaaacttcccaggatttaattcatcaactagaggtatgccttgtttccgttttatgctagtactttaatttcgggctaaaagtgggtaataaatgttttccagatgatttattatatcatgtgtatatgcttacatctgtacctacctgtgtattacagagagcagtagaaaagtagaaaggtagatggcttgcaatgacattttgcaaaactatcctgacctcattggaaagaaacttaaatattatgagcataaagtagaatgggctttgttggtagtcaatagatgcaataataagctttaggtttacctaagtaggtgaaaatatcctgtaagcagatgcaaatccagagttctagaaagatttttggcctcttcattattgaattggataaaatatattgattaaatgagataacacatgagagagtatctgttaaaatgcttaagactattagagggtattaagtacatcttagtt

SEQ ID NO: 42480 - DNA, 2300 bp, Homo sapien
aaaccactgcggagattatatcactttcctgtttaaaaaacccttcaatggcttcaaattactacagagtttatagtattttctagtttaaagacccttaagtatcttcctgtaatacatagaataaaatataagttctttttttttttttttttttttggagatggagtctcatactgtcacccgggctggagtgcagtggtgcaatctcggctcactgcaacacccacctcctgggttcaagcaattctcctgcctcagcctcccaagtagctgggattacaggcatgtgccaccacacccggctaattttttttttttttttgtatttttagtacagatggggtttcactatgttggccaggctggtcttgaactcctgaccttgtgatccgcctgcctctgcctcccaaagtgctgggattacaggcatgagccaccgcacccagccaatataaattcttcattccaattccagaaccctatattccacgctggtccctgcccatcccatctcttggatattggttttaacttgcccccgacccactatcctttagccacttccgacttcacctcattccttgaacaggagaggctcattcctaagggctttttttttttttttcctccactgtttcttctcctagaatgctctttatcctttgatgtttgctggtctgactgctttgctatcatttagatctcagcttaaatatcgctttgtcttagaaggaagaccagtcaatttcaggtagctacacagatactttatatcacactatcctaacattttgtacataacagttatattaaagtttattttttgtttacctatttatgtgattattagttctcccccactccttcactagaatgtaagccccatgggaacgtgggcttttctttcttgttgattgttatttcaggtttgcctagaattttatttgggatatgatagtgtgcaacaaatatattttgtgtaactgaattattgctattctaccatactgtaaacctaatggtggtgggattgtcttagtctcattcactgatacatccttaggaactggcatatagtagatattcaaaatttgatgaaaagcaatattgtagttgaggaaatttagatattaaatttccctagaccacttagcaagtaatcgccgagccaagacttaaacctaggtctattaattctaaaatattaatacctaaacatacatataaagtgcttggcacatagtagttgtacaaagagtagaagtgattctcttccccttcttgtaattctcttccccttcttttaatactagtacatgtacattgagcaatagttgggaatctatgtttttcatacaacatttctttaataaatattcttagatgtcagcatagttcatgtactagttccctaagatattttgaagaattatgtttgtttcagtgagctgaagttgtcaccttttgtattttatttcagggcctgggatcaagtgttaaaactctcggtatttcgtttattttgagtcggatgcaacaaaacttagcaaaatgtgaaatatagattacaatgctcattctaaagtatctagttaatttggtaaacatgtatggcacaagtactattttgtacagcctgtgctccatggtaggcaacggagtggaatggagaggaagaagagctgtttctactctcatagcatctgaagtcgtagtagaggaaactagacctgaagtactttggctttctgaatgtaatgatctatccgcttctacttttctccttaagatttgttgaaagatctggagggcctctggaactgtatgccccagataaactgcatgccccagataactgccctcaggtgaacttggagttgtaattaatggaaacattgtcttaaggaatgatgcaggatactttgctggttgtctctgttgaagcatctctaactattgatttagtctattgagctatacagtatgccaggcttcattttctttgactttgtgatacagcttaaaaaagaaaaggtattgagataaaagttgcttttatcttttatttttagatcaccacgcttattaatcataaagataataccaaaaagtctgataaaactctgcaagcaattcagcgtgtaggacaagctgtcaacttggcagttggaagatttgttaaagtaggagaagctatagccaatgaaaactgggatttgaaagaagaaataaatattgcttgtattgaagctaaacaagcaggtaggtggatattgattttgaagactattcatacc

SEQ ID NO: 42481 - DNA, 2300 bp, Homo sapien
tctttactagacatctggtttcttactagctttttgctagctttttattttacagtgaaaagtatggaagcaaatcctgataattttggcttattatcaaatatcatttattttttattgcagagacccagcagatgtaactctcattgtagccatcccaaagaaaacccttctttgccctttgcagtgccacttatttaggtaactgaagtgtatttccagtacaatttgattttgaactaagatttgatatagagttgtaattgcttacataactctttgaaaatgtatcatccctgggttctcaggtgaaggaggcaattcaaaagtaaaaaagaatattcgaatacaataaataccctctgttctcacacaaatgctgtttcttagctaacttgctttgacaacctactgatgtaacttctttattaatgtgaaatatttatattttgaaataaaattactagtgttgaatgaatcatgtggtaaacttaatctcctgtgtgttgaaaaacttgatcttttgtgaagccaaagtttcatgaatccatccgtctcttaggccttctgttatgccatttcctccggcaccattgtgtacactgaattcttaggagatactgtcaacttcgtaagggaaggtgtgtccaggaagtggacactgggcgccttaaagaggtcaagggccctcagtgcacaggggaaggtggccttgtgataggtaaggaagtggtgagatggttggctgagaagaattggaagaaaaagttggattgaggacctgtcctttttgaatgaagaaaaagaagctgaagcttggctatcttcaataccaaagacagctgtgcagcactggtagattgatgaagctgaagctacaggttgaagcactgtgaagcgcctttcaacggtgcttgggaaagagctttcttatgcctcaggttgatgtacccagctcatcaatctggtgttatggaagaagaaatgatccaggccaaggtgtccgggtggactggccagcctcagattcttttttactctgacaggttctcactggcagatatggtagttgacaaaacattttttcatgcttctcagtctgttgcttaagtctggaattccttcacggcgtgcatactgctgacaacctccttttggccttgctcctggagaccttagaataggagtcttcagctccccgcccccatcgtggggctctgtgcgagctcagagttgtgcttacagaactgattcttacccttcccctcaagtgagttgtcagaaatacacacttggtgttttcatgcaatgaacagttatgaagaaactgctctgtgcctggcactaggaaaaaacttcgaaaaatagttttaagaagtagtgttgaacagtagatgaggctttttcatgtttcttttaaatttcttttgaataagtctaaacagtagtgtgaaagatatactgacttcctgccgaatacccagatactccattaatgattgcattatcaaatgtttccccttcaatccagctcaaagtgtttgtgagaaatacatggtgaaagaatgagcagggtggagtggaaattggaccttccggagaagccccaggaagacattaccactggaattcccgtcccaggggaaaggcccctcccaacagacttgattctggttttggtctaccagtttcaaccccagcacagcttccagaagtctttgcgggaattcagagctgatttaggacgagtcacctatcgagaggacgggaagctttgctggggacgcttgtctgtccaagtaagaggaggccatgtggctgtgtgacagatgtgttttgtttctcctcgccaccctggcgagaaggtgcctggaacccatggaaggggtctgagaagagataagggcggggccatgtgggggcgggacccggcttagggggtggggttgcagggagcccacaccaggctggactgcgcgggcggggcagaggccgggggtgggcggggacatacggtgacgggcgtcggggacgcagggttggcggcggagccctgggggggcgggcccctgggggcggggtctcggttggcgcgagtgtcctgtcgccgccgcctcgggcgggtgggctgactggcggcaggctcgccgcggcgcggagtcccggctgcgggatagaccgagggccatggccgcctctcccggacccgccggcgttggcggcgccggagcagtctacggctccggctcttcgggcttcgccctcgactcgggactggagatcaaaactcgctcggtgga

SEQ ID NO: 42482 - DNA, 2300 bp, Homo sapien
tctctacttctatgagttcaactcttacattccacatgcagtatttgtctatctgtgctgtgcctggcttatttaacttaccataatgtcctccaggatcatctacgttgtcgcaaatgacaggatttccttcttttgggggggctgaatagtatttccttgtgcacacaccacattttctactaatagccactgcttattgagcatctactgtgcactaggtcagttactaggtgcttcagatgcattgtcatttagcttttcatgggttgaattgttcttcctgccagcatccactcacatgaaactgtgaggtttaacctcataccttgaggagatatgtggtgaggtaggaggcagtggcttctgggttggtgtccgtggactattagttttttcggaattgagagattaaagctaatattagttataaagttaaatagataccgtatgacccagtatctccactcctaggtatttacagacgagaaatgaaagcatatgtccacaaagacttgtacacaaatgttcatagcagcattattcataatacccccaaactggaaacacctcaaatgcccatcagctggtgaatggataagcaagttgtagtagatctacataatggaatactactcagtagtaaaaaaggaaccaactactgatatactcaacaatgttggtgaagctcaaaagcattatgctaggtgaaagaaacaccaaaagctacacgacaacgtgaatgtacttagcactattgaactgcacactcaaaatgattcagatgctaaatattgtgccatggatattttgccacaatttaatacaaagctatataatgtatggttgtgtttacgtgaaattctagaaaaggcagaattatagtgacagcatatctagtggccatcagaggccagagtttagggagggtttgacaatagaagggcatgagggaactttttggggtgatggaaatattctacatcttgattgtaatgatggttatagaatgtatatatttgtgcacattactgaattgaatgcttcaaattggtgagttttattatttgtaaatcatagtttaataaagctgatataaaaaagaagaaaaagttgctaggaatttgagggagttaaattctgttttctggtaaattgtaagaggatttttctctgctgttttatttataaaacttgtgtgccagatcacaagtaatgaggtagaggggaatatattgtcttttcatccctcactaggttacatgaatatgtttagtaactgcaaacaatatacagtgcatttaaaagttgccttgagaacattaccagcaaccaatattctcagcagtgaaagaaagaagactgctgtcttctccacgtggtccttactggattgagccttggttacttgccacccagaggggtgattgagttgcagtattctgttgcacctttgatgtcaacttatttttggcttaaattttttaaataacataaggttaaagaaaggatcacatctctatcttttcctcattgacctccctagttctagacaaattctatacttttttcctttctttttctctgtggtcgattatgtcattattccctccccctcaaaacctaccttctcccttggtctccgggaatactgcactctagtgattttcctcctactacggaaatgatttcattacctctctggctggtatttctttgtctttaggtcctttatgaaaacacaacctgttgccctattttctctccacttgcccttttaagatgtcctgtactcttttataattattctggtgcgtctcagatgtcttgttctgaattttctattaagccttgtctcttatttcagctacctctagggtattttcatcatcctttttgagttcctgttgcccatactaaacaaactgcccttttcttgcatgcctcttccattctggccttctccatgactttgagacactgctattctttccccttcaggtttaaaacctgaagctctgttgttttctttttgctctgtcctctctgtttagttgttgagcagatccttggtattttctttggggtctttcgcttccttttggtatttttgataccactttattctgggttcttgttgcagagtcatatggctcctttaagacgttctctagtgaaagccattggtccggatgacaaagcaggttttacaattggggagccactctgcccctggatccatgtcccagaacactactaaatgactaaatcactagattacagggcttcactttgctcct

SEQ ID NO: 42483 - DNA, 2300 bp, Homo sapien
aataggcaaagagtaaggaaatagatgttgtaaactaacgtgggaaaatggtcactcctttcattaataaagaagaaaataataaataatggctacatttcacacctgttaaattccctaaaaattttccagttagttcataaggctttgaggaaattgggtcatttatgtaattttagaaagcattaattggtatatttcttattatagaagtcagtttaccaatgcatagcaagagccattaaaatgctcattttcggctgggtgtggtggctcatgcctgtaatcccagcactttgggaggccgagtcaggaggatcacttgagcccagaccagcttgggcaacatagtgagaccttgtctctacaaaaaataagaaaattagctctgtctggtgtcagtgcgcctgtgatcccagctacttggctgtcttaggtggcaggatcgcttgagtctgggaggtccaggcttcagtgagccatgatcatgccactgcactccggcctgggtgacagagtgagaccctgtctcaaaaaaaacaaaacaaaaactcattttatttggttgcagtacatttatttatgtcacaagtaaccctgcaatgaacatccatatatatccttaaaaactatgtaaaaggatgttcattgcagtgttactcatgacactaaaaattaggattcatgggtgggcgtggtggctcatgcctgtaatcccagcacttgtggaggctgaggtgggcagatcacttgaggttaggagttcaagaccagcctggccaacatggtgaaaccccatctctactaaaaatacaaaaattaactgggtgtgggggcgcacacctgtaatcccagctactcaggaggctgagacaggagaattgctcgaacctgggaggcagaggttgcaatgagagtcgagatcgcgccactgcacttcagcctgggtgacagagcaagactctatctcaaaaaaaaagaaggatttattgtatatccttagagtgggtaatgatcagctaataccagaacgtaatgaattaatataaaagtattaaagatgaaggttagtgatgaaggctaaagattgaatgtttataatgaagtagaaaaaattctaaattgtctctatgtaaataggcagaaagttgcagaggaaatagaaaaatggaaacaattgtattaaggaagtgggcctacaaacttctagaaattctttgggtttttgtttttttttctgagaccaggtcttactctgttactcaggctggagcatgttggcgtgatcacggctcactgcagcctcaacctcctggactcaggtgatcctctcatctcagtctcctgagtagctgggactgcaggcatgcgccaccacacttggtaatttttttgtatttttgtaaagatggggtttcgccatgttgctcaggctgatctcaaactcctgggttcaagcgatctgcccacctcagcctctgaaagtgtgaaaattgttttttatattataatatggttttaataataactaagtgggacaacattttataatgatagccttcctctaagttacgttgtctcagtgtacttgatttccacaaacccggggccagtctgatcaattgtaaatgagaccggacatctctcagcatgcaaatagaggaaggattcgtgtttatagccaacatcctaaaattttacttaaaattctgtggtaattcttaataatagagataaatgtaacatgagacatatgtataatggaaggtcactgggattacaggggaaagatttttctctggacaggtaagatcagataagtcagcaatcatggcttcatttgcaccattctctgatagcgtgaggtagctctcttagagacctaagaatagagcaaagaaaatagaagcaaaaacatgagaaaggaaatttactgggaatactcaggagtagatttaaggaaagaacgtaatatggctagagataaatagtctggaacatttttgtttgctttggaacaaatgtaaatacccagcatatattaattttactctgttgttgcctgaaatattgtaccacgtcgtatctgtgtttttttctagctccataaaattctaggagataaggtgaacaatactgctgtaattgaaaagcaagtactagaactttgggacagactgtatcactcttggtttgtaaaggtaagttattttagctaaagtttcctgttgtaaactaataaagtccttttattgactcatcaactagataggattatattcacagtgggatttcattca

SEQ ID NO: 42484 - DNA, 2300 bp, Homo sapien
catcacttctttttatttttcctcactcaattggatagttaattaaataggcattattttttaacatttattatgaccagagcatggtatagtagtgcctgtcctcagggagcatgcaatataaatggttgaagtttgtatctgtattttttttttttttgagacaaggtctcactttgtcacccattcaccacagcctcgatctctcaggctcaagtgatcctcctgcctcagcccctcagatagctgagactacaggtgcgtccactggctattgttttgtattttttgtagtttgccatgttgcccaggctggtctcaaactcctggactcaagcaaacctcacaccttggcttcccaaagtgctgggactatacaggtgtgagtcaccgtccccggcctatatgtggttcttctgtcctcaaacagaacttctgttaggcagttggaacaagatacagctttaattaagcaagtcacagagcagataccatgccatgcttcctgttaaactgagtggaacagtttaaattgctcttctagattgttccatacttttttttttttttttttttttgagatgtagtctcgctctgttgcccaggctggagtgcagtggcgggatctcggctcattgcaagcttcacttcctgggttcacactttctcctgcctcagcctcctgagtagctgggactacaggtgcctgccacaacgcctggctaattttttgtatttttagtagagacggggtttcactgttagccaggatggtctcgatctcctgatctcgtgatccgcccgcctcggcctgggattacaggcgttgagccactgtgcccggccctgttccatacttttttttttccagatgattttattatgctggcaaactgtgtgtcaaatgctgttgcaactctcttttccttaaagtttgttagcaggaatttcatttctcttagttatagcttaaccttctagtcatcataggaatttgacatgatcttgggacagcaggctgtgaataaggtggcccctaaaagcttttctacagcttgtaattaccctggacttactgaaactataggagttcttttagggcttttgtagggatttaaaaatggtaataaaggaattgttgaacttgtgtgtaacactgagctcatggttcaaaacagcaaattgtgaacctttaggttgcaaggccagagctaagaacacaaatctctagagttagggaaattatgtactgattgagatacagggtccaaacttgaaggcaagcctcacagttgagtaacacttctttctggccctaccaccttcttaattggcttctaacaggaagcttaacctctgcttaaagagccacttcactgcccaactccaggaggagacagtgtggtttgagagtggtccccactgaagttgccgtgcacagccttgggccatttgtagcagccctgctagtattcagcttgcttctctactgaaccctggcatctgttcagatgttgagagcagcatcaaatggggaaataggaacaacattactctgcagtggtacaaaatcatgatgcgtatggaataccttatacttttctggtcactaaataacgagcaactaaggaaaagaagaatatttgacaagaacagctataaaagccaaggagatgaggaaatgtcaggggtttgtattatttacccaggaagggggaatatgcaaggggccagaattgtagtcactgaaatcttcacgatgagattatcttttgtttatgtgggctgtaaaataatccctgactctacaaggattcagacttcaggaagaagataatatataggcaggtggggatggtttgaaaagttacttggtccaattccatctgtgtggggagtactttgagtcccaccctgctttttaacattgatcttctttttaatactagctttgttgttttagaaaggttttgtgaaattaaggtaccttttcatgttacaacttgttaatctatattttgtttatatatgtattttttgtctttttttagtctggatactcaaaaagcttgtcattcactttggagttgtggatttcctagagaaacgctaccatgtgtggtggggcattatagaaagcttcctgaaggagcggcagggagctctcgcgccttggcccattgtcgggcttggaaaattcttgttaaaagttgatagcaaggtattgtattttaaggacttgggctgtcttaatggagttaatatatttcgtggtttgaacttttccattctatggtgtt

SEQ ID NO: 42485 - DNA, 2300 bp, Homo sapien
tacttagccctttaaaaaggcaaatgtaggccaggtgcggtggctcacgcctgtaatcccagcactttgggaggctgaggtgggtggatcacctgaggtcaggagttcgagaccagcctgttcaacatggtgaaacctcgtaaaaaaaaaaaaattagccgggcatggtggggggtacgtgtaattccagctatttgggaggctgaggcaggaaaatctcttgaagccaggaaatggaggttgcagtgagccgagatcgcaccattgcactctggcctgggtgacaagagcgagactccgtctcataaataaataaataatttaataaaggtaaatatagccttttacgttgtcttcaccagacagtccctacagggcaagttcatctaactatgtgcttaggagctccagaaaggaactcaagagataacatccaatttctacaaaactccctcccaccgggagactgccttgagaaatatgaaactctcttccatctgaggggtttttggcttagtcctgccaacgaaggtgccagcagtcaccagcttgaccacccagtagataaggcatgcagacccctcccccgacaactgcttgcttccttcgctttaaaagtgcctgctttctgctccacaattgaagcagtagccttagggaggaaacctgtacttcttcccctaagctagctttggaatacatcactttctttataccagaccttgctcttgttaattggaatctgcaagtggtgagcgactaaacctgcgttttggttataaaactccaaaggccatctgaaatactgagacctaaaacttacaatcgagatggatagggaattactttttcctttacttcctttactaaatccctttgtctccaaatctatcaagcaatagtttctttatctgcaaactgtggattatgttacctgtcttgtctgctttagaagggaaacaaaaattatgtagaaattaataggaatactattgaaacaggaaagggacaacttgcaaggtttgaagcaatcacatgttgagtactcagtcaaggctttctttttttttttaaatcaaaatgttgattgggatattttatgggtagcaggcttggatcccagcacttttccaataggggaacagaagcaccttgtaccgccccagagtttcccttcccccacacaataaccctaaagcaaaagctattattattatcatcgccatgtgacagaggaaaacttgagattgggggcttaactgacattacatcaagtctcaaaaagaaacagtggcagtttgagactttgatctacgactcttttaagagtttagattgcgtccacagcgaaacctgcacaaacagttgtcaacagcggctgcaaattacaggcttatgaggaacgtttgaaaaatgccaagagttctttcctcaggccaaatactatggtagataaaagtatagcctttggagccagaatccctgagtttgaatcttgcctgtgccacttggtagctgtgtgactctggctgcgtacttaacggctctgtctcagtttttctgttggtaaaatgaggataataacaccttctttgtagggttgttctaaggattaaatgagttaataggagtgagccacttagaatagggcctgttatatggtaatctctatttaaaatcctgtcagatacaccaaagaaaacactttaaaaatatctgttaaataaatcagtaaaacagaatcggggcattggttctttaaaagtactcccccacggtattctagtatgcagcttgggttttaatatctgaatgtggcgccttttgggatctcgcctcgcgagaaattgacattaacgaatgagtgaaaggagcttccccccccccccccctccaggaagatatagaccctgcaaacttgttagcaggaccttgcggacaccaaggaggcggaggcgttttccccatttccccttcgggagttgtagtttcctgcaagcgcttggtgggtctgtaaaccagcggggaactacaactcccacaatctcgcgcgcctcccgccctgcctcccgcccgcgtttctagcccgactcccattaccgcccctcgggggcggctgtggcggaggaacgatggccgacggcggcggccctaaggacgcgccaagcctgcggagctctcccgggccggcgccgcgggtcccgcgcgcggtcgggccgagtggcggtggcggggagaccccgcggaccgcggcgctggcgctgcgcttcgacaagcccattaagcaggccttctacaac

SEQ ID NO: 42486 - DNA, 2300 bp, Homo sapien
gtttaataatgaccctatacttttggaacatacttacaccttttctaagcactttcacatatgttttcttatttaacttcacaacatctctgagttggattgatgaaaattgtgattgccatcttcctgaatgggatttgagacccaaaaagactgcctttttatgatccacataccatataactttggctagaaatgacaaatagaaaggcagagaaggaactaagtatagaaatcatgtctcaaaacagtctttactatgagtgctatagcacagagagttattttgaatattactagggagaactttactgaatgtcataagttcacagtcagccttttgggcagaagaaatttcaaatttccgtaaagcagaagtgcttttggatatttacacagccaatggggagattggaggaaaatacaatgatatgaaaatagttcatatttatttgaaattttggccgagcatggtggctcacgcctgtgatcccagcactttaggaggccaagacgggcaggtcacctgaggtcaggagttcgagaccagcctggccaatgtggtgaaacccccgtctctattaaaaagtacaaaaatgagccaggcgtggtggtgcacacctataatcccagctattcgggaggctgaggcaggagaattgctggaacccaggaggcggaggttgcagtgagccgagattgtgccagtgcactccagcctaggtgacagagccagactctgtctcaaaaataactaactaaataaataatatttatttgaaatttcttctcagttagagagcagctatgggaaaacatttttactgctatttgcaaaggttggagaccaaactgtgagcattcctgaagatgtaaagttgtgttaatgatattaaaaaaaaaaaaaaagggaattcttagcagttagaatttgaacttttctaccactgaattttataaaactaaggtattcatctgtggttacagtgaattctcttgtcagagccagcataccttaagtgtgattaaaaatgtatttttttttttttttgcgatgaattttccctcttgtcgcccaggctggagtacaatggtgtgatctcagcttcactgcaacctccgcctcccaggttcaagtgattctcctgcctcagcctcctgagtagatgggattacaggcatgtgccactatgcctggctaatttttttgtatttttagtagagatggagtttcaccattttagtcaggctggtctcgaactcctgacctcaggtgatccacctgctttggcctcccagagtgctaggattacaggtgtgagccaccgtgcctggcctaaaaatgtgttatatcagacaaaacatcttagtaaaaatttagggcattttaataataagccaacagtttttgagactgtagagattttgagtagaattttttttatgaggtggctttttaaaaaataattgaaaatgggaaaatgacccataaagtgaattcacctagaatatccatttaaatgttcagacttgtggctgagcgcggtggctcacacctgtaatcccagcactttgggaggccaaggcaggcggatcacctgaggtcaggagttcgagaccagtctggccaacatggcaaaaccttgtctccactaaaaatacaaaaattagccgggtgtggtggcacatgcctgtaatcccagccacttgggaggctgaggcacgagaatcacttgaaccttggaggcagagcttgcagtgagccaaaattgtgccacttgcactccagcctgggtgacagagggagaccctgtctcaaaaaaataagtaaaataaaatgttcagacttataaactagacaggtagtcagcataattcatagtaatgccttgacattaggcgccccaaaggactcctttgttctttgttccaaatgtctgtgctaactgcccattttgaggagagaagtctgcaggtatagttagtgctgctgagacatttccactctggcattctagagttctctggcttgcccttgttgctttaaagctggttccaacttcgtgggctttatgattgagcaacactggtgattgtgatttctaataccaccctccagattcatgtcacaggtgaaagtctgcctgtggggagagctttcacattctcctggagttgaaccaaaataaggaaaacatcaacaaacacagttaccaaaagcttccaaggagggatggaggagaaattctgttcattgcagatggggagaaattaaatgacatcaagtgcataatggaact

SEQ ID NO: 42487 - DNA, 2300 bp, Homo sapien
caaaaccctcaaatccagaggcaggatgctggctaatttgctgtctcaagaaaatgatcaccccctaacatggtcatttttaaaaacttaagttatgctagtgttcagaattctttgagggtcccactgtctaagcctatactactcatgcttacagtctcagctcaaatgtcacctctttcaggaagccttccctgattttctccttctcccacagaagatattcttccacagcacacagtctgccgtgaccctctttgctgtctatggtcaggagttcagataggatcttagtgcttgaatcctaccactcatacttctttcccttgaggttcttaacccagagtctatatattcagagcaatgatagaatgtgaaacagattaccatttgattatgggcaaatgctcacttctgagggttctttggggaaaaacaaacaaaactgagttggatgttggctaagggttaagtcccaaatgaagcttgcttctccctgctgctaagatggccaggtttgggaagcagaccctcagtcttaatccagccagctacatggatgatgttaaccgcctgacccttggagccataccctgcctaagaaggaaaagacagaacatcatttatggtcacttatctttaaggcatagtcatctgactactcgtaaaatgtggctcaatcaaggattttctgaccattgagttctgatcacaatttttcttgggaaagagccagagaggtagaaagaaggacagaacatggggcaaagggcagaagtttagtcatcttcctatatccttcccccatctaccttggacggtatgtggatatataacttaccactctactaatctggaagtcctttaagggtaacaatttacatctaatttatctttgtatccttcatgaatctagcctgatcataataccaattagagcaactcttagtatgtgcttactacgcagcaggccccgctttagggtaccttgtccatatgaatgttaatccttatagcaacactgtgagttaaatactactattattgctactgtagagataaagaaactgacccacagaaagtttgactattttagctaaagtcacacagctagaaagtagcagagaactgtgtggatttgttgatggacttaatggataaagtggtagaaggtgtcctgcccatctggaatggagggtccctgttgacttgcactaggaaatggattggacaggtagaattgctttttcgtttttgtttttgagacagaatctcgctctgtcatccaggctggagtgcagtagtgcgatctcagctcactgcaacctccacctcctaggttcaaatgatgctcatgcctcagcctcccaagtagctgggattacaggcatgagccaccacacctggctaatttttgtatttttagtagagacagggtttcaccctgttgaccgggctgatcttgaactcctgacctcaagagatctgcctgccttggccccccaaagtgctggaattacatgcgtgagccaccatgtctggcctagagttgggtatttttgtgagtgaacttgagaggaagagtttggaactgatatggtagacagttagggactacagtttcctaagcagtggagtgccaccatgaaggctgagtttgcttctgtgtggaactttacaccttataaaacccctcgatacttttacttcataatacgaccctgaaaagagaaggaacaaaaattgaggccgtcgggaaagagactgatgcagtagttctcagatgaaactgaatggtgtggccagacaattaaaacttaaacttcaaggaatcaagtactaaattaatagctaaaggctgtgagccaagccattaattagaagcaataaatagcaaaccagaagccattaaccacccagtagagtgtggtaaaagggattgcaaaaaaggaacagatagtttcttgaattagacaagaatggaaaccacaaagcccaattgagaacctaaaaaatcaaccaagaaaataagcacctttcatggttcagcaataaatgaagggattataaaataatagagaggaaaggagggagagaaaaaaatggctcgaattgttctccaaaacagaatttactgaaagagcttatagagtccatgtcagcagaaggaaagaaaaggaaggagaagaattgatacacccttttttaaaaaacccccaagccaatattaatgtagtctcattcaggttcttattttagagggaaaaaaatagcatcaaaatggaaaatggagagaaagg

SEQ ID NO: 42488 - DNA, 2300 bp, Homo sapien
tgcagtggcctgatctcgactcactgcaagctccgcctcccaggttcacgccattctcctgccttagcttcccgagtagctgggacttcaggcgcccgacaccatgcccggctaattttttgtattttcagtagagacgggatttcaccgtgttggccaggatggtgtcgatcttctgaccttgtgatccgcccgcctcggcctcccaaagtgctggagttacaggcgtgagccaccgtgcccggctgcccacgtgtttttatatcagattaatttactcggagaagaatggcctggttttcatttgccttctatttgggcaccgttattgttaatttcagtaaccaaaatgaagggaataaaaaggaaagtaagaggtaaaagcttgtattcccaaaccagagaatctacactgaaatcaaaagtctaatgctttatttttttggctaaactttggtccattctaagttgaccataccttccctggtgaacagaaagagaagaaaagaaaataaagaaattttaatttttaagaaaggtttaaggtttttgtttttgtttttgtttttttttttttttttgaaggactacactttaacagattttcaatctgttggatcagcttttttagaatgttatgcattgccacgctatgctttttgggaagaagtctcttgagtttttaaagtaatcatagttcatcttacctttttcaaataatctgatctattttttgtgacaactgctatgttgggggacctagtgaagcccaaggttttcatgaattacacctcaattcagccatcaggattaatatgtttaaattccagttggacagcccactgttagctgatacctaatagaaaatacctgacttctaagtcccccatcatgtctcccctgtttcaacagcactacccttatctctcagccaatcaggccataaagggttaagatcactagtttccttttgaatattaacatttcacaatattgtgtacatgtgtgcatgccacttacagcactgaaccctattgatccttacctctatgatcttccctaatcttcattgcatcatgtcaatgactaatcatgagagatcaggcagtctgacttctaggtctgcatttgggacctctatgcttttctgcctccataattattttgtttatgcaataaaataaaataataaaataggaaaagcaggttaaaatgctggctctgcaacaccagcctgaaaggaattgcgtccgcctctctgatggaaaacagcttagcaattcgaatatatcaccccaacaaccatcatcaaaagagaaccctgggacctgccataaagcaaatgcttggtgtgaatcaatggatggctgagtaaatagccaaaagtgaactgcaagcagcaggaatggatttgagaaaaatcaacaattcagcatggccctcagatacggtgtgggccttccaaggcctgcgcgtgcttgctgcagggaaagagagtaaaccagaagcctagttttgaaggggaacaggttacctactggcaccagcctctgttgattacacaccgcaagagcctggagaggaagcaggtgaatccagttttctctgtctctaaacacctcagtttacctagctctattgtgggggtcttgcaatttcaagttccttctgtgatgatccaagaaataataggtctagcaagtgctttatgtaaaccaaaaagtgccggcacaaggttgaggaggcagcactgaccaggtgtgtccagggtaaactctctagaggagcgtttcataaattgaacgtgcattgggatctcctgggaattttgatgaaatgaacatcccgcttcatgggtctggagtggggcctcagcgatgctaacaagcttccaggtgatgctgatgctgccggtccgcggaccacactccggagtagcaaggggccagaagggccaaatctgcctgcgtggagggaagtcggggagatggggagaatggaaagaaggacggtagaagggaagctgctaggaaggagagatcggtgcggggaggaggggggttccaagaagaagggggaggctgcggtgctggagcgaggatgcgcagaccgaggcagggaggcgggggtgcgggaggctccgcggctgcgcgggcgcgtgctggtggcctcggcggaggctcagtcccggcccgcgcccgcggcgcccccgctgcggcccgagcggcctggctgcgggatctgtgcgcacggatggcgcggccgccccggcagcacccgggggtctgggcgtcgctgct

SEQ ID NO: 42489 - DNA, 2300 bp, Homo sapien
tctggactccatgagattgtctcccgtatcccgttccgcttctgaggtcacctcggtggaataagggagcgaacactgtaagccccaagttgacaagcttccctggcaggtctttcctcactaagtaggaattaatgttttgatttcacttttcactgtgaatgagctgaagttggttgctgctggtggctttttgtgagagcaactacgggatctatagtattcacatcagctctgcccactctttttgaagtttttattatggaattttctaagcatattccagagtagcgagaactatatatggaccctaagtagtcatcttcatttccgtacttatcagtttgtggccactctccttttatacccctccctactgccctttcctgattattttaaacaaattctaaacatgtaattttttttttttaaaagacggaatctcgcttcgtcacctaggctggagtgcagtgcgtgatcttggttccctgcaacctctggctccaggattcaagtgattctcctgcctcagcttcctgaatagctgggattacaggcatgcgccaccacgcgctaattttttgtatttttagtagagacagggtttcaccatgttggccaggctggtcttgatatcctgacttcaagcgatccgcctgcctcagcctcccaaagtgctgagattacaggcatgagtctccgtgcctggcctaaacatttaatttcaaacatgtatttcagtaggtatctctaaaagataaggaccagttttaaaaaaatagagttgattgtgatagcacacacctgtaatcccagcgacttgggaggctgagatgggaggatcacttgagtccaggaatccgaggccagcctgggcaacatcacaagacttcatcaagacttctaaaaataatgaacaattattttttagtgtcagatattcggccaatgttcaaattttcttctgtggttttcagcaaggttctttcattgcatttgatagatattctatctaagactcttaacctaaaaaccttctcttcacctttttgagccatttatctgttggagaagtgaggccgtttgtcctattacagtttgttactttccgagttttgttgattgcatcctcaacattggtcacccctgaggtacagttagtaccgggaatggtcttatttcaagcatctgatcagagcacacagagatcagtaagatccttatcctcaagaaggctgagtggagatcagctgttgaatgtcttcctcgagtgtgggttcttcctccctctagctcactcctgcttgggtccccttcacatactcgggaggccctccatgaacccattctgtctctcctggctggagatgccagcagacattttagggaatgcagaatcaatgagaagggaattgggccgagtgtgggacagcttgaaccagtggggttcgcctctgagggaaccgttggagaacacctggtccaaaatctcattctggaggcggcgaaaggcctttcccatctgccttggaaggctgctcactccagtctgctgctgctcaccgtggcaaatgagcagtaacaagggtgtaacaagtgtagcttcctgcacgtagccccccagcgcttatgagcgacatccagcgagcctctttgcccctctgagactctgccatctcttctgaaagcgaccagggttctcaaccctggcacatgagagctggggctttctccagctctcctgcccatgtgatggatgtgggcatcatccagggaaggccggtagactgtaaaagcctaccggggttagttattaacctgcagcgcactcttgacagcccattccatggcatttcaccgactggagtccttttattgctcttgcctgctggggcctgagacccaaggcccatatcacctctgctcagtcggttacaatctgtattgagtggcatcagcactgctttgatggtagcaagaatggctggttaaagtccagggaggggcccaagctggcttggaactggcccaggtcatgcacacagccagcagtgacacatccaatgggacactccaggatgaaacctgagaaaggaggtctgggatatgggatattgtaatgggagagcaggaaatttaaggtcggaggtatttgtttaggatacctcagtattctagagctatgggatttattttgctttgaagtccagaggtatttagctttattctaaaagcgatgaagttcctcttaattaaagacgctcctggaaaaaaaaaaaggaaaaatttaatgctgtctt

SEQ ID NO: 42490 - DNA, 2300 bp, Homo sapien
tgagccaccacacccagccatattattaatagtgcactcatattagtttcctgttgctgctggaataagttaccacaaacttagtggtttagaacaacacaaatgtattatttcacaattctggaggtttcatgggctaaaatcaaggctgcattccttctggaatctctaggggtcaatttgttccttatcttttctagcttctttcagctacccaggttccttatatcctggttccattatgctgacttctgctgccattgttgtgacaccttctctgactctgaccctcccgcttccctcttataaggacccttgcgattacgttggattaatacaagataatcgccctacttcaaactccttaacttaatcacatctgcaaagtctttttggccacataaagggacatattcacggattctagcaattggtctgcggacatctttgggtggctattagtcagtgtgccacagcactcctgggctatatagtaggaaatggactatccttagaaaccagtaagcagaattggactacctttgaacatctgcttgtggctgtgttctattaaatacagtctggggtggagcggtgggagaggagtagattgggtacctgaaggccgattacagatgccctctcagagaacactgtcacatgggagacctccatagtatcataaaaagaacattagacaatgagtgagggtactggctgctgccactcaggagctctgagacctcggacaaggatattacttctcttaagacccgaactgcagtcctatgtgacttgggggttacatagaatacctggaaagattggagtgtggactaatgaaaattccatccatgaaatcacctcagacagcgcctgatccttaataaatgtctgttttagaatgcctcataaatgcactccttcctctttgtcttttttgctgtgtccactgcgttttccaggcctctcagacatcttcacctgcctgccagtcatgcacacacctctgcctggcagcagaggtagtggttagcagccaacagctttggagctgggtgaaagagctggtcttaaccatggaatctggagcccgtctcttaagctctctaagcttcagtttcctcctctgtacaatggggataagaacgtctatctaaccaggctgttgtggggattgagatgatgaatggaaagggcttagcacggtgtttggcacaagattaagggaatgataaatagtagtgttattcttcccaagaggcctgacctcctttcagcttcatcctcttccacattcctcatttagcagcactggtcaaccctcttcactcgaagcggaccttgaacttgtatactggagggccactgcttagaaacaattccgtctctctccaatattctcagtgtgtcctacactattcattctcagagcctcagatctactctgcttctcagtaattttcaacttcactagccttctctgttatttatccaggcctttatctcaatactggacctgagatcttgaggaaaggtgttttcttgcgtagcatattggaaaaatacttcctctcctcgccgggcctcaagttccttatgtggaatgagtccactggactggaatgactaaaaaagtccttccagctctgagatcttaaattgacagaacttaagtagcaaggaccttgtagattaccgtgttgattacctagtccacccctctccttttccagaagaggaaacagtgctattttttcatgggggaaaacgtagtgctattctgcctggtctccggggcaacgcttcccagagggcacgcggccttgttttcctatcggtgcaaaggggcactcggcgcctccagggctctgggcgccggaaacacgtgtgtgctcacctacgtgtacacacgtgagcacacctacagcagcagggggcgctcgggccggcagggggcagcacagacccggcttgcaattacccggcgcagccccgagggaggagggcgtgctgcagtcccggcggcagcggcggcggcggcggcggcggcggctggaggtgcagcctcccaggtgggaggcgggggctgcgggcgcaggaaaaggcgccttgggagcgggcgctcggcggggcctcctcgggccccgggcgcggcgcggcgagtgggagcgagcgcgccaggaccacgcaggcgccctgctccggctggccctcggccggcgcgcggcgcgggagcagcccgcagcccgcctcccgcgcccccggcagccccctggcagcccgcagccgcccgtccg

SEQ ID NO: 42491 - DNA, 2300 bp, Homo sapien
ttccccaccacccaggcggacacctgcattcctaagctgaacgaaggggatcaaatcgtgttaatcaatggccgggacatctcagaacacacgcatgaccaagtggtgatgttcatcaaagccagccgggagtcccactcacgggagctggccctggtgatcaggaggagaggtaatggccacctggggggaggagccatagggaagctgtcctagccaagctgcgcctgctccagccctttatctgctcttgaaaatgttgagtttgtagccaacatttgaaaatcaagaatcttcaggtaataaccgaatgtttggcttctcacttgaaaaatgtgaagatctgcccccaggaggcctgtccccatgtggccagtcttctggggggagacagcgcccctgcagcccctttatacaggacatgagcccccagctcccagttcctcccaggcccagcgcagcccacatcacgcactctctaagtggcatgactctgcagacatttgcattttcagccccttcttaaaggatctggtgatattttattcgtgcgtgtttgattttgtcggggaggcagtgaggagagcagggtctgactgtctcgggtgattcctcactctgcctctgcgggctgggggaccttgcaggggttacataaccagtctgtggttcagctggctcaggtgtggaggaggacagcagtggtcccgacttcacagggttgctgtgaagattaaatggcacttggggccaggcacagtggctcacacctgtaatcccagcactttggaaggccaaggtgggtgtatcacttgaggtcaggagttcaagaccagcttgaccaacatggtaaaacctcatctctgctaaaaatacaatagccaggcatggtgccatgtgggtatagtcccagctactcaggaggctgaggcaggagaatcgcttgaacccaggaagtggatgttgcagtgagctaagactgtgccactacactccagcctgggtgacagagtgagactccatctcaatcattcaatcaatcaatggcacttagactggaaagtacctgcattgctgcctgatgggagcagaggtttgaaggacagcctctactgagcatcacactgttgtctttatagttgttgttataaaataatacgtcaagttccttgaacaccgtgcacagctgtaaaatactgaaagtaaatgaaggttgtgtctgcaaagccctgcgtctctgcctgcctcacacgtttggctgacactccatactgctgtgctcctgcctcggctctgctcccactgcaactctcagtccagagccaccaggaccagctctgaccccacctcctccgtgaggccttaccagatctctccggttccccacctgtgcaaggttgggagttgtgggggggtggtcctagctttgctttcacctgtattgaatttaacatgaagggaaaacgtgcactaaagaggtaaggctgaagcacagaagagatgctaggactacgatatttacgtgggagcctcccacatagaaacggccctgagttagggattgagctctcaggaatgatggtgtcacaggaaaagcttgggacctcaccctcatgcctgaggaaatgcccattttagggaagtaaatgaaaaaacctgagaaagaaaggggagtcgggatgggtagaagaataacccggtcagaaagagcaagcagaaacaatatgcttttttaaataacattctttctcttttctttacctttgacaaaagcctctgagtgttaaacaccattatttaaaactaaccaggaagattagtatgtcattttatgtaattaacacatattgaatcattcacctagaagtagtatctttggtgaaaatgattaccatgtagcttaatcatttaataagatgttttgaaccatctgcattcaggtgtcataggtgtgatttgtttgagggagacggataaacctgagtattgctacacaagtcagatgcactgtcttgtacgttacagctgtccgctcatttgctgacttcaagtctgaagatgaactgaaccagcttttccccgaagccattttccccatgtgtccggagggtggggacactttggagggatccatggcacagctaaagaagggcctcgaaagcgggacggtgctgatccagtttgaggtaagaccctctggaggctgaatcccactgccatgtcgcctattgggctgcccctgcctctgagcagtggaggaaatgaggcagagacacaagcccttgtttccttggtcgaga

SEQ ID NO: 42492 - DNA, 2300 bp, Homo sapien
tatgtttagtagagatgaaatttcaccatgttggccaggctggtctcgaactcctgatctcaggtgatccgtctgcttcagcctcccaaagtgctgggattagaggtgcatgccaccatgcctggctagttttgtatgtttggtacagatgaggtttcatcatgttggccagctgatctcgaactcctgacctcaggtgacccgcccgcttcggcctcccaaagtgctgggattacaggcgtgaaccaccgtgcccggctgcttcatgtattctttgtagaagcctagatcctcccacctacgtgatatagtcatgtcctcagttgcacacctttccagtctttttgcctacctctccaccattgaaatcaccggttaaaccagtttccttactgttccctaatatcatggtcagattttgaatgccctctaattctctcttcataaatattatactctctttttcaaaaaagtaaacttgttattaaaacatacatatggaaaagtacacaaatcataaatgtagagcttggtaaattgtcacaaagtgagtacaccagtgtcattagcacccacatcacgaaatagaatgttaaaagcatctcagaaaatgcatctcccccttcccctcactacacacaaaggtaaccattatcctttcttctatcagcattgattagttttgcctgtttgtaaactttacataaatggaatcatgcagcagataatctgttgtgtctcatatcttttgctcaatgttaaagcaattgattcacgttttgcatgtaatggtagttcatttctttcttttgctgtatagtagtatatggtatgactgtaccacagtttatccgttccacatttgataaatggggtcttttccagcttaggattattatgaatattcttttttgttgttgttataaattatgattttattagatacatattttggtccaaatctttgaattgtcgtgactttaaaaaaaattttttttagcttacaagttctgagtacatgtgcaggtttgttatataggtaaattgagtgtcttggagatttggtgtacagattattttgtcaaatgcgtcataagcatagtacccgaaaggtagttttgcaatcctcaccctcctcccacacttcaccctcacgtaggccctggtagctattgctcccttctttgtgtccatatgttctcaaagtttagctcccacaagatgctggtacatgtcttttagtgagtgaatatacatttttctgctgggaatgtgcccatgactgaaattgttctatcacaataaatgcatatgttgagctttagtagatactattcagcagttttccatcgtacagtggttgcactgagttatgctttcaccagcagcatgtgagagttctggttgctccacaccctccgtggttttgccagtcttgaatcataggggttctctggtgggtgtgtggtactattgctttgtgggtttaatttgcatttctttgacagctaatatggttgagtacctgtttttgttttcttcctgttttctaaggagttttctgttacttcctctcactaggttagcaggagcactccatatattcttggcagatgtatatattgcgactatctcctcccactctatcggttgcctttttgctgccctaaatggtgtctctcaatgaatagaggtccttaattttaatatcagtttatcaatgagtcttttcacatttgaaatcatatttataccatgtttagttctgtaaaaccttagaggtagaacacaaatacataaaattgtgaaacataaataaaaatttaaaagcctgggaaatataaattagaagactcagaccagggagttaataagacatgcaaataagccacgtaattctgtgaacgtacaatttagcaatacatattgcttagagcatcttagaagtcaaaactcaattggaaacatgatctgctatgtagttctcattatctgtgagtccgtcagacagtatcgagaggatgggatctgacaggtatctgcactcacaagtaactgacaattcgcatattaaagcactaacaggtatattttatgttacaggttattcagcgatagttatgacctcccggttacgtgcgttgggtggaagaattaataatatacgcacctcggagttacccaaagagaaaactcgatcagaagtcatttgcagcatccactttttagatggcgtggtacagacctttaaagttactgtaagttctctactttttttttttacttttcctgaattaatg

SEQ ID NO: 42493 - DNA, 2300 bp, Homo sapien
ctagctcaaagttgagggcatcgtttaagctaacagctgttagctgtgggaaaagaaaaggtaatttcagtctaggggtcagcagattaagacaacttcgaaaattcacacatcctccgttgacctcggtttcctcatctcagcagttggcaaactggcatgaggatgacggctgattttggtaggcactcaagaaatggatctttaaggtggtctaaacacgttcacgttccttatttcactcaacttccactcgggtgcccagatcgaagcgtaggtattcacaatggttgaagcacagagaggataaggcagtggggaaaggacagagaatgcctcctgctgagcccgggggcgctgggtggagctctgcggggggcgtcgcctgcccctccagggggctcctccttccgggggctccggccccgcccggctccgagcatgcccagtgcgctccccgcccgtccgagtggtgctgagcgggcgccgcggctccaggttttgctggcgactcgaggccgggccgggccgggcggggcgcgggcggtcctgcccctggactccgggctccgtcggaaatccccccgacgcgatgcacgggcggcacccgctgcagcggcgctatcccgggacgtgcgactccgggacaaggaccgaaatgaggttccaggggctgccgaggcctcagtctatccctggaacgactgcccccaggacctggcacccaggcccgactggagggttccaaccatctctgcatcccttcgttcacatattcaacaaataatgtttgagcgcctagtgtgtgccagacagtgttgcaggggggtcactgcagtaaagacaagcagagctacagccccaaagctgacatttaggagggaaatacaacatgagaattaaacaaatcggaggaaaagccaaagtgaccaacctcatctgctcctctgcctccttgccgttccctaagcggtccggcgctcttttgggtcttggcactggctgttccctcggccaggaatgctcttccctgcttatctgcgtggctgaaataccactatcaccttctcagtgtcacccaatcagaccgtccatcagctcaagggccctatccgaccgcttcactgaaaattcactgcttacctccagccccaaatctcctgaccctgctctttttcctcttagaacttatcactttctaatataatgcatagtttgctaatttgctgtttatctgttacctgtccctctttccccaaactccactgggggacagaatttttgtctatttgttccccacgcgagaaaaaccagaataggtgctcaataaatatttgctgaaaatggataaatcactgttaaatgctatgaagaaaacagagtacacggagtggtcaggagcagagggctaatcgaggaaggtggtcaggaaaggcctctctgaggaggggacctatgtacaatgagaaggcgccggccacgtgaaaagctgggcaagaacgtcccacagagggaaaggcgggcgccaatgtcctgaggttagtgaagttcgagtgtttgatggacagaaaggcgctctaggatccgcaggaaggcaggtgtgagatgagacggaggtgggaagcaggagcacagatcaggtaggggtcccacgagccttggggaggtttaaccagggaagcttactagtgccaagggacgagcactggactggaagtcagcgggacctcagctcaaccgcgcacccgtcgtgcaagactcctcatttcaaagtttctttgggcgccgacttcttgccttccctaggcatgaaatcactgagggcctggcacacagtaggtgcccagtcatggctgtggaacgaatggctgcatgcatgcgcgagggaactcaggacctgcccggagctcggcggagagccccggtgcccctaggagatgcgtcggggcgcgccagcccggggcgggggcgggagaacaccgcaggccagcccggacgcccgccccccgcccggcgcgcgggcccgtcgcggccagcccggccggcgggaaccgcccgcgggcggcactgggcatgctcagacggcggccaggtcgcgccgcgagcgagcttccgcgccgcccgcacgcgcgacctacctgggcgctccgcgcccccggatgctgcaggtacgggcccgtgcgaccccagcgggccgggggcagggtgcggggctgccgggggccggggtcgcgctcggcgccaccccgcccccacccgtccctggggcgcgcggcggacgcgcgggcgggctggcgggt

SEQ ID NO: 42494 - DNA, 2300 bp, Homo sapien
cccataccaattttccccttcttacatgggaatggaggtctcaacttttggataggctcatgactatgcagagtaaagacttctttgtctactctccctggaaactgaatgtagccatgtgactgaattctggccaaggagatctaagtgtcctgaggcagcttctgggagcctttcttaagaggcatcaggcgtgcttcctttacctacttttctttcctctttccacatttatgttggctggaatgcagacataagggctagagccagagcagccaacttggaccatgaaacaattttaggaagggagaccacatatgatagagcaatgttttgtaggagcctggatctctttgctctttcaggagttgagctgataaactggcccaggacagcttatctctgaacttttaagacacaaaagcacatctttttcctgtttaagcctcttaattattcacacatgaacttaatcctatatgcaactggaaagggacatggactgggggagggttttatgatctccgaattcacatagaatttctctgtgaagggaaacctggagttgatacagaatttccttccacaaaacagctctttgaatcttcactgggtttgactttgcatctcactctcctgaggaaaacgaggagcagtgaatccactgagaacattttgcacggttctcttcccagccccttgacatatggagcagtctcccatctagagccaccatacagagttgactggcaggaaagccctagccctgtggcttgcatatctgagccctctcccctttcaaccccagtccctcaggaaggctttccctgaacacctacctaggcacatccacttcccttttattctccatcaaagcatttttttaaaaaaacacgtctttattaagacataattcatagaccacaaaattcacccagagtgtataattcaatagctttcagtatgttcagttgcacaatcatcaccaaaaattaattctagaacattcatcacagcatctaattacttaatttttatagcaatattttcagcctgtgacgatatgtttatttttgtctttatctgtgctttgcctttctactttaacccgtgagctcctgcagggcagggactgtgatggctatgcttatgcttggtgctgcgttttcagcacctggcagacaccgactcacagagggacccggctgcaagatagaagaaaagcctgaagctgtcccatctactctgtattgtagcaggtgcaggacacctggatgacaaccaggtccctgctctggaaaccgttaggagtagaggattctcagagggggtggaggcagggtgtgcgtactccaggtggcttattaccgcggggccggggccgtggtaatttgggaaaccatagtcaatatagctattgttttcaaatagcagactagggaaactgaccctggacaatgtcttcctggcaggcgggaacacgcagaatttggagtgaaacggaaaggggcatggggtcgccaaggtggtgaaacgccgcattaaggcgcttcaagatagctggagttttgcttgggaaactcagagggatctcgcccggccggcacaatggcgtttctgaacccatgcccagcccactgggggcagtccttgctgcttgcagaggccagacgcttcttgcaacttctaagcggcgagagctgccaccttgccaatgactcaaccgtttgcctatgccctctgggctgtgccaccagccgcagccgccctgctcccccacccacccttctccccaggctccgcgccgcgccgccagtcccaggggagccgccggcgcacctggcgcctagggcgcacggcactgcgcgctggtgggcacctcacccgacgccagctgccagcgcgctccctccccgaaaccctgaagtggggtgtcttgtctagcgcccagcgaacaacattatccaattgcttcccgttttattcgcaggctgggagctgagagagcctgagcattcactttcaaccctccaggggaggagggggtgcgggtggggaggggagacggctcccagctccacctcgcgcgcggcgcggccagtgcactcggctccgggagaggcgagcagcgccggtgagccccgcagcagcgcacccggccgcggagccccgcgatggagtgagtatccccgagccgcgccgccagctgctctcctctcggcatgttgccatggtgaccgcggcggcaggcagatcccgctcgggtccgcgtccaggatgggtgtttaatttcagccccg

SEQ ID NO: 42495 - DNA, 2300 bp, Homo sapien
gggcctgcttctatctccatatcattggccaagcctggtgcttaatggttaagagcatgggctctggtgagtgtgatctgagtttaaatcccagctctataactgtagctgagtctttcaacctctctggtctcattttcctcatcttagtattctctacaatcactctgctgaagcaataacagctttgtttatttgtgagcaaacccctttaaataacttgtcctgctggggcttgtgctggaaatgaagaaaaaaggatgcatttgaagaaaaggatgggcttagccagaaagtagaagtttctgatatattggagtgggatgtagaatctggcactggcttggatttattaaacaatcagctccacctacacttgttatgaaaaagatgggaaaacaatccatcagtaaacgattttggtgagtgcttccatctttggtcagaggagtaattgttcatcagtgacaggtgaacctctgtgaaaattgaaagggcaatttagttgaaatggaagcatttattcaggaaacaggtgatctgggaaaatttgatgtgcatttttttttttttttttgagacagagtttcactcttgttgcccaggctggagtgcaatgatgtgatctcggctcactgcaacctctgcctcccaggttccagtgattctcctgcctcggcttcccaagtagctgggattacaggtgcctgccaccacgcccggctaattttttgtatttttagtagagaaggggtttcaccatgttggccaggctggtctcgaactcctgaccttaggtgatccacccgccttggcctcccaaagtgctgggattacaggtgtgagccaccgcatctggcctgatgtgtatatcttttaacatgcctttaaatcctatggctctaaagaggccatattagttatttcagtgtttatttcatttgatgaagaaacgtttgcatatgaatgttgggaattctagcaggtcctgcctcaatgtgaagaggcatttttttttgcttttggcattgatctccttttggactgggcctgatccacttcttacatccagtccaggacctgtcacaaaagactcacattagtaccacatggtatcctgttttagtaaagaataggtgaaatattttagtgagtagatcctacttttcctttcagatgcaatgaacagaagaccctgaaaggatttcaatccagaatgtcacaggataataagagcagatgtctgtgatgccctttacaaagcacctttacatactgtctctcattcgtctctaatgacacctatgtgatcctccattttttcagatgaggaaactgaggttcagagtgattaagcgagttgcctgagatttcacagctaacacattgtgaaatctagtctagcacccaggactaaaaactctcggcttcttttaaggccacatatcgcctcaccagaagggtggcctctctggagatataccctaccctcggccgacttgatattgagaacttggtcatcttaagcatgtgggccacttgggcaaggcagcccttcccaaattgtaaatgtccccacgtggagctcaagcgtctggcttgagccagaaggtgccctgaacactcggtggccccagcccccacgtaacagcacgtgctcgggtcccacattcggtcagacgcccctctccactggcatctgcccggtggaggcgccactgcgctctgcctccgccccagcaagcgcgtgtccacgcgggcgcgccacgccagccgtgcgccccagcggctcgccgtgcgcccgcgccccaggtgcccactggctcgcgcgccctccgtctgcgccttggagacccgcggcggcgatcgctcggagccgccttggaccgcggcctcgggtccatcacactccaggggcggagcgaggcaccgagacgtcagggcggagaactagcgccgggctagcgcgccctcccggcggctgccggcgtcccacgtcctcggctggcgcggccggcggcggcggcgaccgggagatgcagtgagcggcggcgctggggcgcagccaggcggccgggagggcgggggccagaggctgagcccgggcgagcccgccgtgcgcacagctctgcccgccgcccctggagcggatccccagccgtccctgggcgttctcccgggttctagcaaagccccccggggtgcccatcagtttccttgggtgactacagcgtgtgttttttctttcctctttcccctgcctgtgtgcccttctccaggatggcagaggcggaattgca

SEQ ID NO: 42496 - DNA, 2300 bp, Homo sapien
gtagctgggattgaaggcatgcgccaccacgcttggctaattttgtatttttagtagagacgaggtttctctatgttggtcaggctggtctcaaactcccgacctcagatgatccgcccacctcggcctcccaaagtgctgggattacaggcgtgagccacttcacccggccttgctttactgtttctaataatgaaactaattttgtttgtaaattttacacttattctaatttaggaaaatatgagaagggagtgatgaagtacctgccatgatattgtttataacatctcacatctgatgtaattctaaaattcttccttagagagtctatggtccatataaataaataagtgatatccaagcacactcattttaatgtgagtttttcacatgatattaaaatgttaaaaatagatcagtatgtagggcatccaagcatttaattccttaaatcggagacatgaggagaaaaaaatgaaaaggaagaaagaaaagaaggaaaaggaaggaaggaagaaaaagttgagtcaaggctgaagctctggcatctctaaccactggtcagtaaattctattgaaattcaatagtataagagacaaacaggcaaaaaggatcgtgaaaccatttccaaataccaagataaaggaggctattgacattcaggaaccctgagaacagctgatgtcccattgtagacttcatcctcttccttgggtgaaagtgtgaatagcgctcaaggcagggaagaagtcttttctctgaaggtgctatttatggtgcccttggcctggatgggctttctgggtagttcccaagggtatcatttctttgtattggaaatcagggacctttgtgggttaggaaagtagaatcaggccatggctattgtctttccctgctgtgtttcacatgtaaaattgactcccagaagagcatcccagggccttgtcaaggagtggggaaaatagcagactgccctagggtggaaacctaactgagagtgcaagggcgacttgcaaagctggggagagagaattactgggaaaatcgtgcctagggcaaagctgaattcaagaaatctgacttttgtgatcttcctctgctgagaatgaatgcggccacctacagcagagtaagaccacagcttgcttttgaaagtgttgctctctaggtggggtgtttgtttgtgtgtgcctgtcctctctcaggatttctagacggttcattttcaaagggtcattaacattatttaaatattcatggtggaggaggggatgagagactgaaatttcagacatctcaagagtgagggatggctggccacccgcctaatacagccccagtctgcggatcagctgcctccttcccctccgctggctttgttagcacacgcgctctgacaccgggccaccggctgccactacacggagggcagcaggaaggctctggcgagccagtgagctggaagcatctctgtccacacctcagcctctgaaccccatcgggggagtcctcaaacacgcggagacaccattactgccacaaagacgcacttcgcaaccagttccgggagtcgctctgaccctgaggacagtcgtggtgctaggtaagggacgaggggctgtttccccgcctgagtgggaactcagcggctcctggcatttgagcgcacacaggcactcacacacttccacatacgctcatgcgcacatatgtgtacaccaacacacacgtccacatgcacacacagcgacacgccaccccgctccaaagccccgtgcgctaacaagtatccatatacccagacacagcgctcccctgagttaggaaacactcagctttgcccgccccatccatccctccgtctttccctctctccagtctctgcattcattcatttcttcgtttgtgcatcgattccgccgaagccactgagaggagaaggtgtgggtagatggggaggggaggggagggaggggcggtccgtgggcgctgggctactggaggggaagcgaggaggcggggaaggggcgggccccaggagcaggcgggcggggctccccgccctccagcgcgcccggaggctaccactccctgcagatgcgctggccccagcccggggctgccgctcgccttcccccggagtctcctggacccccggagtctcctggacccccggagcgggaggcagcggccgcgcggcgctggactggagcagaaccccaggactgcgcccccgggagcgggcgcccagaggtgggtgtccaagctggggaggggaggggctggagtgtcc

SEQ ID NO: 42497 - DNA, 2300 bp, Homo sapien
catggaggaactctgtctctacaaaaaaaaaaaaatatataaatatatatatatatataaatcagccaggggtgatggcacacaccggtagtcccaggaggtagaggttgcaatgagccgagatggcacactgcactccagcctgggccacagagcaaaatcccatctcaaaaaaaaaaaaaaaaaaaaaaaaagccctcaagacaaaaaacctccttccttaaaaaaaaaaaaaaaagaaaaatatgatgggttttaaaacattaagaagatagggttttcttattgaatcacaaactgaagatatcacatataaagcagttaaaaaactggaggagaggtaccattggccattagtttttcaaagcagtgctgacttcttaactaaagagtattattttgatgcaatcccagaaaacagagctgtgcagtcagtggctttggtgatggtgttcataaggcacatggtcaattacagccatggcagtgaggcactgtagcctgtgtgctgccattaaagggatctactgttttccagtattttattctgcaaagattttccaaaaagtttcttgtctccagaataactgcattacatctggcagagagtcatatgttttaaagatctgttcatacaaaaggaccttctttttgcaatcctattaatagtcgtattgcacagcctgcaatcatttgccgcaaaatacttgggaagactctggtacaataatgatgtaatctcttccaccttagtagataaaatttaaaaatggcactagcatgtaaacaaaatggaatccataaattagagaggattgggcacctgttactacaagaaaatgaacatttaagggattattagaaaatatctattcaaaagaatttgtcactgtggtttccattttccttcctcttaattatgagtcagtttgtcagcattcacatccataagagatgcagtatttaaccctgacttttgtttactctttattccagaagcctccccagctttctgaggatgatatctggctaaaaagcgagggagacaactatagtgccaccctcctggagcctgctgccagctctctttccccagatcacaaaaacatggaaattgaggtgtctgttgcagaatgtaaaagtgttcctggaatcacctctaccccacatcccatggaccatccctccgctttctattcacccccgcataatggcctccttactgatcaccacgaatccctggataatgatgttgccagagagatccgctatctagatgaggtgctagaggccaactgctgtgattctgctgtggatggaacgtacaatggaacatcctccccagagcctggtgcagtggttctggtgggcggcctaagcccccctgtccacgaggcgacccagccagaacccactgaaagaacagctagccggcaggcacctcctcacatcgagctcagtaatagcagccctgaccccatggcagaggcagaaagaacaaatggccattcccccagccagcctagagatgcgctgggggacagcctgcaggtgcctgtcagccccagctccacaaccagctcacggtgttcttcccgagatggagagttcactctcaccacactgaaaaaggaggccaagtttgagctgcgtgccttccatgaggacaagaagccctccaagctctttgaggatgacgagcatgagaaagaacaatactgcattagaaaagtgaggccttcagaggagatgctggagctggaaaaggagaggagagagctcatccgcagccaggccgtcaagaagaatcctggcattgcagcaaaatggtggaatcccccgcaggaaaaaaccatcgaggagcagctggacgaggaacatctggagtcgcacaaaaagtacaaggagcgcaaagagagaagggcacagcaggaacagttgctgctgcagaagcagttacagcagcagcagcagcagcccccatcgcagctctgcacagcccctgcctcttctcatgaacgcgcaagcatgattgacaaagcaaaggaggacattgtcacagagcagatagatttctctgctgctcgcaaacaatttcagctgatggagaattccaggcaagcggtggccaagggccagagtacacccaggctgttctccatcaagcctttctacaggcctctggggtcagtcaactcagacaagccactgactaatccgagaccaccttctgtcgggggacctccagaagacagtggtgcctcagccgccaagggacagaaatcccccggtgccctgga

SEQ ID NO: 42498 - DNA, 2300 bp, Homo sapien
ttccttcctcttaattatgagtcagtttgtcagcattcacatccataagagatgcagtatttaaccctgacttttgtttactctttattccagaagcctccccagctttctgaggatgatatctggctaaaaagcgagggagacaactatagtgccaccctcctggagcctgctgccagctctctttccccagatcacaaaaacatggaaattgaggtgtctgttgcagaatgtaaaagtgttcctggaatcacctctaccccacatcccatggaccatccctccgctttctattcacccccgcataatggcctccttactgatcaccacgaatccctggataatgatgttgccagagagatccgctatctagatgaggtgctagaggccaactgctgtgattctgctgtggatggaacgtacaatggaacatcctccccagagcctggtgcagtggttctggtgggcggcctaagcccccctgtccacgaggcgacccagccagaacccactgaaagaacagctagccggcaggcacctcctcacatcgagctcagtaatagcagccctgaccccatggcagaggcagaaagaacaaatggccattcccccagccagcctagagatgcgctgggggacagcctgcaggtgcctgtcagccccagctccacaaccagctcacggtgttcttcccgagatggagagttcactctcaccacactgaaaaaggaggccaagtttgagctgcgtgccttccatgaggacaagaagccctccaagctctttgaggatgacgagcatgagaaagaacaatactgcattagaaaagtgaggccttcagaggagatgctggagctggaaaaggagaggagagagctcatccgcagccaggccgtcaagaagaatcctggcattgcagcaaaatggtggaatcccccgcaggaaaaaaccatcgaggagcagctggacgaggaacatctggagtcgcacaaaaagtacaaggagcgcaaagagagaagggcacagcaggaacagttgctgctgcagaagcagttacagcagcagcagcagcagcccccatcgcagctctgcacagcccctgcctcttctcatgaacgcgcaagcatgattgacaaagcaaaggaggacattgtcacagagcagatagatttctctgctgctcgcaaacaatttcagctgatggagaattccaggcaagcggtggccaagggccagagtacacccaggctgttctccatcaagcctttctacaggcctctggggtcagtcaactcagacaagccactgactaatccgagaccaccttctgtcgggggacctccagaagacagtggtgcctcagccgccaagggacagaaatcccccggtgccctggagaccccatcggcagcaggaagccagggcaacacagcctctcaggggaaggaagggccctacagcgagccttctaaacgtgggcccttatctaaactgtgggctgaggatggagaatttacgagcgcccgggctgtcctcactgtggtcaaggatgatgaccatgggattttggatcagttctcaagatctgtcaatgtctccttgacccaagaggagcttgactctggtctggacgaattgtcggtgaggtctcaggataccacagtcctggagaccctatccaatgatttcagcatggacaacatcagtgacagcggggcatccaatgagacaaccaatgccctccaggaaaattcactggctgatttttctctgccccagacaccacaaactgacaacccctcagagggccgaggagaaggcgtctccaagtcatttagtgatcatggtttctattccccttcctccacgctgggggactctccgttggttgatgaccccttggagtatcaggctggcctcctggtgcagaatgccattcaacaagccatagccgagcaggtggataaagctgtgtccaaaaccagcagggatggagcagagcaacagggacctgaagcgactgtagaggaagctgaagctgcggctttcggctcagaaaagcctcagagcatgtttgagccacctcaggtgtcttctcctgttcaagagaaaagggatgtattaccaaagattctgcctgctgaagacagggcgctcagggaaagggggcccccccagccactgccagctgtgcagcccagtggcccgattaacatggaggagaccaggcccgaaggaagctatttcagcaagtactcggaggcagctgagctgagaagcacagcctccctcctggccac

SEQ ID NO: 42499 - DNA, 2300 bp, Homo sapien
ttttgtagatacagagtttcactatgttgcccaggctggtcctgaactccagggcacaatcaatacacccacctcagcctcccaaagtgctgggattacagttgtgagccattgtggccagcctactgccatgatgtctactgccatgatttcatggcaggtgcagctggtccagcatggatgggttgctcttgccttcatgatagagtgatctaccgataaaaaggtatgaggaagctttggctatctctctcggtatttttttgagacagattgagctctaatccaatgtgattgctgtacttataaaaaggggaaaattgggcacagagacacccacataggaagaacatcatattaggccgggtgtggtggctcacgcctgtaatcccagcactttgggaggccaaggcgggcggatcacaaggtcaggagatcgagaccacggtgaaaccctgtctctacgaaaaatacaaaaaattagctgggcgcggtggcgggtgcctgtagtcccagctactcgggaggctgaggcaggagaatgatgcgaacccgggaggcagagcttgcagtgagctgagattacgccactgcactccagcctgggcgacagagtgagactccctctcaaaaaaaaaataaaataaaaaaataaaaaggaagaacatcatgtcaagataaaggcagagattaggcaatgtttttgcaagccaaagaataccagagattgctagcaaaccatcagaagcaaggtgagaggcatggaacagatactctcacacagctccaagaagaaaccaaccctgctcacaccttgactttggacttctaacctccagaactctgagacaataatgtttgttgtttaagacatccagtttgtgggatttcgttatggcagccctagcaaaactaacatatactacccagtgaagatttgctctccatcttccacggctcccccacatcaaatgactagatcttgtctggttaatgtccaaaatgtcttgtaggttcaggctctactctgtttccattgcctctgtagacatattgggtaattgggtaatcagtaagcaccgtgataggagaagatagaaagggacttagttgaccaaatgcagcaaggctaggtcaaagctggtgtaagagggagagggtctgggattcaaaagcaatgtggaaatgttgaggctggcaagcagagagtgaggggatgcctaacttaccacttggttggagaatgctgagacggcagaggctgcaccaaatgtccaaggggtagggctggcccgaggccaagattcccctgggctctgtcccatggctgactttagggctgaattttcacctggggtgtgtgttggggtctgagtggagatcttggggagatctttgctactgggtttctttagggtgtggccgcggggcacacatccagaggcaccgaccttgtgaagctcccgagggtgttctttgaactactgcaaacccaaccggcaggtttgctgaaaagtggccacgttccagtccaaaatgtgtgagcagagcgcgagcttagcactccccagccccagtcccagctctgccaggaaaggggagacttcaccgtggcactgggaattggattctaaactttaggatcaagcaatggaaggacctggaataagacaccttcttgacccccctgaagggctctgagcagctgggcttgcctttctctttgctcccccagtcctccccttacttctcggtctcccactccccatcactcctttccctgcctcctcctgcctgtctccatcttcctccctctctttcttctctcgccccattaatccccgcttgtcactatcacctccttcctccagtctttcccccttcgctgccccttctttcctctgacatttccttctcctcttactgccactgtctcccacctttctcctcccccacatttctccctatccctacctcctcttccccttcatctttctccttcccccttatttttctatctccttcctcagtcccactcctctttccaccctccttttgcccgtcacttctccttctccctcactgccccctccctctctctcccctccccaggtcctgccccacccagctgtgtttgcttttctcccggatccggatggaggggttgccctgcccgtgcccagccctgccccacttctggcagcttaggtctcacttaatggctgagggctccaggactcaggcccctgggaaagggcccccactcagcatccagttcctgcgagcccagtatgaaggct

SEQ ID NO: 42500 - DNA, 2300 bp, Homo sapien
ctttgaggcttatgttacggagctcactgttcattactactgtcttcattacttaattcatttaagactgacacctgttttataatctctccttccaccctagctctgccatcattccagatggatctcatcattcatttaatagcctataatcatagttcatgtagcattcactacacaccaggcacggttctaagcattttacatatattttagttcactcaacccttataatagcacaagctattattacgcccacttctcacataaggaaactgaggcacaaaaaggctatttagacttgcctagagttacccagtcatgaagtggtagagtagggatgaggacaacggagtcaaattgcagagtccagactggcctcccagttccttataactgtaccatcctccacatctactctgcattggtgctgtggaggtgggagagagggagtacctccttcactgagtcactggacatttggaaggtctttggagagaagtcagctgaggatggcctgcattgccccttcctggaactcaatgatttgttgttatcacccatgcaaattcaccaacaaacagataaaagtcaggaagctgggatgcagctgaactgaaaacccagcagcagaaaagcaggttatagattctgctctgggtgctccatacagctccttcctctctgccccaataacctccctctctttgggaacattgctgcattcagggcagtctgtcttccctccctatgggctgtctttagaatgtgtcccttgcctatatccatattcatgctccgtgctcctcagccccctagaaactttgcacaatagattcaaaacctctggtttcctcccttcctctgtctgaaagagtgaaagaaggaagccagggatttcagggggcagccaggcagcagtatcaccacccctaggcaatcacacctagttgcagcttcatcgggaacagctcagctctgaaaacacagacctgggactctccctcccagccttctagctctcgttcctgtgagcagcttttcaacctccacttccagccgctgacaggccctcctggctccacaaggccagctaacatacccaccttccacaatccccagccctgccagacataacctgcaacaggcattcctggatcaatgcaaactccgacttctgttccaggagtctgcctctgttagaagaatctcacacaagtgtgcgtgctgtgccattgtaaatgctgtataaggtggccaggcccaatcagtccctgcaagacaccgaacagtaagaactatctatggagtgtttactatgtgccaagcaccgtcctttgcaagcactattaaccctcaaaataccaccaccgtgagattgagaccatcatgattcccgttctacagaaggaaacactgagacttcaggaggtcaggacctttccagggtcacaactgcgtaactaagttgcagagctcaacccagtggcacttccatctcacacgcagctgtctgatggtcaagagcccaaccagtcccccggtcgtttctaccgcactaaaccgctgtgtcaagctggagcagcgggctcagcagtgaaaatgaaagaacagaaggaggttacagagaagagaacggtcacggtaaattccggagaggaggcaaggacgtacacaccgagatacttcccggtcaccgttactcagcactttgtggggttcacgtggctgggggggccggggcgtggcggcccttttcgaggaatccagccctgcctgggcggtccccatctcgagcgtgggcgtgttcgattcaggcccggcggacgcatccccaggtgacccgggagggaccttgtgtctctgggggtgactgtccgtctccccgcctcccaccgtcacgcgcagtgctgatccccacttccagctggagtgcgagctgggcttggggttacaggagccgaagccctggagctccgccccacgcttgcgccagccccgccccgatcccggctcgcaggctccaggggcggggcgtggccggggcgcagcgacgggcgcggaggtccggccgggcgcgcgcgcccccgccacacgcacgccgggcgtgccagtttataaagggagagagcaagcagcgagtcttgaagctctgtttggtgctttggatccatttccatcggtccttacagccgctcgtcagactccagcagccaagatggtgaagcagatcgagagcaaggtacgcgctaccggggaaggccagggtgccggcgccgcgcgcggcctctgtaactggg

SEQ ID NO: 42501 - DNA, 2300 bp, Homo sapien
gaaaaaatgctcatcatcactggccatcagaaaaatgcaaatcaaaaccacaatgagataccatctcacaccagttagaacggcgatcattaaaaagtcaggagacaacaggtgctggagaggatgtggagaaataggaacacttttgggctgttggtgggactgtaaactagttcaaccattgtggaagtcagtgtggcgattcctcagggatctagaactagaaataccatttgacccagcaatcccattactgggtatatacccaaaggattataaatcatgctgctataaagacacatgcacatgtatgtttattgcggcactattcacaatagcaaagacttggaaccaacccaaatgtccaacaatgatagactggattaagaaaatgtggcacatatacaccatgaaatactatgcagccataaaaaaggatgagttcatgtcctttgtagggacatggatgaagctggaaagcatcattctcagcaaactatcacgaggacaaaaaaccaaacaccgcatgttctcactcataggtgggaattgaacaatgagaacacatggacacaggaaggggaacatcacacaccggggcctgttgtggggtggggggagggaggagggatagcatttggagatatacctaatgttaaatgacgagttactgggtgcagcacaccaacatggcacatgtatacatttgtaactaacctgcacattgtgcacatgtaccctaaaacttaaactataataaaaaaaatttttttgttaatacgtgtattagtctcttttcacgttgctgataaagacatacccaagtctaggtaatttataaagaaaaagaggtttaatagattcacagttccatgtggctggggaggcctcacaattctggcagaaggtgaaagtcacgtcttacatggcagcaggcaagagagaatgagagccaagcaaatggggaaacgtcttataaaaccatcagatctcatgagatgtattcactaccatgagaacagtatggaagaactgcccccattattcaattatctcccaccggtccctcccacaacccttgggaattatgggagctacaattcaagatgagatttgagtggggacacagccaaaccatatcaatacataatacttctacgtatttatggggtacatgtgatattttgttacatgcatacttcaaatacctctacagaggcagccactgtctccatctgacagttttcatgcaacacatgattgaaggcccagagctgcatatatagaaaaacagaaagaaggattttgctatttttgttttattatagaatctactatttctcattttggttgttcttgttgctctgtagatttgaagaacattggccatggtcatgttcagaatttttctgacatcagttctgaaaatggcaaatcatcaagtgcaggggtcagcaaactgctgctgttctttgtacatcctactagctgcgaatggtttttacattttttaaaggttgcaaaaacataaggaacatgcaacaaagactgtatgaggcccataaaactaaaatagtatctgttcccttagagaaaacatttgccaacccttgatctagagcataaaagtgacatttctttactctctaaataattagagcaaaataacaaagttcagggaatttatgactcatgaaatcaaacttacaggaaactcattattatagggttaagactttagtatttttctcaacagcaaaatcttcaaattcttaagtgaaaatctcatctatttaatattactctgcttacttctcatttggtgatgggatggagggattagagaagggagaaggatatttagaaataggttataaaagatgaaaataaagcaaacacattactgattctgcatataaagccctcagttttctgattcttggctgtccacaaatgaactagtcatggcataaaagtgaaataggatccaaagtctgccaaagttccaggttctgagatgacatgtttaatgatgtcatagagaagttatccatgtattccaggcaggatactgtaataaataggagacagctacagtgatccaactaaaccaacaggggattttcatcagcacttccctggtgtaatcatggtacagattattaaagacacggcaagtatttatttggcttcactgagtatttcaaatgtggacatcttgggaacagatttgaaaaactttaagaatgtgttctctctatccagtattctatcattgcattgtagcaaggggagagttc

SEQ ID NO: 42502 - DNA, 2300 bp, Homo sapien
atgactctttccctgtttgtaagattgttctttgtaccccacctcccctaatttcctttggtgtccccattccttcttctgctcttcattttggaagtactgtcaagtattcttgtgtaggtgggtttttcctaagaggaaattctaccaccctctgccaacctgatggcacctggagctctccactgccagaatgtgttccagtagaatgtccccaacctgaggaaatccccaatggaatcattgatgtgcaaggccttgcctatctcagcacagctctctatacctgcaagccaggctttgaattggtgggaaatactaccaccctttgtggagaaaatggtcactggcttggaggaaaaccaacatgtaaagccattgagtgcctgaaacccaaggagattttgaatggcaaattctcttacacggacctacactatggacagaccgttacctactcttgcaaccgaggctttcggctcgaaggtcccagtgccttgacctgtttagagacaggtgattgggatgtagatgccccatcttgcaatgccatccactgtgattccccacaacccattgaaaatggttttgtagaaggtgcagattacagctatggtgccataatcatctacagttgcttccctgggtttcaggtggctggtcatgccatgcagacctgtgaagagtcaggatggtcaagttccatcccaacatgtatgccaatagactgtggcctccctcctcatatagattttggagactgtactaaactcaaagatgaccagggatattttgagcaagaagacgacatgatggaagttccatatgtgactcctcaccctccttatcatttgggagcagtggctaaaacctgggaaaatacaaaggagtctcctgctacacattcatcaaactttctgtatggtaccatggtttcatacacctgtaatccaggatatgaacttctggggaaccctgtgctgatctgccaggaagatggaacttggaatggcagtgcaccatcctgcatttcaattgaatgtgacttgcctactgctcctgaaaatggctttttgcgttttacagagactagcatgggaagtgctgtgcagtatagctgtaaacctggacacattctagcaggctctgacttaaggctttgtctagagaatagaaagtggagtggtgcctccccacgctgtgaagccatttcatgcaaaaagccaaatccagtcatgaatggatccatcaaaggaagcaactacacatacctgagcacgttgtactatgagtgtgaccccggatatgtgctgaatggcactgagaggagaacatgccaggatgacaaaaactgggatgaggatgagcccatttgcattcctgtggactgcagttcacccccagtctcagccaatggccaggtgagaggagacgagtacacattccaaaaagagattgaatacacttgcaatgaagggttcttgcttgagggagccaggagtcgggtttgtcttgccaatggaagttggagtggagccactcccgactgtgtgcctgtcagatgtgccaccccgccacaactggccaatggggtgacggaaggcctggactatggcttcatgaaggaagtaacattccactgtcacgagggctacatcttgcacggtgctccaaaactcacctgtcagtcagatggcaactgggatgcagagattcctctctgtaaaccagtcaactgtggacctcctgaagatcttgcccatggtttccctaatggtttttcctttattcatgggggccatatacagtatcagtgctttcctggttataagctccatggaaattcatcaagaaggtgcctctccaatggctcctggagtggcagctcaccttcctgcctgccttgcagatgttccacaccagtaattgaatatggaactgtcaatgggacagattttgactgtggaaaggcagcccggattcagtgcttcaaaggcttcaagctcctaggactttctgaaatcacctgtgaagccgatggccagtggagctctgggttcccccactgtgaacacacttcttgtggttctcttccaatgataccaaatgcgttcatcagtgagaccagctcttggaaggaaaatgtgataacttacagctgcaggtctggatatgtcatacaaggcagttcagatctgatttgtacagagaaaggggtatggagccagccttatccagtctgtgagcccttgtcctgtgggtccccaccgtctgtcgccaatgcagtggcaactggagag

SEQ ID NO: 42503 - DNA, 2300 bp, Homo sapien
aatggctaaaatctacaggtagtgaagactggaaaaaaaattaatgaagatgattatgaatctttagtatataactttctgcattttactagtgtataggcatttcaagtgctttgtggcaacagcttagccctaaataggaagttagaataaaccaattttaatataatattttgttttacagaggtttttcaggatggatatatgctttattttatagaaggcaaggtctaaatggaacctagagaaatatattataattttaaatgcttagacaaaagatagggtaaaccaaataatgtagtttttacaattctgttttggtaaacctaaaggtaatttcactgtgatggacaaaagagttcagtccaacccaaatatgtcctgctttcacgctaatgtgtgtcttctcaataagcctaccaagaaaataggaatgagaatctattcccccaaatcaagggccatttgaaattgaccatattctaattaaacacttttttaaaacccacatatatacacagtacaaccttttctcctttacattcaaaataacaaaacagtaaaagccttttatttaaggcttttgcttagatttagtagcttttcattggaagagggtacagagtataagtagagaggtgttcatttattaattggaagagggtatagagtataagtagagaggtgttcatttataaatttaataaatatttctagagctcctgcttggcaccaggtacagttctgagaatcagcgacctagcatttaacaacacagattagatgtgtaatggcatggtgcttacatgcatgggagacacacaagcaatgcataaacaaaatgagtaattttgtttatttgtttatgacctgttatattacatgtgtttgaattttgagatcacgaatattaattttttgttttaaaagataggatattattttctattgttacagcagtaatttttaagaaatatgttaatataaacaaaattttgatagtattcttaagacatacccataaaaacattttatttgactatttatgatctaacaacattaacaaatacatgttaattgtttatgtgcttctttactagcatttctttgggcagaaagtttttttgaactgagtaatttatcatttttagcgttgcctcatcagttcaccaatcaatatatagattactgatcttttacttgttatgggctcaaaactgtagtaaggatttctgcagtggggattacttaatttgattttctttttttctttcttttctttcttccctttagacagagtcttgctctgtctcccaggctggagtgcagtggcacaatctcagctcactgcaacctctgcctcctgggttcaagtgattctcctgcctcagcttcccaaatggctgagattacaggcacataccaccatgcctagctaatttttgtacaggtttcaccatgttggccaggctggtctcgaactcctaacctcaagtgttcctcctgcctcggcctcccaaagtgctgggattgtaggcatgaatcgtcatgccgagcctaagttgactttctactatcattttcacttatttaaaaaaatagaatggatctattggaaaaaccataaatcattatttgcttacttcctaattgattcattttaacatagaccttttagtttttttcactatccaaggatttagttaatgctatcatctgttatacaaatcgcactcacttgctttcttcctgttgcacagcatacaactggcaggatctttgagagtgaagtgaggtatcagtgtaacccgggctataagtcagtcggaagtcctgtatttgtctgccaagccaatcgccactggcacagtgaatcccctctgatgtgtgttcctctcgactgtggaaaacctcccccgatccagaatggcttcatgaaaggagaaaactttgaagtagggtccaaggttcagtttttctgtaatgagggttatgagcttgttggtgacagttcttggacatgtcagaaatctggcaaatggaataagaagtcaaatccaaagtgcatgcctgccaagtgcccagagccgcccctcttggaaaaccagctagtattaaaggagttgaccaccgaggtaggagttgtgacattttcctgtaaagaagggcatgtcctgcaaggcccctctgtcctgaaatgcttgccatcccagcaatggaatgactctttccctgtttgtaagattgttctttgtaccccacctcccctaatttcctttggtgtccccattccttct

SEQ ID NO: 42504 - DNA, 2300 bp, Homo sapien
tgagaaacaaatgaccacttacgtatttgagcaaacaactgaaaaccccctacgtttgagggttttgataaaaggtttaaaaaagataaatgttttgataaaagttgaatttggaaggccaagtttagggtaggacacagaaatgagacttcttgcttctttctttccctggcattcattatatcacttaagtctcttaaagtctctgcatttttgtcctaagcttaagagtggatcttgcccttataattcaaggaaaggccaatgaaaagcacaacaccagtataggaggaaaactcggtgagacagatgcaaaaatgtgtgtatgtacacatggtaagcatgtggcttatataaggcccaggaggcttacattgtgtgcagggcaatggtctgtgctaggcagccccaagggaggagacagttaagagggactggagaaggaaataaactttaatacactaataaggccagcagcatcttgagaagtggaagaagacggtaagacaggtcatattttacaaaggccatgacttgaacagagcgatgccatccttgactggaacaagacacagggcatgtagatctatgccaatcaactccttggggaaaagaaatagaaaataagtaaagagagataagatgagtgctgacttcttgttctgctctacaacagtctgaaaaccctccctctataatacttgacgaattacaacacaaattattttaaatgcatagctgagctgacaagaaaggaaatttccatgtgccagaaatgaagaggaaattacaaacagaaaagtaaacttgtgaatggatgctatggttgaccttggattagacaaagaagggaagtcgagaggatagaaaatatagcttcggagttaaaatagcaatagtggagtctgtacctcatgtggattggagtttagaatttacaccattcactttgtatggaaaatcttcaaattgataaattaatgtaaaattaggttcttggctggtgatactcccgaaacacctggtagaaaaaaaatctacatactcagaaaataaggggttaccatagataaaacaagccctgtttactataagggcacaatctgaatttataacacacacaaacatattttccatcacaaatgggttggcagacagaaaaaactgcaagggtagagcaccaataagtgagataatagaaaaaaagctctaaaatataaaaaatagtatgaaataagtatgttgaaataaggacaaaagaaagactcaaaattctattaaaagtgactatgaaaaaatgtttgaaaaataaatagaaattctggaaataaaaatgtggaacataaaaattaaaaacaatggacatattcaaaaacaggctacagatattagaagaaaaatcagtgaactggaagaaatatatgaggaaattatccaaatgtaataggttttgaaagagatgaaaagtgtgacagattaattaacatgaaaaatagaatgaaaaggcccaacatatatctagtaagacatccataaagatataaaagagaaagtgagaaacagaaaatatttgcagtgaaaatgactgagaatattctaaaataggtgaaagatataaattctcagatgtaagaagtacaatgagtcccaaacaagatgaatgacaataaatacaccatagtcatctcatagcaaaacactaaaacaacaaagacaagtttttaaaaagtaaccaaagagaaaacatattacttatacagcaacaagaatttgaccagagtttctcaatttcagcactactgacattgtggaccagatacttcttagttgtggaggactgttctgtacattgtaggatatttagcatttttcctagattctaactattagatgctagtagcatcttccccccagttgtgacaaccaaaaatgtctccagacattgccagatgtccttggagggcaatattgtccttgattgaggatcactaaattagactcataaaggaattctgaatagcaacattagaatcataaggcaacggaataatagcttcaaaatacttatggaaaaattggaggaggaggagccaagatggccgaataggaacagctccggtctacagctcccagcgtgagcgacgcagaagacgggtgatttctgcatttccatctgaggtaccgggttcatctcactagggagtgccagacggtgggcgcaggccagtgtgtgtgcgcaccgtgcgcgagccgaagcagggcgaggcattgcctcacctgggaagcgcaaggggtcaggg

SEQ ID NO: 42505 - DNA, 2300 bp, Homo sapien
tcatttgttgtgaagagtaactcctggaaaacaataagatgtctatatgaacacaccatataaacagttctttattttagttatttcatgtaatattatatcaggcacatttttggtgtcacaaaatagtttgagagcaggattttaattcctgttttataattcactttatggattttccataagtaacttttctctgtatgttaatattaggtgatattcactatggaaaacagtttaataagcatctttggacatacatctttatgcttacctctggctgttttcctcaaaatcagctcataattgcatttactttaagaatttgtttaaactccttgacttatatagctcaaatggcctttgaaaagattgatgcaatatatcctcccgttttgagaattcaagtattatattcacttttcttgctcaacactggcccaaaccttgctttagctttttctccttcctattatagcagtggagaccgaccctgaatctgtagatagggagagcccagagcccatactctatttgggaagggaggctggaaactttcctgaatctgctttattcagcctttccatcagcctgacaccaagtcagttgctctgaaaaactgggtatgaagagggaacagatgaaagaggctaatgcccttctaagccactctctagcaccaccactactttcccaatgagcgcctacctttgcagccagaaaaattatgtatattgttgttaggaattgctgtttcaaactattattgcttaaatgcttattaaatgtatgttctggtctaatgtccaatgtgtctctgggccctcatgcatttcccttcacgaggttttctcttgcgattttaacaggtttcttaactatagtggaattcttttgctgtgagactttgcatggttgtgtgaaagccacttattattccaccaaaactgtctgtttctagaacctataaaatgtaaggctccaggaaatccggaaaatggccactcctcaggtgagatttatacagtaggtgccgaagtcacattttcgtgtcaggaaggataccagttgatgggagtaaccaaaatcacatgtttggagtctggagaatggaatcatctaataccatattgtaaaggtatgtttagtaaatttaccacgtttcttatgtttggcaatcctagaaaggtaaggcgtagacatatgaagtgttatgttgtatcaatgttctttgtatttgaactgaggtattaggctcatgtttaaacatgaccccacacacacacaccaaaaaaaaaaaaaaagaaaacaaacaaacaaaaaaagatcttgagctgccccttgaaatttcaaagatttttgcacacagtctcaaaaaagtcacgtgtttgtttttcctttgttaagctgtttcatgtggtaaaccggctattccagaaaatggttgcattgaggagttagcatttacttttggcagcaaagtgacatataggtaagtatctaagattaaaactatattgtagaagatgttgatggcatactggtagtgatataacactgaaagaaagggggtgggaaaataattgcagaggacatttttgaattaatatgtaattaatcgaatgatacatagtgtgaacaaatcttaatccaataatttaatggtagttatatctagaatccttaaatcccctgaccaataatctatcattacctccagtgcccccttgaggcaccctgagagtggatgctcctagctaatgaatactcttgatgtctcagaaacagactagaccacaccactctcaagccaaggattccctgtttgtagttactaatccatgacacaaactgaaggcaagccaaattcttaaatctatcctacttccctatggggaagatatacagtattcaatcttgaaaaaaaaaattaatttaaaagcattatttcagtaggaaaaaaaatcaacttttccaatatgtataaattcttaatatttttagaggtttttggcacagataacggcatgcaaaataaagcaaattatatcctgtaattttcctctatcttctttaggtgtaataaaggatatactctggccggtgataaagaatcatcctgtcttgctaacagttcttggagtcattcccctcctgtgtgtgaaccagtgaagtgttctagtccggaaaatataaataatggaaaatatattttgagtgggcttacctacctttctactgcatcatattcatgcgatacaggatacaggtaacatttgtagacaccaaccaagctttct

SEQ ID NO: 42506 - DNA, 2300 bp, Homo sapien
ttatatttttattttatattttagttttagtttattatatgatttagttttagtatattatattttagttttagtatattataatgatttagtatattataatgatttagtatattataatgatttagctttagcatccaaggggcctgggtttgactcacagcacgtgtagtggtaaagaacatggactctggttctgaattgtctggattcaaatcctagctctgccacttaactcactgtgtaactatgacaagttatttaaactcttagtgcctttgtcttcccatctgcaaatgggattaataatattaggtgcttcataaggtattaggaagttaacaagttaatatttataaaatatatagaacagtccctaggacatagtgaatggtatataaatatttgctttaaaattctatctctgtcacccactaactgagtaactatagtcgtcattgaatctctctaagcctccattttctgatgtttaaaatggatataataatactaatgaaattaatgcaaatattgatagtattaatcttgtaatgctgcttattaatactgtgaggattaaatgagataatttatgtaaaatatccccacataggccgggcgcggtggctcacgcctgtaatcccagcactttgggaggctgaggcgggcggatcatgaggtcaggagattgagaccatcctggctaacacggtgaaaccccgtctctactaaaaatacaaaaaattagccaggcgtggtggcgggtgcctgtagtcccagctacttgggaggctgaggcaggagaatggcacgaaccagggaggcagaggttgcagtgagccgagaccgcaccactgcactccagcctgggggacagagcgagactccgtctcaaaaaaaaaaaaaaaaaaaaaatccccacataaatgcacattgcttggttgcaactgttatttaataatgaaatgcaacctgggactatgccacatttaattggcttaactgagcattgcaagtctcttgattccacaattgctctattattgaatttctgaaatttaaattattttacagatgcataactccagagggattaagttacaaattcaaagctacattgtctgtgcagaggaaagatttgaagcaaggtcaattagattctgcttttaatcttttttttccatgagcctgggaaaagcagtgtctttaattcttttttcttcaaagggcctagttcctgtcggttggattatgtccctcaagctcttcactttctcctcatcctttctcaagatctgtgaacagaaacaatgggctaagtgctttttgcgtatctgcagttattctcctttgctaagagaggagctggggctcagtgctagagatgaggtgcacaggatgggggagttgggctataggggacatcatacttatcaaagttttttttatctattgaggatcattgattcctcctggtgacttaatataaattgctattttgaattttcccacaaatcagcccagacatttcatgctgtgttgtgttgtatttgaaactaattgtgggacataagaggccacttcataccttgcaaataacaaattacatcattctttagaaaacaaaaatgttggtttctctctttgcttaaattatattacgatttctttttctttctttcttttttttttttttttgagatggagttttgctcttgttgcccaggctggagtgcagtggtgctatctcagctcaccgcaacctccagctcccaggttcaagcgattctcctgccttggcctcctgattagctaggattacaggcacacgccaccacacccagctaattttttgtatttttagtagagacagggtttcatcatgttggccaggctggtctcaaactcctgacctcaggtgatccacccgcctctgcttcccaaagtacagggattacaggcgtgagccaccacacccagcctacatcaccatttctatggaaaactattgtttggctttctctcccatattaatttcaaatgttttgttaactaccagctgatgtgccacataacatggacttctccggcttgtctgcccacagcttgcccatcggggacatacaaacctgaaggctcaccaggaggaatcagcagttgcattccatgtcctgatgaaaatcacacctctccacctggaagcacatcccctgaagactgtgtctgcagagagggatacagggcatctggccagacctgtgaacgtgagtctcccactgttggaaaatgggaaatataaa

SEQ ID NO: 42507 - DNA, 2300 bp, Homo sapien
gaggctgaggcaggagaatcgcttgaacctgggaggcggaggttgcagtgagccgagatcgcaccactgcactccagcctgggtgacagagtgagactctgactcaaaaaaaaaaaaaaaaaaaaaaaaaggttgggtaccactgctctattgtccgctgtcattatgaccaagggcacttctttgggatgtaccaccatcccagatatccagatggaaagaggacctggggacctctatgcctaaagggaggcttgtcaatcatctcttctgtgacagagttaggggtgtggagagagtgtggagagttcagggtctcacagcaacatctcacatttctcattctcccctaactctttccctcttcctctcctcagaggttttttcttctctggagtgtggaaaaatttcacacttaccaagcattcattccaaatcttcctgtcattcatcaagagggcagctttttaaactttaagagccaagaattttgagagtgttgattgggcttcttggtgtgtttatttggggaatgtctccagtaacgtcccgaatgctactccgtcgcagaagccaccctctgtgcctgtctttggtgtggtcccatctgtacgattttccttgatctcatttgatttttgagaaagagtgtggtgaaatgtttgaatacctcttctcaaactgctggctttccagatatttctggaggcattgttagtttcatttaattttccttaaattcaggtttagcagctttagctttgcctcacaaacactaactaaatttaggtaagaattattgaattgtaatgaatacccactgattatatactaatgaagattgctttctacggacatgaatctcatagtctgagagaatctggatctcatagtctgagagaatctggatcttatagtgagtctgcaccctaaagtgaattgtatcaaacattttaaaaatcacaatatctccttttcactttaacacaacataggatgcagttgtcactcttcctgcctaccttctgaaaaacatgtagtgtttcttgaattcttgcggaataaacatgaagttcttttttaaaaattaatttattttttaataggaatttcttctaagaacttaccagaaaatataccctggtgcttctttatcttttctactcatctgtagtgaaaagcaacaacagcaaattgaattaaatgccagattcaccactggagttcttgtgcctttatagtctggtgttacaaagcatcaatggcaatatataaatgtctttttaaaaggtttcattttttaaaattctatctgtagagaaggaagagcatatatcattgtaaaacagaattcacttgtcctaaaataataaagtcccagtgtcagatttagtgaatcagtatttctggataccaccaaaactagctatttttatgctagtaccgggtggtccaaaaagatgaagtattgaatcaattctacattttttggaggagcaagtggaaaaacaaatataggaagcaggtcagccattattgactctggaaaagacatgttctgttaaatttccttcccattaggattttggtgtatgaccatgcagtggtttggatagagatgatagacagatagatagatagatagatagatagatagatagatagatagatagataatttgtggaatttggattcagattttgttcatattttgagagcctgagaatcaataaaaataatataataataagtgataatattgattaaaaattcattccataagtgtttgttgtacttcattagcaagctccatcagcaatgttgatgaggatgatagtttttaaatgcttttgaggtttattgtggctctgtgagaagatcattgtaggctctcatctgtgcctatttctgttttactctgactagggcttccatccctcatgcctgtgaaatactaatgatctttgcaagtactgccttacgtaagaagagaagcacacagtaggcaagacagtacacactcatattaactttccccatttcattacagcaaattcttcttcatgctagagaaaactcaacaaaagttgtatttctcatcactgatggatattccaatgggggagaccctagaccaattgcagcgtcactgcgagattcaggagtggagatcttcacttttggcatatggcaagggaacattcgagagctgaatgacatggcttccaccccaaaggaggagcactgttacctgctacacagttttgaagaatttgaggctttagctcgccgggcattgc

SEQ ID NO: 42508 - DNA, 2300 bp, Homo sapien
tgacttcattggtaatatgtaaaaatgaatttaaaattcatattaaataataagtgggtaagaattaactagaaaaagaatagattttttaaaaggagaatttgcactaccagatatttaaatatgttgtaaagttacaatagttaaaacattttggcaatgatacaaatgagatagagaatgggatgaaatagaaagccaggaagagatcaaatacccataagcatttagcacatgataaacatgacattcaattaaattggaaaaggacagatggctattaagcaagtagtgctgggacaactggttaactatttattttttaaaatcaagttagacctctttgtcatatcatacacaaaaataaattccagatggattaagctgctacatggaaaactatttctctgatttgggaaatgagagagctattctaaaactatgaacaaatataggatcttaaggaaaatgtttgatagatttgagtgtataaaaatgtaaaccattcatctaacaacatttccataaacaaaaataaaaggcagtgaactggaaaaacatttgcaacatatacacaaaagaattactggcctcactatataaagaacttttgcaaatcattaagaaaaaaaaacaagccaatgtgttaagaaaaaacaaacaagcactataatggcaaaatgggcaaaaactataaatatcagaggaaaaaatacaaatgtccagtagatgtactggaaaatgttcatcctcaaaaatcaaaaatgtgtatttgctaaaatgatgcctccatcacctcttaaattgacaaagatattaaaaagaatagtatgatattggtgaatatgtggcaaatttactgctgagatactctgctgatgagaatataaatttatacaaccctccaagggagaaatggacaatagtatcaagaagttacaaatgttcataacctttagttcaggaacttttatagaaattcttcctaaagatgtaaacagaggagtccacaaatatttatgttcacgataacttagtaaggaaaaatcctaagtgtccaacaataagtgattgttgcacgcaatggaatagtatgcagctaatgtagaacattttaattaggatataacaaacgaaaaatgtaggctacaaaacagcaagatattaaaagtatgaatggatgtacatactgggcaactgttcaacaacctgcaaacagtggcttttttaaagtgatgaaattttagggtttttttttcctctccctactttttgtttaattcagtccacaaacactggcttgctattatgtgttagatatttctatatgtttctttttcccccactgaatatggattaatttgtaatcagaaaaacagacacactttacaaaagtccgacatcccaaactgacttcctcttccagatattaaaaatctaataaaggattggagcaaaaataggaagggcacgaatcttacattgaaagcataacataactttaaaaagaattggggttaggtttatatcactccatgtcctacctttagaaacactttgtaaaccatgctcacctgtttcagcttggataccgtctgctcctacaaacgtgaatgtgattagcgtttcaaggatcccttcctaacagggtcctcgaagccgactatctaaggagcctgacatccctctaagcgttttaaaatccattatcccattggaacctccacaacaataataggcgggtagcgatgactctggttttgtggatggggacgcttgacttggggtggttatgccttgcccaggactgaaccccgggatagagacgggcaggcagcggtgggtcgaagggcccggggactagggcccgggtcgggaggggcgggcgccttaccgcggcttgctggaaggcgcccttggtgtaggtgccgccacctcggtaggagatggcagggatctcttggaggagcagcgcgcacttgtgctggcgcgcgcggcgggtggagatgtaatcgacgcgcggcaccacgtagttcttggacgagaaggtcacgatggccacgcgcgtggccgtgggcaccacggggaagtcggacagcagcttgcggacgaacatgagctcgctgcggaagttgacttcgcccacgctggacgaatcatccaccaggaagacaagctccaggcgctcgctgagctcccgcagcagccgcacgcgtcgccggaacgcctggcccagccgctccactctgctccccgccgcttcgtcgccaggagcgggcggcgcggggatactcccgggg

SEQ ID NO: 42509 - DNA, 2300 bp, Homo sapien
catccaaaaagaagccaaactgagagaaaaattaaagacctaagtagtttttaatttccttttccaagcctttttgagaccagctgtaccctctgccctttccctagtttagttatactaaccaaaaaatccctttttgtttaaatgaggagacattaggtgccacttacttgcagcaagagttctaaagcaattgagtacctccttggtttgtgtggggaacacaggagatggcacacattgcagatgccacggtgctttgcacataaagggcttcatgatgtgttttaaataacacagagtagatgatatttggaaaaacttttttttttttaaaaaagtcccagctcaaatgaagtcttactcattccccaggaagaacgagatctttctcctccttgctctttcttctctgcttttgcagtcaccctactgctttgtaattgtttgcaaatctatgttcttttctaatgttctttgaacttctggaggactggaactcagtcttattcacctttaaatcctccgtatctaacatgccagcacatagcaggtggtcaataagtattgttaggaaaataatttgaagaacattcatgattaaaggtggcaataagagcaaccagccagcatttattgagtacacgctatgctccaagcattgtcctaagaattttacttttttatgacttaatccttatgacagcccttaatatgttatcgttattactccattttacaaatgaacaaactgagtcaaggctgtacaactaataaatggcagagtcatgatttcgtccaggaaaactgatgccagagccctaacatgttacacaatacattgtgatacttgtcactgaaagtattttgttaaatacagacggagttaaatcattcactattagaaacagaggaaactgagatcactgaattccatcatgaaatagatactgatgctgagccaaggattggaagtgactcagttcaggtggtttacataaccgtaggcttacctacacggtgttcctgactcccagctggaatcttttaaccaaaggccccaccctcatgcaaagtgcaccttttctttacacgtgcgctctcccctttggaggtcttgctttggaaaaaccaccccaggtagcaacttgtttcaaagcagatatatgccaggtaccacttaaagccaggtggatcttatctgttgaaatagatcaagaacacatgaaaggggactggggaccccctacttacacttcagacttcagcacaaactttctgtcctcagagaaggcttctctggcctctccaaggtcaagtctgtctacctaagctctcctttatttagcatggtcacttgtaattacatatattttgtatgttaatatctggttaatggtcacctcacttgttaccctttaagttcattgaggatagaatccctgtcaatttttgttccttatatttgcagtgcctcacatagttcctggcacacaatgggtattcaaaaaatatttgttaaaatcaggaaagaatgaacaaacagatgaatgaataaatgcacgactgaagtaccatgacaaatcattcctgtggaacgcataaggttagatgcaactcctttatggtgtgatctgagggggcccttaagggcttaatctgcacgctcacacacaccactgattagaaatccccatcaggaaaattgtacaatcatctatttggcgagggctttgggacactgaatgggggaaaagaaacacaaaaggtgagcaagcagttttcaaaggatgctttcaactccctggccagtccgcgtgtatgttttcgtctacaaagtgtttccaattactgtggcactctcggtatctggatccatctccagtgaattcctctgcagctcctgccagacatatgggatcaatcagggcttcggcgctggtgcgcttgctgcgggaatgttgacagcctgacagacgcggggttctggtgtcatggaatctccgagcctttggcttgatcccgggaggagaatgagagggggaggagggagatagagtcacagatacagaaagtagacaggagcggggagagggagagagggagagaaggagggaagcgggagatttttcttgactgccccctttccttcaaacattttataggcttcagggagagagaggaggaggagagagggaagaaaaaaagaggagagcgagaggggtagagagcgcgcgccgttccctccggagttcccgagctgctgaggagtctggattgtgtctgtccccagtgtcaga

SEQ ID NO: 42510 - DNA, 2300 bp, Homo sapien
tctcaatagatgcagaaaaggctttcaataaaatttaacacccctttatgctaaaaactctcaataaactaggtattgatggaacccatcgaaaaaaaatgagctatttatgacaaacccacagccaatgtcacactgaatgagaaaaagctggaagtattccctttgaaaactggcacgagacaaggatgccctctctcaccactcgtattcaacctactattggaagttctggccagggcaatcaggcaagagaaagaaataaagcgtattcaaataggaagagagaaagtcaaattgtctctgtttgcagatgacatgattgtatatttagaaaaccccatcatctcagccccaaatctccttaagctgataagcaacttcagcaaagtcccaggatacaaaatcaatgtgcaaagatcacaagattcctatataccaataacagacaaacagagagccaaatcatgagtgaactcccattcacaattgctacaaagagaataaaatacctaggaatccaacttacaagggatatgaaggacctcttcaaggagaactacaaaccactgctcaagggaataaaagaggacacaaataaatggaaaaacattccatgctcatgataggaagaatcaatattgtgaaaatggctgtactgcccaaggtaatttatagattcaatgctatccccatcaagctaccattgactttcttcacagaattagaaaaaactactttaaatttcatatggaaccaaaaaagagcccatatagccaaggcaatcctaagcaaaaagaacaaagctggcggcatcacactacctgactctaaagttctataaatgaactcacgaggccaaagaatgaagaagacaccaacacaaaggggaaaaaatcaaaacaatatggtcattgcaatggtagagatatgcacagtatattatggaaacccagagaagacaaacgtaacacagctttgggaagatatggaatttttctcccaggaggagaggatgatcaagctgagagatgtgtgaactgagtggaaaggaggggagtagtattccaagagaagcaaacagtatgagcaattcatggaggtaggaaagctgtatacagggaaccatcagcaggttgttgaataaaggaagctgaatgaggctgggcacagtagctcacgcctgcattcccagcactttgagaggccgaggtggaatcatcatttgaggccagcagtttgagaccagcctgggtaacatagcctgaccacatctctccaaaaaataaaaataaattagcctgctgtagtggcagtgcctgtagtcctagctactctgaaaggatcacttgagtccaggaggctgaggttgcagtgagctatgattaccccattgcactccagcctgggcaacagagcaagaccctgactctgaaaaaaaaaaaaaacaaaaaacaaaaacaggatcgtaaaagacaatactaacatacaacaaagcatgcagattccagtaaagcctgtcatattaggcagattaggcaggtttaaatatatttttatgtgatgatgagcccctaaaggcttttgagcaggagggactatctgaaaaaagatatagaatggttaagacccaagacagagagaaggtacaaggactatttggttgataaaatctgtaggaattggaatgggctgaatgtgggagtgggggtggggtgagagatggggaggactgaagactgaatagacccagatttctggtttgagtccgggagaggtggggtgctgaattcgaaggtcaggacacctatacctctgggaatacagcgatggttgcaaaaggcatctggtattgtccttctgccactgtcttaaaagggattctaaagggattttcttgcccttgttcctccagccctacacttgcattactggcctacgtggatgctcaccagctggctgtgtccatcattgcagccaagtctgagaattcctgattatacttagagcctgtggagctgctgacacaaacagtcattagcagacaacccttttgcaacaaagtatgctttaaaatgtaaactgtggagccattttccttgcgttgtccagaaggaacttcgtcctgcgtgagcctggattaatcatgagagagctcgtcaacattccactggtacatattcttactctggttgccttcagcggaactgagaaacttccaaaaggttggtttgagcaatcgtgtcttcttgttgtcttgtcatggttgtaaagtgtgtgtatatgagatatgaccaaga

SEQ ID NO: 42511 - DNA, 2300 bp, Homo sapien
aggtaatgggggaggtaggcaggtcctgtcaggccttattaaaaacattggcttttaatctaagttgggaaacaaatggagagtttcagccaagacatgacatgacacaactcacattttttcagatcttctctggctgctttcttgagcattgcatgaagggaagcaatgaaatcaggaagacagtaaacaggtattgcaatgatgcagcaagagaagatgatggcatgggccaggtggtggtagtgaagatcgtgagaagtgattctcttccatgtgtaatgtgaaagtagagccaaataatttgctgacagaccaaatatgagatgtgcaaaaaagggaaaagtcaaagatagtatcgaagtatttggctgtgcagatgagtgaatggaggtgccattggctgagttgaggaatactcagaaggaacaggttcctttagtggagagagtgggaattcatttaaagatgtggtttttgtccaggcactgtggctcacgcctgtaatttcaacactttgtgaggccgaggcgagcagatcacctgaggtcaggaattcgagactagcctggccaacatggtgaaaccccatctctactaaaaatacaaaaattagccgggtgtggtggcacacgcttgtaatcccagctgcttgagaggctgaagcaggagaattgcttgaacctgggaggcggaggttgcagtgagccgagattgtgccattgcactccagcctgtgtgacagagtgagactccatctgggaaaaaaaaaagacgtgttttttggcgatgcttattcaacatccacatgatccacatgaagttaaggatgcatgtggatatggaggcctagagttctggtaaggatgatctggttagacatgaatccaaggctattgcagtacacagagtatttaaagccatgaggttgagtaagacacctaagtatggagaaagcaagccagaacagagaagaggtccaaggaccaaggcctggagcattccagtatttagtgtgagaaagaggagatgaacaagaaaaacaaactaaaaacgagcaaccaatgaaatagaagtaaatcaagagagtgtggtgtcctggatgtcaaatgaagtattttaaataggtgaaagtgagcatgtcatatgcattaagtcaagtgagaggaggactataaagtgaccttgaatttgtaaacatggatgttcactggtaaccccgagaagagaggtttcttaggaatgttgggggcagaggaaatgtaagtgagctcaaaagaagaggaagagaaaatctggagaaaaagtataaacaacttgttttgccataaaggtgaaccaaggaacatggatagagctgaagggggcagaaagaagcatgcttcctttcatgtggaagtaatagcacatttgtaaattaatgagaatgatcccgtaaagagaaaaattgatgacagggttggcaaatagtggaagtaacatctttgaacagtgagagggaatggaatcttggcactgttggatggattggcctttgtaaagagaatgctcagatcaaccatagtaataagagagaattggctggagattgtagccagtctcttctgattgatttagttttctctgtgaggtaggaatcaagatctcatctgagggtgaggaatgggagaagagttgaagatttgaggaaagagaagaaataaattgtcatctaagaaaatccatttttacataaaatataaaatggactagagaaacataatatgattggcaagaacattaaaagcttacttgaaattagagattacacatttaacatgagactggtcagcatggttgtgtatttatccaaatgctgccagctgggcatagactcgttaagaggagttaaattttaccagaattagcattttgccacacaagtaagttgaagtcaaattgaggcaaataagagaggtgtatgcaaaggagtgattattatgattgatcaaggaacttaagctgtttaaggaaggaagacaaaacgtgaagaaagtagggatcattaaaagggggtaggatcaatagattaaaagtttcagggggaggagccaagatggccgaataggaacagctccggtctacagctcccagcgtgagcgacgcagaagacgggtgatttctgcatttccatctgaggtaccgggttcatctcactagggagtgccagacagtgggcgcaggccagtgtgtgtgcgcaccgtgcgcgagccgaagcagggcgaggcattgcctcacctgggaagcgcaaggggtcaggg

SEQ ID NO: 42512 - DNA, 2300 bp, Homo sapien
ttggggtgtctgattaggtatatttttccttttgccttagaaccatttttttttccagtccctttatgtccccactgtaatgtcatgtgtatcatttatgtaagactgttttgaaactttgtgtacctctgaatgtctagcctggaacaattgtcacattaccttcattacatggcttttaatatgtcttactcattggtaggtcaagtcctctacttctattctcttaatttgtcttggctattttggtccttagcatttcactggaaatttaggagcaggtttatctatagacttccttggactttgaatttaaataatcattttgattgcaaataagggcagttttgactctttcactccttacatgttatttattgttgtcttgtttcattgaattaactaggctgtctagaactgtgttgaatagtaggagtaatagtgagattcttgttattcctgatattgaagaaaatgcttctaaagagaaccctattcctttttgaggagtattatttaaaacagctcagcatttccatgtgtttgattttagcatattaaaacataggaaacatgcagtgaacaaaaggggttattatgagcttagtgtaccagctgtcttaaggttttcattgttttagaggcatttagttagatttaattctgactccaaaatgaccgacctctctggagactgtattttgtaggagagaataagagtatttccattttaatggaaaagtggcaaagcttccttccacttcgtaatttttgtggacagtattccagcattgtccaacagatttttgtgataatggaaaatgtatttctgcactgtgcacgtaggagagcaactatcatattggacagtgtgggcctagactttggagttctaaccatgccccatttactagctgcacaggttcctgcctggtttcagaaggcttattcttttgggctagcacagctcacactgaggcacgtggctgggggagtagagcagtccttgctggattgcagccatggctctccttttagcctgatgcctttgtgcaagtgagcagctggcaccattgacaagggtgatcctggtgactacctctggaggctctggaccctgactgctgaaacaggagaaaaccctggccccatgcccctaagaagtcacccgatcaaagtggagcctgttgtttccctagtcacaagtcaatactaagagatttggctagtgacaaggaaatttttcatgttagaattcttgtacccagctctttttagaactggactactgttctcccatattcaggaggccatgaaccaaccagtagattgtttattgtgcttgctgatttatgaaaaaacttctttgtacagagcttctgaaaggggtaagagaaagggagaatagcagtgttatggactgaagaatgtgtctccctgaaattcatatgttgaaatctcagtccccaaggcgatggtattaggaggtgattaggtcataagggctccgccctcatgaatgagattaggggccttataaaagagaccctacagtcggtgtgttgactcacacctgtaatcccagcactctgggaggctgaggcagaagatttgcttgagctcaggagtttgagaccaacctgggcaacacagcaagaccctgtgtctactattaataaatattttaaaaaattagcctggtgtggtggcgtgtgcgtgtagtttcagcttcttgggaggcttaggtggcagaatcacttgagcctaggagtttaagtctatagtgaggtagatcgcgccactccagcctgggtgacagcaagaccctgtcctaacatgctcttaggagtttcataaatgtgaccccagaagagctctctagccctgtttccacttatgaggctaaattgagaagatcgcagaccacaaccccgaagaggcctcatcagagcccaactttgttgtcaccctggtcttcgacttccagccttcagatctgtaagaaagaaatgtttgttgtttaagccacccagtctgtggtagctttcatagcagcctgaactgactaagacaagtggatagctgtctggttgttttagaaagcagggctgcatggtgtggggatgctgctgctactcattcctgctcattccagtgttctggaaaatgaggtagggtgggggaggtctgaaccttctaatttatttctagctgttcttttttagcaattaaagcattcgttggacaccagttgcttttaattcagttccatctgcactgtacttaatagatattactcc

SEQ ID NO: 42513 - DNA, 2300 bp, Homo sapien
ccccgctctgggcgactgccgaggggcgggcggagggccgggctcggctggcggtggggcgggggccgccgggactgggcgcgcggcctgaagccagcccgggggcggcaggagagggacgcgcggcggcagcgagcgcaggtaagggggccggcgcggcgtgtggggacggcgccccctgggcgcgaagccagaggccgcggcgactgctcggcccgccacacggcgcgctgggctcacactgtcccgccgcggacgggctttgtggttgggggcgcgcgtgcgagtgccagtgagagtgtgggtgcgcgctgtgggccgcggcgcgggtgggtggccgtgcgttcttgcgagccggcctgcaggaggcgaggctcccctggcctcccgcacccagcggcggaccgagcccctggagggaagttgccgcagccgcccgggccgccggccctcctgtcccgcgccaggtcagtgcgccccggggcccgcccagtgacacgtaggtggcctccggttacctgggtcggggtgggtgcgcgggagggcttgcgaggggccctcgaaattctcccaaaacctcgtcccgctggacttgcacctccgaggggtccctgcgcccctggggctccgcacctctcgcttcccactgacgactcggttgtcccccaccaccgggctgaggacttttaactaagtttctgtccagccgcctaacaaacgtgcttaacaagtaacaggaggttgtaaggcaagggagggacctggctttgaaagttgatggttttgaaatcgacggctcctttgacttgcgtaggactcctttgtggtgaatggatttaaagtttattcttgtttttctttgctgccatttggtctttgcaatgttaagagtgaaggcattcaggacttgctgctgcctgctgtctggggcctgaggttgtggctctccgcttctgctctcctctcttcatttttgttgaaatccgtggattttttcataaatgtgggtgctggcttgtttcactatggacgcgtcgtttcctatggggttagatagatattggtaaacataaatattgaaaatgtgatgatcacatattgatgatcacagcgaaatcctctattccttcaggctctaacagtttgtttttcacgtatttgcataagtgtgtttgctcagctaagcataattggtaagccagaggtctgtgattcagagtctgcagttctggttaaggggagactgtacacttggaaaatgcgaagttttttaagaagttattcccttgccggatagaagagtgggtcccaaggaaaaagggtgtattttagaggtatggttatttgaaccaaactaaacatcattaaaatacacagggaggtagaatgtcacctagttctttctgcccttgatttccatatcccagtaggagcgagtataattgccccaaatgcaaaattatgaataataatcagcattgtaagtatattaaggttgcatttttttcttgatacttgtctgatttgaggataaaaacaccaagtggcaagagaaggaggtagcttgaggcaggaaggcacgggcgaggagcgaggagggaaggctgggttgtcatcatccgagcccgcaaggtacaccacgtcccctagcggcgcgacctcagccagtcgggtcagctcagatcctggtctccgtctccccatccggaaaatggaaggggttggtgatcgttgctgttccttccagcttcccaaatagcgagaaaccggtgggaggttatcttattgtgttagagcagtaggaaaaggtaggagggggaagtgagaggtccagagggccaggaagatggaagaaaacaagcaacagaggatgcttggaggagaaaaattcttgagctgggagctcatttcctcttttttttttttttttcctttcctcaagggactcaataatacttcccccacctcagatcaatctcttgttacctttattatttaaagcttgtgagtttgcttagctaatgcactagggtgaggtcaaggtgatccttgcagtctgacttctactaggcatcacttgactcatttgcatcattgtctctcaagggaacagctcctgcccaggtctgtgggcactcagcatggatttcagtctccctgtgagtgatgggaaagaactaacagaggtaagaatgtaagtggcagccctttcgaaacttctatttttgttcaaacctaatattttccaaaaagtgatttgatttttttgttgtttcaaattataccgtaggctgcaaggt

SEQ ID NO: 42514 - DNA, 2300 bp, Homo sapien
aatatttcttatagtttggtatcaacccctatgattatttgtgagataagggagtggtttgtattcatgggtatacatatctatacacatttctgcatgccgtacacaaacataagtagcattgtgcatgaacatattagcactgtgcatgtactaaaatttcaattttttcacatagtaggttataaaataaatcatatattcgtaggaaaggtatagaaagcaaagttatttaaagtggatttttaaaaaagatttgaatgattttttttaaaaaaaagattagaaccattgtttttaaaaggaaacagctttagatagtaaattatttacagccaggactcagccctgagcatcctgtgaaaaccacacgagcttggtcaaggttctaagcagtcaccggtgggagatggtcatggtcccgtcacagcataactcacttgaggcttgaaaagtttccgtccagctacggtttgcagtgacctttctcttctgcaaagcccacggttacctggtggccaccaccaacatagccccgcctcgctgtcctgcgtttctctcaatcagatcagtcctgccgagtccccatgccttactgctggtgtgctgtgtcctctgtgccatttcaaggcgagggctcatgaaacttttactcacacgctgctatttttgatatgcggtggccttagctgtggagcgagaggccgataattgtgatcactccggaaatcctgggaagccagaagtgggagatgggtgttgtgaggtggcgtggctagggagaccccatcgagtgggtgtgttataagacctgggcgaatccctgtggctgccactctcctgagaatgttccctaggccttagtcccgcgccgctcccacccacacctccaggtgtgcagtccccgcccttaattactctcactaaaattgatagtttacacttgcaaagctacactgggaaagcggaagagaaatttataatcgtggatatggagaactaggggagcagacacacttgctttcgtttacagatccagtgaagtgaaaaatcagaactagaaacgtatgcaccttcctagcagcaaagccgcttctgcgttcttcgcagcctccagtgcagggcggcgctgggagaaactttgcgccttctggaaagtttagaaagtgagccacgaaagagaggccacatttccggggttttgcgggccccgcgatgttttccagagcttttcgagtgggaagaggagagcgacaacgtgaaaatgccccgtgccggggcgtccaccggagtcctgccagctgtccggcgctggggtaagcgcaggaggggcgggggtgggacccgagctggcggccacgggtctcccgctgcgggtgtgtcgactcgggggcggggcgggggaggctgctgagataatgaatgggaggctaaggccaccccccagccccggccctgccaccaccgtgggctgtcgagccaatgaatggaggagggggcgcagaggtcaggggcgctgggggcgccacaccaggtaaggggtccagcttgggagcggggagggcggactctgggggttcgggtgttgctgacttgtgctacgtggaacaagcagaaaagaaggaaggcggaggaagagaggaggctggcgtcggcgctgctcctctggccctccctctgcgccccctcctcctgccagcgcgccaaagccgggcagtaggggccgactggcggctgacgctccctgagtggcgactccgtctccagccccgctgcggagcgcgggccggatctggggcggccagggcccggagccgcggagccctccccgccgcccggccgagcacgggaccccggcggggtgggcgcagggggcggccccgctctgggcgactgccgaggggcgggcggagggccgggctcggctggcggtggggcgggggccgccgggactgggcgcgcggcctgaagccagcccgggggcggcaggagagggacgcgcggcggcagcgagcgcaggtaagggggccggcgcggcgtgtggggacggcgccccctgggcgcgaagccagaggccgcggcgactgctcggcccgccacacggcgcgctgggctcacactgtcccgccgcggacgggctttgtggttgggggcgcgcgtgcgagtgccagtgagagtgtgggtgcgcgctgtgggccgcggcgcgggtgggtggccgtgcgttcttgcgagccggcctgcaggaggcgaggctcccctggcctcccgcacccagcggcggaccgagcccctggagggaa

SEQ ID NO: 42515 - DNA, 2300 bp, Homo sapien
gttcactctctatttaactttttaaaagtttgatataattggatctttgggacaatatccctgaaggatctgaaatttcaaacctctatatatcttagctcctgaactttaaattgttcagggacaacagatattcccccaaaacaataaatgatttaaatttacctaatatttcagttgctatcctttggtatttttagttatggtggtaagagttaataatttcaaaagaaatgaatcgcactattgatttgtacataatatttaacattttaaaatatgaattaatttattatttcttggacgtagttaactttatgaagtgcatcataaaacaacgttttatttgaagttgctgatacggaattcagatgggaggaccaattcttcttggctactattaaatacttttgaatatcaaatctcaggtaactgggctgattttttcacttaaaaacttgtgcttgttagtcttaagagtagcacaaaaattaagcttctttgaagtaatgttttataataatctaataaattttttattattagagaaatctattaaatataaaatttggcagagaaattcataagatgaaagcaatttttaagaacatgtatatatgaaaataggaaagactcagtggagaaagaaaacggttgaaggtttattaaaaggcaatatgagtgcagaagcaaggtaagttttttgtaataattttttgttaataatgtgaaatgtaaggaaaaaatatacaactttaagtttctgactgtcctgctagaaactagttttgccctgcagcgacccctctgtgggaatctcattgatcacaagtgaaattctggaagtgctaaagttagtttgctcaagttcactgctcatggatatgatcatgatggtgggtcaacattcttctcttgccaattccaatgtacttatttataactatgtgctctgtaatcttatttttaaagagatcttatggtaatcttccaagggagtttagtttctgcatttcctggatatatgggttttcgtatattgcctggctataatttttagagctctttacaaactcacaaagatatggggctcaacaatgaatgaaattgtacggtggatgtattagtattaaacgtattagtattaaattgtgtgacataaactggctcttaaatataatcacaaattagtatctacaatgcttcaagcattgttgtcctttttgaaaccagtgtacagcccccccaaactgttagctggaaagggcagagttcatttagacccagagcttccgactatgaagttggtttaaatttttttttcttttttttgagacagagtctcactgtcacccaggttggagtgcagtggtgcaatctcggcttactgcaacctctgcctccctgtctcagcttcagcctcctgagtagctgggaccacagatgtgcgccaccacatctggctaatttttgtatttttcgtagagataggatttcaccatcatgttgcccaggctggtcaaactcctgagctcaagcaatccacccgcctcagcctcccaaagtgctgggattacaggcatgagccactgtgcccggcctaaaatttatttgtttctttcaaggttcctcctcttcttttagtgaagatcaatattgctttttattgtacatttgagctttcttttcctcacttatctggattacttttctgatttgagctcaataacttcttcaatgtacattcatatttttcctcattcggtcactttcaaatctttattaaagacctactgtgtgccaaggataggtttaggagctcagtttcaagtattaaatatgtatattcttttttcaaatttgctgttttctaaattttgttgtggaagaatcaacttatgtacatcaacctgctcccccccttacatcaataaacacactatcctgtgatttcttgtagtaaaattgcatttataatagtgaaaataagtttgagagtattttcctaactaaatgaatatcacactttattcatttctttatgtcctcagattaaatgaagggaatagtactggaagaaatatagatgaaagaaagaaaatgcaaggagaaaacttcaccatttggagcatttttttcttggagggattttcccagtacccagggttagaagtggttctcttcgtcttcagccttgtaatgtatctgacaacgctcttgggcaacagcactcttattttgatcactatcctagattcacgccttaaaacccccatgtacttattccttggaaatctctc

SEQ ID NO: 42516 - DNA, 2300 bp, Homo sapien
aagtttattagcagggtctctttatcctgaaatgaatggtcttgttaccaagtgttcagtaagcaactgaaatccctgtttcagtgaaaaactcattactatttggacaattttcagaactggacatgtatttcccaaagattaaatgaacagtaaacctctattattggatgaggttgcagttagtttggagtcccctgacagggccttaaccttgggatgatactaccctttacacttgatcttagccaaaaggccaagaagtgatgatgctaccctttaagcttgccttgtgttgggtcctacagtgcatcctgctgaagatcttagtattcgttttttttttgtttgttttttttttgagacagggtcttgctttgttgcccaggctggagtgcagtggtgcagttcttgcagcctttacctcctgggctcaagtgatcttcctgcctcagcctcccaagtatttgggtctacaagtgcatgccacgacacccagcaaattttttttgaagaggtgaggtcttgctatgttgcccaggttggtctcaaactcctgggctcaagtgatcctcccactttggcctccctctcaaagtgctgggattataggtatgagcctccatgcccagcgacaatattattgaatgttataaaaagtactgttgattatttgtgattggatatgtctagaatcagttaaggttctctttgagccctgtcatcctttgtgtgaacttatatatttgctatgtttataggaagggtttcccagaagatacaaatttgcaggtggttttatttcttaatattatgttatagactgccatggaagtccactaatatgatgccataaagagtattaacttttccttgataggtagagaaagctaaagtagggaattatatgagaaagatgatacaaacataaagcagtttattttaatataagacatagaaggttgttaatagaaatgtgcatttattgagaaccaaggccttttctttaggaacttaactgttacacattggcttctcatatatatctacaatttctgggttttgtttctttaaaacagagaaagaaatttcaagctcttatgagacaatcctagtgcagaattctagattttttattgcctccccccatttttacatttgtttgagccctactaaatcctacagtaattaaaaataacttcgttgttgagttttctgctgattcatcagttggcataatattaattatatagttataattacagttgcagttggcataacaggtttataataaagcactgttgactcttggtaaacctgcaatttgcagaagcttgtgagcatctagagaggagcttctggcctccagagttctttctgtggctgtcattcagggagttttgaggggcaaagggagtgtggttaaagtgctttctcagttccatggagaaccatatgccttgaaagtgaatatttgtgaacaattatattgcacctttgtgggggcagtttctgatcaaggaaatttgtttggggattgagtacaaagtcatgctgaagtttttggggaaatttcaatggctttaattaaaagtatttattgttttatttctctttttcctgcttttctctctcttatcctccccaccttctctctttctctttccctcttcctttctcttgctctctctgcctgtccctcatttattccatctcttgttcttttatactgtctcctgctctgtcccaccttgtctttttttcccaggttgttatcgtcaggagctgtgcaaactgatgtgtgaacggctaaaactcagcacgtggaaagtgcagctaggagtcctgcaatcaatgaatgccttttttcaggggtaaattgcttcatggctcagttttttattttgttcctccccgcagcattttatgtataatcaatggaatttttatacatttaaaaactggtagctaaagtgacagtgatacatacagatagaaattgtgacaggaaagttttagactgtttcttaataattggcatttgtaccttgctttctgatttgtataggttaatgcttttggaagaagaacatgccgatcctgaggctttggctgaaattctgcttgaaacttgtaaatcaatcacatattctttaggtgagtgtagtaaactaaaactgatgagggagtcctaattttaaagctaaggagctgagcttcaaatatttcctactttgtcttaggaactaaatttctgaaatagctactggactctgctacttattatactccatgtgtac

SEQ ID NO: 42517 - DNA, 2300 bp, Homo sapien
agctgcagcaggttatccagaagatctagctaagatcactgataaaggtgtctacactcaacaacagattttcaatggagatgaaatagccttttgttggcaaaagataccatgtaggattttcctagctagagagaagtcagtgcccggctgcaacgcttcaaaggccaggctgactgtcttgttaggggccaatgcagctggtgactaagttgaagccagtgctcatttaccattctgaaaatcctaaagccttaagaattctgctaaatctgctctgtgctctagaaatggaacaacaaagtctggatgacagcttatctgttaacagcatggtttactgagtattttaagtccactgttgaggcctactgctaaaaaaacaaaaacaaaaaacaaacaaacaaaaaaataacaacaaaacaaaaaccaaaccaaaaaaaaccccaaagattcctttcaaagtattactgctcattgacagtgtgcctggtcacccaaaagctctgatagagaggtacaaggaaatgaatgttttcatggctgttagcataacacaacatccattctgaagcccatggatcaaggtgtaatttcaactttcaagtcttactattcaagaagtatattttgtaaggctagagctgccattgatagtgattcctttgatggatctgggcaaagtaaattgaaaaccttctggaaagggcttaccattgtaggtgctgttaagaacattcatgattcatgggaggaggtcaaaatgtcattaatagtttggaagaagttgattccaactttcatggatgactttgaggggttcaagatgtcattggagaaagtcactgcatatgtggtggaaatcgtaagtggggcctgaagacgtgactgaattgttgcaatctcctgatgaaacttgaacagaagaggagttgcttcttatcgatgagcaaagaaagtggtttcatgagatgcaagctactcctggtgaagattctgtgaacattgttaaaatgaccacaaaggatttagaatatttcataaacttagttgataaagcaacaacagggttggagaggattgactctaactttgaaagacgttctaatgtgggcaaaatgctatcaaactgcatctcatgctacaaagaattattttgtgaaaggaggagttgattgatgcagcgaacttcattgttgacttattttaagaaattacgacagccacgccagcattcagcaaacaccaccctgattagtcagtaggcatcaccattgaggtaggaccctccaccagcaaaaagataatgactcgctgaaagctgagatgatcagtagcattaagatattttaaagttaactaatgtactttattttagacataatgctattgcacacttaatagactacaatatagtgtaaacaaaacttctatatgcactggtaaactagaaaattcatgtggctttctttattatggtggtctggaacagaacctgcagtatccccaaggtattcttgtatgatcttatgggactactgctggacattgtggtctgttgttgttgactgaaatgtctcatgcagcacatgactgtaatacagtggcaggggggaatagcggctgtatgtatggaggaggtataaatgaaacaaaattggtcaaatgttgctaattgttgaactgggtggagaatacatggaatttcatgcctactataaattcctaccataaaatttcactataaatataaattcctactataaataaatacatggaacttcattcctactattaatgaaggtaggcttttcctacttcatttatcattctacctacctctatatatgcttcaaggtttctttaataaaagttaaaaaaagtaatgcccagaccaggctctgcaaccatgtgaaaatatgctttaatgcagtgaactgcagaacatcctcatggttagatttgtaggtcttctcacttttgttaaaaggactcaggagttgtgttccatatgtttgtagcattaacacccttgtgaagatcagcaaaagtgcaggagccatgttgaaaccgcatgcaccaaaactcattccagctctgctagagtccttaagtgtattggagccccaagttctcaattatttgagcctccgggcgacagagcaagaaaaggtgagtggatagcgcaggcatattggtaagtatcatgagggaagagccctgttaagataccaaggttcatttgaatgacactgtcactactgttaccagaactcaccctctgtcaccacatgcagtgt

SEQ ID NO: 42518 - DNA, 2300 bp, Homo sapien
taatgtggccccttcctgtctctcctgtctggtactaggctgaatatgtttctattcttggtggtaggtacttgagggttcagctttgaagactcaatgagttttgcttgctccaggagaacatgtggcacttttgggtcagccaagatctagtaggccagtgggctttgtaggtctgagctcaggacacaagcctagacccttgagacgtgagtgtcatctctataagtgaaaggattaagccacaagtgtggatgagatcatccatggagaatgttgagagaagcagacataggaagacatcagtttgttatttacctctttgtcttggttttcttacatgtaagtaaggataacaaaacctttcctacctacaaaagtggaaaagccgtaaatttttgagaatgtcagcattggtataagactgattctaccattattttgtcattattaccaagttgctaagtgtatatcaaaacagaacagaggcttaaaaagtaaaactcatctttcattctgaacagtcatgaaccaggcactgggtaaggtactggggataaaaagatgagtgagactctgtccctcaataactgcactgatgatgagtgagacactgtccctcagtaactgcactgttgatgagtgagactctgtccctcaataactgcactgacgatgagtgagactctgtccctcaataactgcactgatgatgagtgagactctgtccctcaataactgcactgacgatgagtgagacactgtccctcaataactgcactgacgagtgagacactgtctctcagtaactgcactgacgatgagtgagactctgtccctcagtaactgcactgatgatgagtgagacactgtctctcagtaactgcactgatggtgagtgagactgtgtccctcagtaactgcactgacagtgagtgagacagtgtccctcagtaactgcactgatgatgagtgagactctgtccctcaataactgcactgatgatgagtgagactctgttcctcaataactgcactgacgatgagcgagacactgtccctcaataactgcactgacgatgagtgagacactgtctctcagtaactgcactgacgatgagtgagactctgtccctcaataactgcactgacgatgagtgagactctgtccctcaataactgcactgacgatgagtgagactctgtccctcaataactgcactgatgatgagtgagacactgtctctcagtaactgcactgatgttgagtgagactctgtccctcagtaactgcactgatgatgagtgagacactgtccctcaataactgcactgatgatgagtgagactctgtccctcaataactgcactgatgatgagtgagactctgtccctcagtaactgcactgatgatgagtgagactgtgtccctcaataactgcactgacgatgagtgagactctgtccttcagtaactgcactgtcctgtacaataactgcacccgacccccttgagggtctgcagtatagtgaaatagtacagttattgtatgattttgtgtgatgcttcttcagaaggtgctatgggaacagagaggagagtacccaagctaatcttctctgggaaaggatggctaatatgaaccttgaaggacaagtaggagttagccaagcaagtaggacctgggaaggggattgtagggagaggtggcatgtgccaaggaatggaggtgagacagaatatggtacttttgggtctggatgagtcatggaaggctttgtgtgcatgcctgggtgaatggacttcattctcatgcactgaggaaaataaaagcatcaaatgtacattttagaatgatcacctggcagctttatagtgaccaaagtgggaagagatttgtgggctgagtggcctagagagacatggaggccgtaaaatatagaaacatggtcagtgtggttaagtgtggttaaccagtgtggttaagagttgagtaatttgattattgatggattttgcattttaaattttatccttttgctttcattaggtggataaatatttgaaagaaattcttcaagatttggttaagaaccttacaagcaatatgtggcgagttcgagaatccaggtaccgtttttaggaatataagtttagtcaaataaaactgaatttttttcccttcaaaatttctaggttttatactttgtgcaaaaggaataaattaaaactactaaaaagctggccgggcgtggtggctcacacctgtgatcccagcacatggggaggctgaggtggg

SEQ ID NO: 42519 - DNA, 2300 bp, Homo sapien
aattagcttggtatggtggcgtgtacctgtagcctcaactactgaggaagctaaggtgggagaatcactggagcctgggaggtccaggctgcggtgagctgtgatcatgccactgcactcccgcctgggtgacagagctcgaccttgtctcaaaaaaccaaaacaaacaaagcaaaaaacaaagcaatgaaagcactctattttttttctctacatttttttcctacatgtttttataaacagagatgatcctattatgggaacaaatttatacattaaaaaaatactactctatcccctgttaccatgttgtctttccactgaataaatgttggcaaattgtcaactagaagatatcgtacactttgattttattttgccgtcttaaaaaaaaccttgagtacatcactggttgctttgggtcgtaaggataatggtatgtaattctctttttggctaaatgtgcttacaggctcatttttggacagtacatcacccctcctggcaattgctgcctgcacagccctgggtgaaattggcagaaatggtccacttccaatccccagtgagggatctggctttaccaaattgcatcttgtagaaagcttactaagtagaataccttccagtaaagaaacaaataaggtaagtttttttcttattttttccctttctggaattcggtctttctatgcatacatgagcaaaaacagattataatgagaatagatggcattacagctggaggaaggatttaatgtaaaaatgggtgataaagaagcaagtcttaagtgtttacttttgagctagaggttatctgtgtacaatcttagtgtgcacatcttttggcccagtcattccaatttaggtctttataactgttaagatttgagtgaagtattaaattcatcaggaaatatcttttgtcatgcaaaaggtgtataataaaatgttaagtaattttgtgattttttttttattttaggccaaatataaatcctaacctcctaaagccagttttgtgatcaaaacacctcaattttgaggtgtaagatgatttaatgagcagaaatatcagtttactactacaagtttaattgatataatctttttttttttttgagatggagttttgctcttgctgctcaagctaaagtgcaatggcgtgatctcggctcactgcaacctccacctcccaggttcaggcaggtgattctcctgcctcagcctcctgagtagctgagattacaggcgcacgccaccatgcccagctaatttttgtatttttagtagagatggggtttcaccatgttggccaggctggtctcgaactcctgacctcaggcaatcctgcctgcctcggcttccgaaagtgctgggattacaggcttgagccaccgagcctggcctaattcctataatcttaatcttggtctagctactgtttaaaactttctgagaagatatacagtatagtttttattagctattaactaatcattgccaaacattgttaagcacttctaatgtgccggagagtatgttaagtgctttgcatgcattgattgaatcttctaaaaggtctagtgaaataggcacagttgtcatctctatgtgagataacatgaggaaacagagtcacagaggggaaataacttgcttaaggtcgcacaccagtataggctgaaatggttgagatgtgatttggtcctaggtcctctgggcccagaacccacattttaaatcgttatagtttgaaaggtaataagcctagttaaaggctttcttccttcttcttttgcagctgtggatccttagtggactcacatttgtgtgtttctaccttcaatgacttacagacatacgactgtaaaatttgatgcttttgtaaaaacttttgcgttgatgtgttagatagactgcgcttccctgtcatctcattttggaaatactgcactggggtaaagctattatatactctgtttaaaagaaaaaaatttggtgttcttccagatgaaagaacgagcaatccaaacactgggatattttccagttggggatggagattttcctcaccagaaactcctcttgcaaggtctgatggattctgtggaggtatttatattgctacctgattgttagttattcagagaaaaggcattggtcttttttttttttttaggtgcagttttgcatgctgtgagatttttaattaagcatttacttgtttattcaccagatacttgagtactagttttgtgctcatcactgtgctaggtatagcattgactaaatcacct

SEQ ID NO: 42520 - DNA, 2300 bp, Homo sapien
tgttaatttgaattttggtttattttgaatttatttgaaaattactaaaagttgtattgtttacaatgttggtctatgaaatttagaagctatttattaaagaaagtatggctcttgatgtgatatagacctgtactcatatacctatatatttatatagtaatataaatattacatgtatatatctatataatatacattatgtagatatatatgtgtaatatatgatatatagctaatacagaaaatggttatgaaatggtcaagtgtaaataaagcaaattatatgattgcgtgtgtaatataattatatatctaaaaacaagccctatgtaaggagaaaaaaggctgatgttgatggtttgacatatgtattaatattttattaaatatggagtatcattttatatctaatatatttttaaatgaggtataagttgcattttatattaatgaattatactactgcattttctagagtgtgtaatgctttttaaaagaatgtttaaatggttttgaaattgggacatgcctttaaaagtcatgtacatataatgaaatatatgtggacatattaaaacaactcttttcaaatctgttatatgtcttacagtcaatgccatcttaaaatccatgcagcattctaatctatttcataataaaccattactacatttaacgtttagaatttttgcatcccttaagtgagattcttgtatatgtttttcttttttgttatcagggatagccttatttggggagatgaaaagcttcatttattctgaggaatagtttaaataaaattatgcattctgtgatgatttgaacacccttgcccataaacttttatggtccattttttaaaaatgggtaattccttgataactgtttcagtgttctagttggccagctgtgtgcccctcatgccatttattttctttactataagttgtatatattttgctgttatttatttggttggtattttaattggacatcacaagttattaccaggtgctggtttttgacttctgatcttggctgctgcttctcatagagcacatttcaatctggttaaagtggctttggattgttaatgttgattctggtgctctgttgcttcttaatttttttacgttagtttcccaaccaaggccagatgtactggggcctggcagccaaggtgtcagttcatgttagagcaaggatttaagtctagggagttggacttccaaatagagctcttaactgctgtatcttactctgtaagtgctgaaaattgtttttgtttaagaaaccaaaaacaaagcataactaattcaacagttttccttcttaggttagaaccattcaggtcaaatgaaaatcctctgacaacttaaggaattatttattaattctttcttttcggccctttatgtgttgtttggaaaatgagacacaatcagaggcaattgaagaattaaaaggcctttatgtggtatctggataagactattgctgagatcagtctctaggtggtctgaaattggttgggtttatatttttacactttaatgtcacttatgagttattagttgtacagaattgtagctgaatacatagagatgtaagactttgggtggagtgtgtagaccactggatagtcactgacttctaaaatatgtattatagttgtttatggtttaactctacgaggtaaagcatacacatagatatttacataataatttacttaaagtaccctatcttgttttttaatgtgagtcaaattcaaagatgtaagccagatgagtccccggacctcatgcaatttctgaaaagaagtgatttcttataatgtgttatgttgactctgcttagatagccaagaatgtatttaagacattttctgagaactctagctgccaaataaaattgctgttcttattcttcaaatgatcatttcccattggtgacatttattttttattcttatttgtctttttctgaaagacgtgaagaagttcatggagaagcacaacgcgtattaaggtgtcttccaggtagaaacagaaaagaaagtacttctgagcagatgccttccttcccagaaatggtttattacatccaagaaaaggtatggcatgcaacttaaggtaattagtctaaatcataatggatgatgaaaataaaaacatctttaaagtgaaaaatgtaatcactagatgttgactcataaaatttctttttcttttcttttcttttttttttttgagatggagcttcgctcttgttgcccaggctggagtgcaatggca

SEQ ID NO: 42521 - DNA, 2300 bp, Homo sapien
tattttcattgaaatcatagagtatttccttcacactcacttgcttttctcttattgcattagaattttactataatttatgttaaaatgggctatcctcgcctaccagtggaaaaacaatgtgaactggcccctacgcttcttactgccatggaagggaagcctcagccacagcaggataggtatgatttcctcaattaactaatttccctcctacaggagtcaacaactgcctttcaaatattaattcacatatttggttttacttgagcaaatgggaggtcttgagctgttttagctgacaaataatagaattttccgtggtacctcaaagttaccgttttgttaatactatcataaaatttcttgatgtgaacattgaaaaatgtgcagaactaacatttatctaagtctgtgcatttttttggctagttatcttgaagcagttaattttatgtgattgcaaaaattagaattaaaaatcctttgcatcaaaacaattctatcttggaagatataaagtttcacagtggttttcctaaggaacagagcactcgtttgtattattttgggaagtggtgcggtgaaaagggttttagataacatcatttgtttctaggcttaggcaaaagttctttgttctagctctgtcatagtgagaatcatgatgaagagtgcagaaatgtagaggaaagagatggagttagatcatgttttcagttcaccttttagagcatattcattttttaaaaaatactgtaatacagaagaagtttacaagtaaaattaatagacattacaagtactgtttgtaattgttgtcagatgttttaagagtatcaaaaggtgttaatgaaaggaattactgagacctgttacttaaattcatgcagtggaaattttaatgttgtattcaaaatattaatatgattgatttttaatttttagaataactttagttgtggaaaataatttttttttttgagacagagtctcactctgttgccgaggctggagtgcaatggcgcaatcttggctcactgcaacctctgcctcccgagctgaagtgtttctcctgccttagcctcctgagtagctgagattacagatgcctgctaccatggccggcaaactttttgtatttttagaagagatggggttttaccatgttggccaggctggtcttgaactcctgacctcagatgatctgcccaccttggcctcccaaagtgctggggttacaggtgtgagccactgtgcctgaccgaaaataattctttttttttttaatttttattttttattttttatttttttatttttatttttgttttttgagatggagtctcactctgttgcccaggttggagtgcagtggcttgatctcggctcactgcaagctccgcctcccgggttcactccattctcctgcctcagcctgccaagtagctaggactacaggtgcccgccaccgcgcctggctgattttttgtatttttagtagagacggggtttcaccatggtctcgatctcctgacctcgtcatctgcccgcctcggcctcccaaagtactgggattacaggcatgagccaccgcgcccagcctggaaaataattctttttgaaaagacaagtaagttgaactttacttaaggtttcatataaaatctcttgtggaaacttcagatattaacactgagcccatttgatgtatttttttcaggtaattttagtcatgagccagattggctaaatgctaatcatcactcaatatactgagctttcaataaaaaagaattctaggccagtccctagattaggactttgtaaattagtagtgttgaaaaggaatgtctcttgcttaaaactgccagtttttgttacgtgatttttgttttgtctgtgttttgcatgtataaaaatctcattttttaagtagttgcaataaatgtaattgttttttcagcttaatgcatcttttaataccaaccctttttcacatgaaataccctgttgaatcatcaaaatcagcttctccatttaatcttgctgagaaaccaaagactgtgcagctgcttttggacttcatgctagatgtccttctgatgccttatgggtgagttaaaaaataaaagcaaccttgttcttgactgcttttactacggggagttaagtactattttaaatgattaaactctcactagtaaatgaatgcatctcaacatccatttacgtttacaaagatttttttcttctaaacttcagctccactgcttatcggctttacaaatgctgagttg

SEQ ID NO: 42522 - DNA, 2300 bp, Homo sapien
tcgcttgaacccaggaggcggaggttgcggtgagccgagatcgcgccattgcactccagcctgggcaacaagagcgaaactccgtttcaaaaaataaaataaaataaataaataaatgaataaaaataaaataaaataacaaacccattgttttttactcagattctgtatttatctggggtggctttggaaggatccatttgaaattatgggaagtcaaatttccccaaaccagtctttggtgcagctactttctatagtcacggaaacagtaaggaaaggttgaatgcaccaaactgttaatagggattatttatgggcatgagtgggatgaggggggatggtgggtatgcagttgggagaagacctgtatacacctctctattgtttgtaagtagttcattgtgtatttattttggaggcaacatcaaataaaagaggagcatacatgaaaaaaggggttggttaacttagtgtagtatgaagttacaaacaaaaaagggtgatggtagtgcagtgttttgaattaacatggaacaatgtgtgtgaaggaataattgatccagaactttattgtagaaacctgtccccatcaaagccatacatggggctgtatatatatgtccagagaaaaggtcttctgcacacttaactgtaactgttagtcataatttctctgcagagtgggatggtggggctaggaggaaggactttcacttttaattttatgatactccaaatcatttgcattttttttttacaaaaattatgtataatttttcttttttttttctttttgagacggagtctcgctctgtcccccaggctggagtgcagtggtgcgatctcggctcactgcaagctccgcctcccgggttcaagcgattctcctacctcagcctcccgagtagttgggattacaggcgcgcgcctccacgcccagctaatttttgtattttttaattagagacagggtttcaccatgttggccaggctggtctcgaactcctgacctcgtgatccacccgcctaagcctccgaaagagctgggattacaggcgtgagccaccgcgcccggcccaagatcatgtataatttctataacaaaaacaataaaggaaataaaaatgtcttcagtgttgtaccttgtacttggcctatgttacaacaggaatgacatatattccatttttaagacattacttagggctttatagatttctgctttaaggaataaatgcaatttcaatctatttaagacttgatttcttcttatataaaaaaagtatctgatcttgtatctaatttgttatgacagtaccatcacttaaagtacagcaattatgcaacccctgaatttgaatttcattttgcaagtgtacatgacctcacggacaaagcgaaggcagaaagttaaaatcagcatatcgaaaataaatcactctagttaccgaaaagaacatagggtatctgaacaaaatctcagagctcacataggcatagatacttccatgtgaactttaggaatcttgccttatctaacttttgcagggctgagtggaccccctgctcccgctagccgttttgggagcaccagccacctccacaccagaactgggctgtcgggggccgctgcggcgcaggggctcgtccgggactgagtcagcgccggggccgagaagttcggcgggaggcgcagggcggggcttcctcccgccgactccgagcccggctctacttttctgagtccacgtctcttcctttggacaggcgtgtttccccaggtcgggcccagccaacgtgacagccgcagacctcggaaaagggcgctccggccccgcctcgaggatttcccccggccgctagggcagcccgggcccgctcggcccagcccctcacggactgcggcgcgcggctccccggggcccggcccgccgaacgcctcgctctacagccctcacctcgcggcgccgagcgcagcgtccgcggcatggagaccggctccgactcaggtcagaggcccgcccccgggccgcgggggactggccctgcgcgcgcggcggcgcggttaggccgggccgcccgcacaggccgccgcgtgtcgagtccgcgcggggagcgcacgcggggcgggcggcgacaggtgggcaggacgagccgcgagcgagcgagggcgggcgggcgcgcgaggggcccggcgggggggccgctgggaggatggctcagctctttctaaatataaaaccggcgtgagttgggcgagcgcggcgcggagtcgcagagccgccgcgcgggcctgg

SEQ ID NO: 42523 - DNA, 2300 bp, Homo sapien
cacttaaagttctcctaagtatgttttcctgtttagagatcccaccagcttgcttaccagtggaactgatttgtagtttcctgcttccttcctgatgcacagtccatcactccttaccatgatggttacttttaatcaaaagttatagtttgactaccagttccaaaaagatgccattctttcctggtaatttattcataggtagcatgtcatttacttacagaatatttcaactagtactgtgtttctcaaaatacaagatcacctgcaacaagttgatgggtggggagggccagaaggttccaaaatctgtattcaaataaagaacaccatgtgattctaaagtacagtaaagcttgagtaagctttactaagtaaagtgcctctgacttgcctggttaaaataatgagccaatagacatttcctattcctttgccttctccagcttcttcctgatgcgtctaaagccagccaaggggaggtgggtaaaggagaatatgccatgggactcgggactgagaaaacttttgtcttcattctcagccctgtttcttttttttctctttttttttttttgagacggagtttcactcgttactcaggctaaagcgcaatggcctgatctcagctcttcacaacctccacctcccggattcaagtgattctcctgcctcagcctcccgagtagctgggattataggcatgtgccaccacacctggctaattttttgtatttttagtagagacagggtttctccgcgtgggtcaggctggtctcaaactcccgacctcaggtgatccacccgcctcagcctcccaaagtgctgggattacaagcatgagccaccgcgcccggccattctcagccctgtctcttcagcttgacttgctgcctgtgataagcccactccttttgagaggagtggttcatttagttgagcttgctctgcccttttgaagtctcagggccttgaatcaccttgctccttcagtctagaatgaatctagtctttctctcctaactccaccccttcagggatcatccagttattagaaccctccaaacaatttttctggagttctttggccctttttgcaatgcccccaataatccatgcaaatactcattcataagctcaacaaatatctattgagtgcctgccatgggccaagtcctgttccaggacctaaacacacaacctagaacaaatgaaataaaaatacttactcttctgaaattagtattctactggagaaggcggacaagtagtaaaaaaaaaaattaacaaacctatagggcatgttagaagaggaaacaagagtaaggtgggattcctatttaagtggaatggtgggagagcttcattgagaagacctgaagggatgagagagcgggccgtatggccacttagggaaggagcaggtcagccggaagtacctggcaggttacaagaagaggaaggggtctatcaagattggagcaggaaagtggggaagaggtgcgggaggttacaggggctagattccatcaggccttgtaggccactataaagacttgggttttaactctgagtgaaatgggaaaccattgcagggttttaagcaaaggagggtcataatttgacgtttttaaaacgtccgtctggctgtggagaatagccaagagaagtaaggtataatcaagaagctattgcaataatccaggtgagccatgagggtggactggaccatgggggcaggtgtggaagtcataagattaatatgtgtttaactcaagttgtggcattaattatggcttgcattaaatgcatcggtaatatgcttctgcggtggatttttccaccttagatttcagggaatggaagtgatgggagcgggtagggaaggtctgaggttactaaacagatggagcctcctggatctgcaaacctcatacgattctaggcctctgagcctctggcgcagcaataattctgcagccgagcccactagccgcttcccagtgaccatgcgcaacaggcaggtgggagcctatggaaagcgcggactttcggaaagctgcacgagcgcgttcggggagtccggttcagcgcctctgcgcaggcgcagtggttcccgcaggcttgcgcgcgcactcgctgcgggacaagcttctggaagctctttgcggtggcgttggtgctgtttgcggatgctgatgcaggtactggtcgtcccgggccccgagtttcggggccgtggccgggtcgccggctccgagggcgcacttggggcgggatgggggccgggagcagcctac

SEQ ID NO: 42524 - DNA, 2300 bp, Homo sapien
tttttttctgaaaagacagaaaacttgttgtaagttttgttttctgaaaaatataatttatagaaagttgaagaaataacgtaaaagtcttcagaagaggcttgttccaagatgattactcttagactccctaacattcataacaatgttttatcccagtatccattgggaatctggagtataaactttttttttaaaggaatttattgaggtacaaattacatatcattaaaaccatttcaagtgtacaattcagtgagttttagtaaatatgctgagttgtgcaaccattaccataatccattttttagaacatcatcccagcaagatccgttattccagtttacagttaatctcccgtccaacctctaatcccaggcacccactactcagtcgactttgtgtctctagagttgtctttttctgtacattttatgttatatgtgatctttctgtgtttttttcattaatgtgttttaagttcatccatgttgtaacatactagtactttattcctttttatcataaataatattacattatgtggatgcttcgtgcattcactagttgaagaacatttgaggtttttccagtttttgcctgttaggaataatgctgctttgaacattggtatgcaagtgttttgaacgttagtgtacaagtctttgtgtggacatgttttcatttttcttaggcagatgcctgaggggagttgctaggtcatacggtaaattttcatttaacttttttaggaaactgccaaattgttttccaaagtgaccgcattattttacattctgactagtaatgtgtggggcttcccatttctctacagtcttgccagtcattgttgtctgttttttaaaaattatgcccatcctagcgtttgaaatgatattcctttgtggttttaactttgattttcctgatggcgaataatgtcaaagcatcttttatgtgctcttcagccattcatgtatcttagtgaaatgtttattcagattttttgtccatttaaaattggagtttgctgatactgtgttgtagtcctttttattctggatataagtcctttatccaatatgaactttctaaataccatgtactagctacagagagcagcccaaactctgttggataatatttatcaaagtcttgatttcagtagttaagtctgtataattgcctgcaggacattcagtctggcccatcacccaaatatttaaattcacttttggattaagtcagattatcaaaaggctttaaacgtcttttgattcattataggattgcttttatgaagagcactgtgacacattttactttaaaatgaagtccttgctttaaataatgtttcctcttaatgagcgtgtataaatttttttcatgtcacaggacaaggcaaggttttggtcaataaagtcattttatttattttagaattattttttaatgtagtaagatacatatagcttaaaatgaaccatttaaacactttttggttatacagctcaatagcatttagatagatgcacattttgtgcagtcatcaccactatccatctccagaactttttcatcatcccaaactgaaactctgtactccttaaacagtaactccccattttctcctcctcaggctcctggtaaccactgttctacttcctgtctgtacaaatttgactgttctaattacttggtatgaatggaatcatacaatatttgccctgttgtgtttggcttattccacttagcattatgttttcaaggttcggccgtgttgtagcacatatcagaatttaattcctttttaaggctgaataatattccattttacttgtataccacattttgtttatccttttatctgccagtgaacatttaagttgtttgcaccattttggctatcaagaataacattgctataatcagtggtgctttctgttcttttaagtatatgcctagaaatagaattgctggatcttatgatgattctatatttaacttcttgaggaagtgcaactacactattttaaattcccaccagctatgtacaagggtttcagtatccccgcccttgctaacacttattttctatttcttttttataatagacatcctaatgggtttgaagtggcatcttattctagttttgttttgcatttccctagtgattagtgatgttaactgtctttttatgtgcttattgaccatttgtatctcttctttggagaaatgtttattgaagtcctttgcccattttttaattggttttgttggcgttgttgtttagttgtaga

SEQ ID NO: 42525 - DNA, 2300 bp, Homo sapien
gcacattatgtaagaacatggaaaaaaaaactgtatgcaaatcaaatacatcacagtagttacctatagtaggaggagaaaagcaggaaattgagtttttttggttttcttttgagacgggatctcacttagacacccagtctagagtgcagtgccacgatcgcagctcgctgcagcctccacctcccaggttaaagctatgttgcccacgcaagtcttgaatgcttggcctcaagtggtccttttgtctcagactccaaaagtgctaggattacaggcatgagccacagcacccagcctgggaatggagttttgttttatattaagttacataaattaatgagaagggagagagtgagaaagaaagaatttggcagaccagtggggataaagtgccaccaactctgattagtgtgaagaattcaactctcggcattgtgtttttagggtccatccaagttgctttatgtacatggaacccagtgcttctgatgctgtgtatatcctgtggcatgcgtccaccacgcttggtccacacactctgttatgggctgaactgtgtcttccccaatttcatgtgttaaaatccccaagtcccagtactcagaatgtaactgtatttgtagatagggcctttaaagaggtaattaaggttacatgaggccatattagtgagccctaatccatttgacagtatttgaagacaaggccttcaaagacgtgtttaagttaaacggaggctgacaagtggggctctaatccaatatggcgggtatccttacaaggagagacattgagccaggtgtggtggtgggcctgtaatcccagcttctagggaggctgaaggaggatcacctgagtccaggagttcaaggctgcaatgagctatgatgcccaccattgcactccagcctgggtgacagagcaagacctcaaaataattaaaattaaataaataaattaaagacattgaatcttcacaatgactggaagttaggcattcttcttatccccatcttgcagatggctgaactgagtgaggcaaggagaaggtaagtaagtctttgaaagctacaccactagtaagtggcaggtgcaggcttcgaacctgcagtcgtctaataccaacgacttagcttcacgttcaacccctgcctgagaccacctctccttgcagaagccaggtcaaggcctgatgtttgctagggtgtgatgggtggggtgcctcagtggcaagagtgctcactcctgcctgggggagtctggcaagggttcacagaggtgaccttgaattggctggtggaaggcgagtaggtgttcagcaggcggactggggacagacaggcagggtgtctgcaccgcagccctgggcgaaagcttgcactgcgggcaagcggcagggctgacggggagcccagggatcggagccagcaccgggggcttattagggctgcggccgccccaggccctgcctttggacccttccggcctgcttggcagatgccacggttggttcccccacggggcatatttccgccgggctccaacttaggaccccaggcggaggtccagtgtcagctggacaaagctctgttaggaattttcctatcaggagtccctaaccccctacacgcacacacacgggcgcgcgggcgcgcacgcacacacacgcacacatgcacacatacgcgcgcgcacatgcacataggcacacagagatacgcgcacacacacacacaaacgcactcagatttcccggaccctggttttcctcctgtgaccctttcggggccgggctctcaccctaaagaagcagccccgccctggggtggccccaccctctcttgggacctgtcataagtcggaccccgggcgcccggctgcgcagtcccagccgccttccccaggcagtggaaccttcgggctcctgtaagtagacctcctgctttctttccttcccttttctccctcctctaacccccttgctttcttcctgccaagtttctagacgccccagtggaggaggtttgctcttagacctcctccccttacgtcgaaatgaccgctgggtcttgcactcggaggatcttgggagccgacgtcccgacgcctcccgcccccgcagttccttggagagcttggagccgcgcgccggagggaataggaaagcttggttacaacccgggacacccggtagcttcctgcacccgggagggggctggccagggaacttgctggactgcacaactgggggagggtagaagaagaaagatcggggtggggattcgggaatgggcaag

SEQ ID NO: 42526 - DNA, 2300 bp, Homo sapien
taaatatgtgagccactctgtgtttctggcacttttttctcttattcttactttgcaaagactttttatgcctgcaattttattaacacttctaatatccaaaagaaacagtgattctgtaacaagttatcttaaaagaaaaaaaaaagagagaagcagaatgcgatatgtaacccaataccgtttctataaattaaatgtatatgaccacagtgcacattatgtaagaacatggaaaaaaaaactgtatgcaaatcaaatacatcacagtagttacctatagtaggaggagaaaagcaggaaattgagtttttttggttttcttttgagacgggatctcacttagacacccagtctagagtgcagtgccacgatcgcagctcgctgcagcctccacctcccaggttaaagctatgttgcccacgcaagtcttgaatgcttggcctcaagtggtccttttgtctcagactccaaaagtgctaggattacaggcatgagccacagcacccagcctgggaatggagttttgttttatattaagttacataaattaatgagaagggagagagtgagaaagaaagaatttggcagaccagtggggataaagtgccaccaactctgattagtgtgaagaattcaactctcggcattgtgtttttagggtccatccaagttgctttatgtacatggaacccagtgcttctgatgctgtgtatatcctgtggcatgcgtccaccacgcttggtccacacactctgttatgggctgaactgtgtcttccccaatttcatgtgttaaaatccccaagtcccagtactcagaatgtaactgtatttgtagatagggcctttaaagaggtaattaaggttacatgaggccatattagtgagccctaatccatttgacagtatttgaagacaaggccttcaaagacgtgtttaagttaaacggaggctgacaagtggggctctaatccaatatggcgggtatccttacaaggagagacattgagccaggtgtggtggtgggcctgtaatcccagcttctagggaggctgaaggaggatcacctgagtccaggagttcaaggctgcaatgagctatgatgcccaccattgcactccagcctgggtgacagagcaagacctcaaaataattaaaattaaataaataaattaaagacattgaatcttcacaatgactggaagttaggcattcttcttatccccatcttgcagatggctgaactgagtgaggcaaggagaaggtaagtaagtctttgaaagctacaccactagtaagtggcaggtgcaggcttcgaacctgcagtcgtctaataccaacgacttagcttcacgttcaacccctgcctgagaccacctctccttgcagaagccaggtcaaggcctgatgtttgctagggtgtgatgggtggggtgcctcagtggcaagagtgctcactcctgcctgggggagtctggcaagggttcacagaggtgaccttgaattggctggtggaaggcgagtaggtgttcagcaggcggactggggacagacaggcagggtgtctgcaccgcagccctgggcgaaagcttgcactgcgggcaagcggcagggctgacggggagcccagggatcggagccagcaccgggggcttattagggctgcggccgccccaggccctgcctttggacccttccggcctgcttggcagatgccacggttggttcccccacggggcatatttccgccgggctccaacttaggaccccaggcggaggtccagtgtcagctggacaaagctctgttaggaattttcctatcaggagtccctaaccccctacacgcacacacacgggcgcgcgggcgcgcacgcacacacacgcacacatgcacacatacgcgcgcgcacatgcacataggcacacagagatacgcgcacacacacacacaaacgcactcagatttcccggaccctggttttcctcctgtgaccctttcggggccgggctctcaccctaaagaagcagccccgccctggggtggccccaccctctcttgggacctgtcataagtcggaccccgggcgcccggctgcgcagtcccagccgccttccccaggcagtggaaccttcgggctcctgtaagtagacctcctgctttctttccttcccttttctccctcctctaacccccttgctttcttcctgccaagtttctagacgccccagtggaggaggtttgctcttagacctcctccccttacgtcgaaatgaccgctgggtcttgcactcggagga

SEQ ID NO: 42527 - DNA, 2300 bp, Homo sapien
gcctgattgcgatgttggccttgggctggtgtctgggaacttggatttgaagcgtgtccccaccattccctaactgacaagggtggcccattctgcctagactatacaaacagtgtggtttatgctgaacacctgccttcctttggggggtctggaattttggtacacgctaggcagagggtgccttatgtgactagaccctagtaaaactttggatgttgagactctaatgggtttccctctaataagcagaaacattgaatgcttactgctggggaaatatattttcattgctgaaggaagagtgcactgtgcaattcctcgtggagggagggggcagtaggatgcctgcccatggatttccccaggctccacctgagtctttctccctcctcattacattgccgtaataaaccttagccatgaatacaactatagtctgggtcccgtgagcccttccagtgactctccaaacataaggtatccttgggcaccctccacatgagtaattagattgacgaatcccaatgtctccgatagggtcgaagtcactggtgccatctcccatctatgtaacaaagctactcagtatgtcacagagagtttaatgaagccacttgtttaagttcttacttttttctttgttggtgtccccctgagctggaacttgggcatgagcccaagagtctgggctgaagtaagatacaagtaaccaacactgagctgagcactcacttttccccttgatcttgaaccacttactgtctttgtgcatcttaactctcttccatacaaagcattcctttcctacaaaatttctctgcctctcatataaatatttaaaaattattggccgggtgcggtgtctcatgcctgtaatcccagcactttgggaggccgaggcaggtggatcatgaggtcgggagatcgagaccatcctggctaatacggtgaaaccccgtctctaccaaaaatacaaaaaaattagccgggcaaggtggtgggcacctgtagtcccagctactcgagaggctgaggcaggagaatggcatgaatccggtaggtggagcttgtggtgagccaagatcgcgccactgtactccagcctgggcagcagagtaagactccatctcaaaaaacaaaaaacaaaaaaacacaattattattgttaggctgggtgtagtggctcacacctgtaatcccagccctttggaaggcagaggcaggtggatcactttgagctcaggagttcaagaccagcctgggcaacatggcaagaccacatctctactaaaaatacaaaaattagctgagcttggtggtgcgcacctgtggtcccagctactcaggaggctgaggctggagaattatttgaacctgggaggcagaggttgcagtgagctgagatcatgccactgtacaccagcctaggcgacagagtgaggccctgtctcaaaaaaaaaaatatatatatatatatatacatatatataaaattattattattttggagacagagtcttactctgtcacctgggctgaggtacagtggtgtgatcatagctttctgcagcctccaactcctgggttcaagcaatccttctgcttcagcctcctgagtatctatgactacaggcatgcaccaccatgccccactcattttttttttaagtttagtagagatggggtctcattatattgcccaggcttgttttcagattcttttgaatgaaaaaattaggacaccactgagagttgctaaaaagttcctcctaagcgccaccagatggatgcatctggttataaatccaggtaagtaatccaaatcagcaggtcctactcacccttacccttcccacataattcacaaaccaaggtaataagacctcaaataaggaatgacgcctgtttcacagttcagcatgaccaacagctgatatctaaacaatgcccccaagctggcaagtaaaacccaaacataacccaaagccatctgtgggtggctcctctgcccttccgaggtctgattaaattggaacaaatccaagttctatgttccatgatagtccaaagttctcccacaatgcctgtgagctccctgggcttgcctcctcctgcgtcctgctagctatttttaaatgtgagctctattttgttccaagatcattaggatatttagccccttcaccaatttccacaagaaaattaattcattccaatattcagaggttccttttttatttcttagccagtgattaaggaatccattatgtaacccagagccattctctctactcttt

SEQ ID NO: 42528 - DNA, 2300 bp, Homo sapien
tagagatggggtttcaccatgttggctaggctggtcttgaactcctgacctcagatgatccacccacttcggcctcccaaagtgctgggattacaggctacttggactcataactgtctcctaatggtcttcctgatacatcccaactcattttcccaggcagagtaatggttctgaaatgtcaatccgaaggtgtcactttttgctcaaagaccccatattggcctttccattgctcttaagataaggaacaacttctttgacatgggataaaatgaccctttgcaacttggctttctccagtttcatctcctacactccttacctctactcctagtcatataggttgtctttcattttttgaaaagctttattattatttttttcttgcccatggctcgtttctcttcttggtacttatttcacactcccttgtccccaaactcctctctaattcacatccttcaagccattctctattcgtcctccaaagtcagtttagctgtcagctcctactggaattgatgcttgtaattgatcccgatcctaataatttcaggagaccctcccatgtgtttccattcattttatctttctcattatatatatatataagcatatatataagccatatataagcatatataaacatatatgagatacaaatgtaaataagcatatatgatacacaaaattgttattatatatataacttttgtatctcattacatatacatgtatctctctcattacatatataactgtatatgttgctatatagtcccatgcaatatttagtgggctgaggtgaaaaatagacacatatatgttatatatgtaatgacagagacatatatgtgtaatgagattatatatattatatatgtaatgagggagatatatgtaatgagagatatatatttattcaatgagaaatacaaaattataatgtatattcattatgtattataagtatataatgctatgtatcagtatttgatttcactttattaaaagagttgattatatctgaacgtttatttatttgttactgactgtcatcctccatcagaatatatgctctctgaagttgagcttcttgtttactttgctcaccactgtatccccagtgcctaagtaacagtgcccggctcagagtagagactcaataaacatttaccagatgaatgatagaaacagattttttgaggcaaagtttttcatgttgccatatagtcccatgcaatattttggacatacttatactaaaaaattattatctgaaattcaaatgtaggccgggcacggtggctcacgcctgtaatcctagcattttggaaggatcgcttgatccttccagcaggttgtcccgggaacgcgcagcccaaggtggacgcacagacccgcgtacagagattttttattgtcatgactgggggtggtggcactactggcatttagtgtggagaggccagatatgctgctaaacatcttacaatgcaaagggcagcccctcaaaggcaaagaattatctggtctaaaatgtcaatagcgtggaggctgagaaaaactgaactagatggctatgaactttcagggtccctacctagtacacaggcagcgcctagaattgctaagttcatcttccgtttggaaaggcagcatggggttagtgagaggaaggcgcccggggctggtggctggctttaaaggcctacgtgcaaatcttcttgacgctgataacgggatgcgagagagccaggtaggttacctattgcagcaggtcaagtgatgatgtcgaaaaggatgcgtgtgccggacactgtggaaggtaaagcgctccgcacagcccgcctaagtgcgcccgggacagagccatcccccaggtgctaccaaacaaatcctccagctgctggtacggggaaggtgttcagtgacacaccggaagcagcctagtggctgaggcgtccttctccctaccaacgggttgcgaaggaagtagttgctgtagccgcgccctgtgcgcctgcgcggaggcgtcggctgctgacgtgtagctggggccagacgggactagccgggcgcgcggctgagtgctgcagaatcgctggggtggcagagccgccagcgaggctggggatgggggcgccgctgctctctcccggctggggagccggggctgccggccggcgctggtggatgctgctggcgcccctgctgccggcgctgctgctggtgcggcccgcgggggccctggtggaggggctctactgcggcacgcgggactgctacgaggtgct

SEQ ID NO: 42529 - DNA, 2300 bp, Homo sapien
tcactatctttaacctaattatctatatcatcctaacaactactgcattcctgacactcaacctaaattcaagcaccacaaccttattaccatctcgcgcctgaaacaaattaacatgattaacatccctaatcctatcaattttactatccctagtaaatcccattatgatttcacacactggtccagggctccctcacgcaccagcagggcttctggctgactacaaggaacagaggttggagcttcatatgctgaagtgccttggatggagagttctttcctattttttctggagtcttttttccatcactttttacataatcggcaacaaagccctttggggcctcagcactttcccagttccccagccatccctcagttaactgccaataaaaattacaatctcactaacgctagtgagaatttaatgaactaggtaaattaaattttacctagttcaattcacctagtttacctagttcagggcccgcccctccaccactcattttatgactccaaattatccaaactgctctggaaggcatcaataaagttgttagctccttgactattttcagctctggaaaaacaatctggaggaacaatccaaggtaaaattatatccactcaaagtacaatcattaaaagcaggctacctggcaacatagaaaattttgcctcgggaaaaaaaaaaaaaggctagaaaagaaatactttacaactacaatcgctgacgcattagtatgatggggcccttcaagcagtaataccaccatcaagtacgatttatacttcgtgatgtcctagatggtttgattttttgcagtagtagaagaaaacagcatcgggctaaatctctcatccccacaagactcaataaaacctgtcaaatgaaatacaaatacatattcacaaaatatttcctactagaaattctcagagttttgtacccaagtcattaagcacctatttatggatcctatggaaaggggggcggttcgcacacttatcatttaatccccataataactctgagaggaggtatcatggccttaattttgcatatgaagaaacagctatttcaacataataagtcactatccaaggtcatacaggggtgtcacagcaaagactcacatccagccttttgactggtgttcattgttcttctcagtgttttcttagttccttaaacccaaactaagcgtcaccattaacactatttccagaaaccaattttctgtcatatcaaactgatgcgatcacagttgtcacttgatattcgagactttccctgttgtgggctaccccagatcctactaataatgatcaccctgcttttcgaatgtgaaatgcacgttattaaaatattttcacgaaatcgtaagatggccaaagttttgcataacaatgtcacaaaaaggaagagggcaaggaggctagctgtgccccccaaggccccgtggggccgactcggctctttcacagggccacgtgggaaacgtgagtatcttaaaggtcgcggtggtggctgtgctcagtttcggggtcacagaggcccacgctccgcggaccggggtcggaaggcgccgtgggcttcccgcggccagtcttcgaagcccctccacgcccgcaggcctcaccttgagtgtctcgtaggcggttgccaccagcaggaaagcctcctcggcgctctgcggcgtccgcccggggccctcgtctccgggctggggccggtagcggtcagggtggtagcgccgggccagctggcggtaggcccgcgcgatctccgccttgcccgccgagcggctcacgcccagcacctcgtagcagtcccgcgtgccgcagtagagcccctccaccagggcccccgcgggccgcaccagcagcagcgccggcagcaggggcgccagcagcatccaccagcgccggccggcagccccggctccccagccgggagagagcagcggcgcccccatccccagcctcgctggcggctctgccaccccagcgattctgcagcactcagccgcgcgcccggctagtcccgtctggccccagctacacgtcagcagccgacgcctccgcgcaggcgcacagggcgcggctacagcaactacttccttcgcaacccgttggtagggagaaggacgcctcagccactaggctgcttccggtgtgtcactgaacaccttccccgtaccagcagctggaggatttgtttggtagcacctgggggatggctctgtcccgggcgcacttaggcgggctgtgcggagcgctttaccttccacagt

SEQ ID NO: 42530 - DNA, 2300 bp, Homo sapien
ctgctacagaaccctttgtcctcttttctttgcatttcataaccaccatgaagtaccactgattttgtcttctaaatttgttccccctcattcctactctaacagtcctacccagggcctcattccagctactcccccaccatcagccatttatcttctcaacttcagttcattttgcacattcatctcagattaatattcccaaaatgccttaccctgtggctatcccactgtttaccataaacttttgtgtgtatgtgaggttttctatgacttctggccctagcaactttgtatctgctattagtcactagagcttcctctatttttaaatttattcactctacatgtgtgcatcgcctccagctgtcctccatactggactgttcttccttctgagccatctgcaagacacgtatctccaaagtccagctctcacgatctatgatgagcctttcctaatccagtatgtatatctttgcactgagttctttgccatatcttttaaatatgaaatcattctattttgtcctattcatcagtctcagaattgattgttgaatgttcccaacatgtactttcatctctttactaagatatatattaatttctttgtggtgaggaaattggccactagagagggctttcaaatgtgcaagtctccctttggcccaggcacagctaatctgagcacgtcaatgccacacatccttgccttcaaagagtaattgggccaggggtgggcccatgacttaataccagccagtgaggttcattatggggatttttgctggaacgattagaaagaaaagaggtactatttttcctgggtttgctagatggggacagtgaaagtgtggtgccttccttcataccactagagaagtccatctaccaccaaggaaaatgaggctaatctcaggaaaagcagaatcaaaacaaggaggatgagagccccaaaattattatttgggtaattgaattcactagtttaaagtccctggacttttcagttacacaagccaatatattaccttttgcaatattcagtttaagtgagttctgacaaatacaatggtgtacaagaataatgacgtattaatgatacatggaaaaaagcaacacaaaaattttaaatatagtaacgatcccagttttgtaaaacacttattaaaaaatgcagtaggcctataatgccagcactttgggaggctgaggtgggaggatcacctgagcccaggagttcaacaccagcctggccaacatcgtgaaaccccgtctctactaaaaatacaaaaattagccgggcgtggtggtgtgtgtctgtagtcccagctactcaggaggctgaggcaggaggatcacctgagcccacgaggtggaggctacaaggagctgtgatcacgccactgcactccaccccgggtgacagagcaagaccctgtctcaaaaaaaaaaaaaaaaaaaaaaaaagcagcagaatagaaacaatgatgacagttaaatggtgagatgagagtgagaaacgctgaatttaattttattctgtatgtttcacaaagatgtcagggtctgggattttatccaatttaccatactccaccaaatcaactggtaggatctccgtgaaacagtaacagggtcatttagaaacctgttgctgcctcatgaaaatcctatgaactctccttggttccccggtgatactgtctggcaaggccccttatctctccaactcatgtcacaccttggctccagttctcatttctcaggggtgcgtgtttgctgccgcccactccatcctcgcgtcccacgccctcgcgattcctgctcatcctaggggcgccagcttcgctggaggacgccgcgctctgcgggtccccgcctcggttccaggcccagctgcaggtgccacccaggtttcaggcgctgaggagcggagagcactgccagctcgctggggtccccgctgtctctggcaagcggctccgcgccgggtgggctggggcggcggggcgggcgcagctgcttccccgccccggggcggcacccgcgctcggggctggcggctcctccccgcccggccgggcccagcagcccctaggagcccagcgccgccgccatgtcctccggggctagcgcgagcgccctgcagcgcttggtagagcagctcaagttggaggctggcgtggagaggatcaaggtgcgggccccgggtacccacgctccggtccttccgcccgcggggcgtgagaagaggaggccggcggcccggaccgggcgccagcgggggactcggt

SEQ ID NO: 42531 - DNA, 2300 bp, Homo sapien
ctgccaattgttttcttttatggtttctttcattccttttatacttagaaaattctttcttaattagataaatacttgtttgtattttcttgaaggtgcatgaggtttgtttgtttgtttgttttttgttctaagatggagtcttgctctgtggcccaggctggagtgcagtggtgtgatctcagctaactgcaacctccacctcccaggttcaagtgattctcctgcctcagcctcccgagtagctgggattacaggtccccaccaccaagcccggctaatttttgtatttttagtagagagggggtttcgccatgtaggccaggctggtctcgaacttctgacatccagtgatctgcccacttcagcctcccaaagtgctgggattacaggcatgagccaccaggcccagctgaaggtgcctagttttattttagattttgatgtatgtttaaaagtaggaataaaaatctttttccaagtgtttttgataattgccccaatatcatttatgaaatagtcctttctttcccactgattagaaatgccactcacattatatattaaatccttaaccacattagaattcatttctggattttctattatgatctattttgcctattattgtgtcagtatcatataattttaactattaaatgtataattataatatataaataatctcctattttattacttttttctactctcataactatattcttccagatttactttgtaatcacttttccaagttctaaaacagacctcttgaaatggtaatgggatcctttaaaattttaccatagttagtctttctagctaggaaagtgttttttatcttgcctttttttcaaatttttaaaaaaatgatcttcaataaagttctatcatttcctgcatatactttctgaatatttttatgtttagtccttgatagttcacaaattggtatttttatgttttttccattaatttttatgaccaagtttttatatattaaaaaaaaacattaattgtataatttttatcagataacttagtgaactcttttgttttcatttcattatcttgaattttctagggagacaaaagtgtcctttgtaaagaataaacctctcttctttcatattagtagacctttttctgcttcttttcatagttaactagccaaaattttgtttcctggtgacaatttaatattcctctacaatagaagaaaacagtctccttatatctgtatagtacatgtattagctgtagtaaaataagaactccagggcatgctgtataactcaaagaaagtaaggaagtggcactcttgctataaacaaccttggtagaattacaaagaatattagttgtggtgtgatgctgccctcaagtggtttcatcaaaaaagggtggatggaaaacaagaccatataactgacttcagatgtcagccatttagttccagaaatatccagaatgaggctgtagatagggaagatggctggaggatctgtttagaagcagaaggtggatataggatataaattaatgctgtttgggtttttactattaatgtgatttcattaatacttacagaatggattataccagtaaaccatatttaactgtctcagataagccctccttagacatggaattgattgactaacttcctttggtgtgtcatgggaagcttttggccatgagattgtcaggaacttaagttcagataaatctcttttaggaagctagttcataccacaagttctcttaaggcatatcaagttagcaccaagcaaagggatgttcccttgctgcctgcataccaattatgtagttaaccgtgggagacattactacctgaaaactccgtactattcttttcttatgccattcagcgtcacttaaccgaaaagtcaatacccaggatgagaaaccattgctctcccttcaggatggctttcttttttgggaacttggctttttgagtagttcttcatctgagcttatatttttctttttctctttctactcaaaaacttattgaagaattgggggcaagtttatgttccttcctgtgacttagaaactgttaaagctgttagacagctagccaagattctaaagaaacccagacaaggcagggtggagaccgagaggagaaatttattccagaaattaactgttagcagtagtgtttcttaatacataagctatatcatactcctcaagtagattctttgcttaaaactttcactgtaaataattttatagcaaccatgtgaataacttaagaataatag

SEQ ID NO: 42532 - DNA, 2300 bp, Homo sapien
tgtaatggcacaccgaatataaaattatttttaagcatatatgtataaaatagttttttgtttgtatcaagtcatggactagtaaagaagtagcatccttggaggagtcaagtcggttaacagcatttacttggtatatattatgtaccaagcactgttataagtactaaggacacagtacttaaaagacatagaagtagtctctgctctcagtgggttttagactggtaaggaggatacagcaacaaaaccattaaatatataaactagtatctgatattgataaatgtatagagaagagacagtaatgctaagtgatatgaaattgcgggagtagggagtgctatttcctaagatagttagggaaatgtctctctcaggaggaggacatttgagttgagacctgaatcatgggaaagcaacaaccatgaaaaatatgggggaaaagcccttcaagcaaatgcaaagttcctgactcaagaacgaacttgatgtgtgtaaggaccagaaaattaagctattgtgactgggtaatgaaaaagggactgagaagtaggcaatttccgaataaggctttgtaggccataacagtgagtttgtttgtttgtttattttgattacagctgcaatagactgaatgtttgtgtccccccaaatttatatttgaaggtggggcctttgggaggtgactagaacatgaggatggagtcctcatgaaagggattagtacccttataaaagagaccccaaagagctcccttgacctttctgccatgtgaggccagcaagaagacagccacccatgaaccaggaagtgggccctcactagacactgaatcttctggtgccttaatcttggacctcccagcctccaaagctatgagaaatgaatgtttgttgtttgagccaccgagtctatgatatttttgttatagctatatagactgactaagacaattgtggatatgggaagtcactggacaattttaagaaagggaatgatataacctgatttatgctgtagaaagatagttatgattgtctggagaatagaaagggtggggatttaaaagtcaagaggagagacagagaaatctatcagggagctattgtagtagcccagaatctaaactctggataaaatattacagtgtcttggacaaggcttatagtaacggagatgtgagatgtacttaaaatctagcttattttacaaattgtcaacagtgagggggtcacaaaatagaagaataaagattttcttctaggtttttgacctgagaaaccaggtagatgacagtgccatttcctaaaatagggaaaggcttatagagaagccaatttgtggtcagagtcaacagctgtgcttcggccagattattaggcatctaaatggatcattaagaaggcaattggttacattaatcttgagcacagctgctcaggacagttttctgggtggccttggcctcctttcctcacttgaagttcttaagaataactataaaatgtgctgggaatgcaacattctgagataaaggaggagctggccagaacagcctactctctgtgccagtcttcccccacccacaaaacaggatgtccttcagtgctttagcctagcacgtcctttgatctcagaacatcaaacccaggtggactgctttctggggttcttcagctgctgtgcaagtgtggcatatgaagacttcatttgccctgggcagctttcctgagccttacgggaccagttcacaatgaatcctaggcttctgttgtcccttgttacctatctgtaagtaataaatctacttcatgtaacttcctgtgtatgggtattctgtctcaccatactcaaacaagttggtaatcggtatacagtgaacctgcttctcaagctagagcttcaaattggagttttcaatatgtaaattacacataaacctgtgaaactagatgaagtcactgagagcatgagtataaatagattagaagacctaggacagagccctggaacactctaacagttaaaagtctgatgtaaaaggagttacctaagaagcgagataggaaaatcaaatgattctggcatagaattctaaagaagaaagtgcttcaagaaggaagtagtagtccaatgtgttgggctcctgttaaaagctcaagttatgtgaggatagtgagttgaccattagcttgactaaatgtaggtcattgatgactttgataagagtggtttgcctggaatattggttattaatatgattggaatataattggagtgtgataggaatatattg

SEQ ID NO: 42533 - DNA, 2300 bp, Homo sapien
acaacctacccaataggaaaatcacttgatctcatacacacacaaacatacagatgcatacacatatacacacatacacagccacatgcataattagacaattcatggaagaagaaatccaaaggattcataaacatctaaaacatgtttaatctcagcagtagtcagagaaatgcaaactaaaacaagatagaatttttcatgcatcagcctggcaaaaatttctaaagagcaatatattcagtactgttgggtattcaggagaatgatgacccctttctggtattgttaatgtaaactgctatacatttttggaaggaaaaattggcaatatttattaaatttgaaatgctcttacaatttcagccagcaagccaaaacaaatctatgccacagaaagtattcaagagcatatgtccaagaattcttactgcagcattatttgtcattgtttccaaaaaattggaaacaatctgttaatccatcagtagtggaatgtttagataaatcatggcacgtagttactataaaatattatgcagctatttttaaaagtaataatttttaaatataattagccaatcaacgttgtacatgcatatctgaataaatttgtatgaacatacaacaaagtgtgaaaagaatcaacccagattgttaatattggttacctgggagttggggtgggaatggcgattactttctctgtatacatctttggatggttttcctgtttatagtaaggataagcatgtgttatttttgttttttggttttttttgttgttggtttttctgtttgtttgtttctgatacggaatcttgctctgtcccccaggctggaatgcagtggcatgatctcggctcactacaacctccgcctccgggttcaagcgattctcctgcctcagcctcccaagtagctgggattacaggggcatgccaccacacccggctgatttttttttttttttttttttttgtatttttagtagagatgaggtttcaccatgttgaccaggctggtctcgaactcctgacctcaggtgatccacccacctcagcctcccaaaatgctgggattacagcgtgagccaccaggcccggccaatttttgtaacttttacaaagatatttaatttaaaattgattttaataaaaggtagacatccaagaacacaggatgattaatgcacttcaatgttaggtgaatatctttaaaactgattattgtcaaacattaaatccatataaccgaagcaaactgcacacacctgtacaaaataaaggaagtaacttaagaaaataaagtgacttatccactgacatttcacaattagtatttgaacaatcaactcaaaagacacccatgtgttagtaaagtaaataaatgcatgttacttcttgcaatcttctgggaaggagtttaatgccaagccgtttcatggaaaagacaggagttaagaaatatggaggaaagaataattattcctcatcaggcgagtctggcgatacctaaatgtgtgtatgtaagggagtggctttaattaaggtatagaatccacatgtgccaattgaaaagcagtatcttcctgcccctcctcaaaagttcttctgctaccaagccatgacccacacctagccagacccctgaggcacgtttgcctcctctctcttgccttcctctttccctgaatctgtctgattgctaaatcctcccacccttacctctgaaaggcttctgccctcgccctccggctaaccctgccgcgttttgcccggcctcgctaacaacatgggagccgccactcccaaagaagtccggactgctttgccgggtcttcccaacccttcacaaccagctctttctagcctcacgccgacttctccaccgtcacactccgcccagtgttatgagggttctgctcactcccgaggacctcggcgctgcccaggctgcagcctcgaatccccacaatccttacctccctaggctgtgcccactcgcggacggaagtgcccggagcccaaggggcggggcctggtctggccaatggaagcacagagtgcaggctcagtggtcacgtgtccagcgggcgggaattttaccccaggaagagatgcaggaggcgatttttacctcaggtaagagccctgagaggctggaggcaggagagagggtgattttgagggctgaggggaggaaaaggtcgtatgggaccaaagaagtatggcagctcaggaatctctggaaaacgcatctgtgaggcccggccgatgtggctctgtagagacaaaacc

SEQ ID NO: 42534 - DNA, 2300 bp, Homo sapien
aaaaaaagaaaaaacgccaattaactctaagatggcattgactgtgagatgcattcccatttcagagaaattaaaatttgttaaagtgtttttttgaagtgtgccttagaattaactacaatcgtaaatttttgtttggaacgttatttcgatgttagaattctattccacttttttttaagacagggactcactgtcacccaggctggagttaagtggcgcgatcacagctcactgcagccgccacttcccaggatcaggtgatcctaccacctcagccttcccggtagctgggactataggtgccataaccatgcctggctaatttttttttttttttttttttgtagagacagggtttcatcatgttgcccaggctggtctcaaactcctggcctcaagcaatcctcctacctgagtctcccaaactgctgggattacaggcatgagccactgcgcctggccctccatcctgctatttttatcagccagtaactctcaacagtgggaatttgattttgaagcattgttctttcccactgattctgcaccagtggagccaaggatgttaatcgaggaatggttcggacattaactcttctagttgtagtttgtcatttaattgcagattgaggtagatcattcagtgactattaactaccataaacagcaataataaacaacttcttttcttttttttaaattcatctattttttttcgagacagagtctcgctctgtcgcccaggctggagtgcagtggcgcgatctcggctcactgcaacctccgcccctccaggtttaagcaattctctgcctcagcctccggagtagctgggattacaggcgcctgccaccacgcccggctaattctttgtatttttagtagagacggggtttcaccatctaggccaggccggtcttgaactcctgacctcatgctccacctgcctccgcctcccaaagtgctgggactacaggtgtgagccaccgcgcccagccacaacttcttttcaaaattgaattcaattctgaaatatctcaagggaggtcatggattatttaaaaggaaatcacttgcaacaataaacataaaacaatgcagaaatagtataaactcatctagattgaagaaacacaaacattgagtactagcatcttcttgggatgacttaaaattaggacaaatacttagttaccttactacccaaagtgacatttcttcccattttagagctgtgctgtccacacgtacaattaaaattttctagtagctagccaaagtatttaaaaagagaaattaacttaataatttacctaatttaatgtagtatgtccaaaatattaccttttcaacatgcaatcaatataaaatttactaacgagatggtcttccacatctggtgtactgtttactccacagagtggcaagctgcctttccaaccctcacttagccacatgcggctaccgtattggatggcagtcttagggaatttcaatatcaactgattctttaattctgaatttgagaatttctttttataatacacacggtcgctaaggcgcttagagatctgtgaggcgcatggagattattttactctccggtcccttttgatccaagatcccacagcattaaaagcagtaagagggaaggcaatgggcatcccttgcgcccaggaacgtggcctggagggcctggctgctccgagcagtagcagtgcccggcggggaggctgcagacgcggcgttggaagttggatttctagacaagctccggcagctgcccggaacccgtgtctttttctggggcacccaggaacagcagggccagacggagagagagcagcctccagccaggcacagggtcccgagctgccaccgacaccgagggagcccggcccagggctgcagcgctttccgcctaggtgggcggcagcgggagcgaggagccggaggaagcccggcctgcgtcctgcgggcagcaggacacgatctccccggcgcgctctcgccggcgccgcagcgggcgcgcgggcgacagggtgggcgtggaccgatgggggcaccgcccctgggagaggcgggcgccgcggttccgggggcgggacgcgccgaggagtggggcgcgagccgccggttttgattagtgcgcggagctgcggcggtggagctgctcggccgggagcccggcggcgagacggagaggcggcggaggtgcccgcgcgcagggtctggtgggcggccgcgaggctcgggagaggcgaaccggagcgcgggaccgcggtcgccccgaccag

SEQ ID NO: 42535 - DNA, 2300 bp, Homo sapien
tgccagctgtcagcctctggcccctgccagtgttaggaatgattcccctgtcctctggggtactgccctccgacgacaacttaggatcagcatttaaaaccctttctgctctcgtcttaggtaaattatagaccagaacgggtctataatggggacaggtccccatcctaacccccagagaccgtttctctcaatagatgaatacaaatagctctcaatttttaatttttatgtgcaataatgcaaacatacttttttttttttttgagacggagtctcactctttctcccaggcgggagtgtagtggcgctatctcgactcactgcaagctccgcctcccgggttcacgccattctcctgcctcagcctctggagtagctgggactacaggtatccgccaccgtgcccagctaattttttgtatttttagtagagatggggtttcaccgtgttagccaggatggtctcgatctcatgacctcgtgatccacccgccttggcctcccaaagtgctggtattacaggcatgaaccaccacgcctggccgcaaacatacatttttatagctcctgaactaaattgggtatcaatacaaattactgtggttagtgtagggctcggcctctgatgagtgaggatctttcctcaaagcccacctttgtccaaagaaagaatctgagcctccccttgacttattttattttttgccagttttgtaaatgctgtatgcttccatactacccccttccctaatttccacctctagaattaactgccagagatacagttgtccacatggaatgtagtataattgtgatagaaaggaagaaatcccccttgcttagtattaaaagtttctggttaaaataactgactaaatattaagtaaaacatcaccttctgggtacaatgcagaaaagtaaaagcagttcatataagattactaaactttgggaggtcttcaagaccagccctggcaacatagcgagaccccatgtctgcaaaaaaagttttaaaaattagccgggcatggtggcgtgcacttgtagtcccagctactcaggaggctgaggcaggaggatcgcttgagcccaggagtctgaggttgcagtgagccgtggtgacaccactgcactcccgcctgggtgacagagtgagatccaaaaaaatttactgaaataacaaaaacgtggactttgggatttcctctaactgctgcaaattataacacagaattgctcagtgttaatacttgaattgtggggccaagtcttctggctgccctagttctcttttctggcatttgaaagcccttgagctagctatggagctaatctttggacaggctttttggttcccaggaatgtcatgcctttgaatttccaatctatatatatacagtgtgtgtgtatgtatacctgtcttttcactgtaaggcacctccacccatcccttatagaaggagccacaaacaatcaagcaaatggatggaggttaattaaggggaagaggaaatagtctgttctctgactcgagacctgaaattgcagtggggcacgtaaggtaagaccagagcagaagtgattatcttgaaattccactttagcttggaataaaattaatatttaaattgattttaaaggaaataaaaaagaacattcagtgttcccttttcattgctaatctcacattttctgattttctaaaccttttgttttcccattcttttcttctaagaggaactcaatggtctcatagaagtcaatcaaatagcgttgtaagaaccttttacctaccacatcctttgttggttagactgaaccaacaaagcagtgcctgcttctggggaggaaggatgtggccttttctgtgccccagtttgtgggagggtgagtccatgaagcaagtcaatttaaaaggcagtgtgtgctcttgtttcagagagagtgaatcctttgggtggtggtggtggagtatgtgtgtgtgtgtggtgggtggggggtggggcatgcacatctagatccatactttttgggctcaactcagggttaccaaaatagagtcaaactcaactcaggattacctaaatggagtcaaattttgtgtgtggttttgtaacatgattctttcagtcatcatttccaggccacatttttcatgtcactcatgactgcattataagtttgtaccataattcatttaaccaatactctgttgtgcatttagaatattttcagatgtttattgtccttataaaagtcagtatgaaggtatgcaattatcacttaggccacattcc

SEQ ID NO: 42536 - DNA, 2300 bp, Homo sapien
ataccttgttgcctatcagattgcctggtgaggttaggggcgtggtggttcatgcctgtaatcccagcactttgggagactgaggcaggtggttggcttgagtctaggagtttgaaaccagcctggggacatggtgaaaccctatttctacaaaagaaacccccaaaattagctgggcttggtggtgcatgcccgtagtcctagctactcaggaggctgaggtgggaggattgcttgagcccgggaggtggaggttgcagtgtagtctgggtgacagagtgagaccctgtttaaaaaaagagagagaagaagaagaattgtcaggcgaactcttaaaaaaatacagacgttgaagcattacttcaaatctgctgatgtctgggtgattctgatgtgcagtttgggaaccactgggctaaatggctccagatggagcatgggtcattgatttgtcttgtgacctgtcttgatttttccatgggctctagttctcctccagttctttcttttgaaactttgtgactacattcctttgcttggaagccaggttgcatagtaggtcttagggtctttctttagccccggctcttccatactgtgctaagctgaaatgtcttcatgtttccgccttgtgtatggcaaccgacccttctttccaacccagatgcaaattttgacccatttttacttattctccatcacttctgtcaggcttgggcgtgggaagtgggagccagatgcctttgttcacattgccatcttcccctgaattcagatgataatgactatcttacgtgaaaatcacattgagatgtgaactgtgcagacagtacttctgcttctgttctgcctgtacagagacagaagctttatgtggtatttcttacatacatgcatttcttacatgcagacacttggtattcctcacaatcacatgcatacatgtgaccatttttatttctgatgtccttatgaaatctttaaaataaaagttgtgaagacaaaggagagcacatatgataggtcttcaaattctctctcataaccatctttctacactttccaattataggcaggaatattttccccagctggctgccttgtgctgaatatgtcagtgatattgaaaatgctgtggacaattctgatcttgactaaaataatttattgttctcattcttaggtagcagaaactcccacgggagaaatacacatataaaaggtagttataaaatagcttctctctggtagacatttacacctttctcattggtagaaaacatgcagtcttgtttgttgggaaatttgctttttcttgaaaatcactgatattattcctgactctctgttatttctttaattcattagtaataaatctatccttctaaactatattaagaaaatagaacattgtaagaatgaattagactgcaggaggtatgaaatgacttttttctgtacaatggttaaaacaagtctgctttctgattattttattgccttagtactcagctgagtagctcttgaaatactgtctgctgtgaaagcaaatttcctcttgcttggtcatctactttctggttattttctaggttggaaagcacttgctctgagagtttaaatctatagcctttgatttttatttgccgttttccttattctcagactttctggctactgctatgcttaccttcatgacattttcctatggacgatccaagcgataggattaactttctaaaaatatcacagctttctttattaatttatagcaatttttaaatatttcatttgattaagcagcctatgacataagaaaagcaagctgaattacttgattttacaaacaaggagactgaggttcagtgacttagctaaggtaattacaattgagaagctggagagccaggacttgaagctaagtctgctgatgccagttttaatattattcctgttaaacacccaattggctctcttaaggtgtcagagtttcacttgtactcagccatgatgcattttgctaagatggtgcaagctgtctataactctctctcttgtcttttagaagttgatctcttagaagatgatggaagtttcaatatttcaatatttaatgaaacttgtttgaaattgaacaggcgttctaggaaagttggatcagaacacatgtaccaagtaaggagatctcttatgctttccattaaagaattgtgtcatttaaaaatttgggcgatctccaagtaagtatccaaagtatttaaaaatgaatgaacttctagacagtttgtgattgttgtttc

SEQ ID NO: 42537 - DNA, 2300 bp, Homo sapien
cctgattgtactggtctccacagagggtgggcattaccacatctgtgtgacagtgtccttagacgctgaagaaactaagtctttgttggacagcccttcagaggaaagaaaggaggaaggatttctctaccagctcctgtccccacaggattttaactcccctgcacttccagatggcatgtgctggggtgtgggtgctgcagcagggaagtcccagaataggaggcaagacctggtcatgttgtcaaaacccatccagggatgggacaaggagcaggggaagctgagagaggctgaggagttcttaagaggtgtctgcttcaatgggaaagcttgagctggggctgtggaatatccctttttggtgacatgaggacaactttctctgggaataattatatgatagcttctgtctgcaggaattttgtttgtttgtttttgtttttgtttttgagatggagtctcactctgtcacccaggctggagtgcagtggcaggatcttggctcactgccacctctgcctcccaggttcaagtgattctcctgcctcagcctcccaagtagctgggactacaggcatgcaccaccatgcccagctaatttttgtatttttagtagagacggggttttgccatgttagccaggctggtcttgaactcctgacttcaggtgaccaacctgccttggcctcccaaagtgctgtgattacaggcgtgagctattgcaccaggcctgtttgtttttgatagtattgtaaatgaaattgttttcttaatttcatctttggactgctcattgctagtatatagaaatacaatagatttttgtacattgaccttgtatcccgcaacctcactgacctcctttctcagctgtaatacttgttttggtgtggattccttagagttttatatatagaagtatataagattgtatcatttgcaagtagagatagttttacttgtctgtaggaagtttattttattttattttattacttttgagatggagttttgctccgtcacccaggctggagtgcagtggtgcaatctcagctcactgcaacctctgcctcccaggttcaagtgattctcctgcctcagcctcccaggtagttgagattacaggcatgtgccaccgtgcaccgctaagttttgtatttttagtagagatggggtttcactatgttggccaggctggtctcaaacttctgagctcaggtaatccgccaaccttggcctcccaaagtgctgagattacaggtgtgagccactgcactcggctgggaatttgatttcaaagaaataaaaagctagatcccctttcgttcttcctgtctgcacaaccacttgcgggttgactgggaatgctgaaaactatgttacctcagggaaccaaggccttcatatggtttcccacattgctgaattcattagctggaatatatgcagaatatttaaaagaagcagaacaacccagaggaatcagtggcatcctgatagaccaggattaaatagcttcagttacaggagtcccagaagtacctaggaaccttgtggagaatttctttagtttgccccaacctgtttctgaggcatggtcctgtgtggtgagacatgtcattttccccctggggatagcagtgacttgaaggagtttcccatcattctgctgggaagagaaaggtggaagtaggtcttacctgtgcagttgcagggaaggtctcactgaggacccagctctgggcctcattccattctaccagagtggaatgccagtggcatccagtggcctgtcaggtgaatcacaggttagaattctgacctatatccaagctggaatctttcctttccctctaagtcaggtaatgggccacgctcattcatgatgaagagaagttgggtgattggcttgggagagcttgcattgcctgactcagtgtctgcctctgaggatgaatggtgaccagcagagataccagctatgcagagagactgatctcctttagaattttgctaaagcccattgatgcattttgtgagttgactgcctttttctcttttagaaattctgacaaagattaatgatgtatcactgtttaatgatacctgtgtgagatggcaaataaactcaagaagaataaaccccaagatctcatatgtggtaagtaaagtgatctactttttcctgctaggacagacacgtcacccatgggaatatgagtcagagggacttgcttccgtgagagcttctcaatctaattgctgtttttttttctttttttcttttattttttttg

SEQ ID NO: 42538 - DNA, 2300 bp, Homo sapien
gttataatgattgggtatatttatagtgattggatatatttatagtgattggatatatttatagtgattggatatatttatagtgactggatatattttagtgactggatatatttatagtgactggattcttttagtgattggatatatttatagtgattggattttttagtgattggattttctttttttttttctttgagacggggtcttgctctgtcacccaggctgagtgcagtggcgtgatctcggctcactgcaagctccgcctcctaggttcaagtgattctcctgcctcagcctcctgaatagctgggactacaggcatgtaccaccatggctggctaatttttgtatttttactagagatgaggtttcactatgttggccaggctggtctcgaactcctgacctcaagtgatccacatgcttcggcttcccaaagtgctgggattacaggtgtgagccaccatgcccggtcaggatattttttagtgattggatatatttatgtttttggttcattttgttgggtgtcagggagccggtgatggttatcagcttttgtaaaatcccagaacacactgacaaacatttattgagcacttgctatgttttcagtgcctatgatatgaacgatatatgagaagaacccataaggcataaaataaaatgtatgatacaattgcaaacaaatgcatctttttacaagagtagcttgaaaatgtgaaaaaatggctgtcacaatatcctctccttttttttttcttttttctgtttttatctccttttctctatttggattgggtcccaagacatagatgagtgtgaagtttctggcctgtgcaggcatggagggcgatgcgtgaacactcatgggagctttgaatgctactgtatggatggatacttgccaaggaatggacctgaacctttccacccgaccaccgatgccacatcatgcacaggtgggtttctgccaaaaattgcggcatctcaacgtgaaattctgttgatggtgactttcttctgctccaagcctgtgttggggaggcaggtggaggtgatctgatcctttgcacattttgtacaacctatgacataaagcaaataacaacaatcaagttacagggggccatgttaaaaaagctaaaattaggccaggagcagtagctctgtaatctcagcactttgggaggccgaggctggtggatcacttgaggtcaggagttcgagaccagcctggccaacacggtgaaaccctatctctactaaaaataaaaaaaaatagccaggtgtggtggtgggcacctgtaatcccagctactcaggaggctgaggcatgagaatttcttgaacccaggagacagaggttgcaatgagccgagatcatgccattgcactccagcctggacaacagagtgagatctctgtcttaaaaaaaaaaaaaaaaaaaaaaaaaaaaaaaaaaaaaaaagctaaaattcataaacttaaaggatttttattagcagttaatagatattccgatattaactactatgttagatagtaaatgccaatgatttggtaaggtccctgcatctcaaaagtgaccctgaaaataatcaaggtacatatatcttaaggtattttgcaattcagattttttatttcactggacaaggcttctctttagttagtgtaaattagtgagggttgattgctaagttatttcagctttgtgcatgtatagatgctttacctatggaaggccaaaagattgaataaagacaattgttggaaatgttcccagaagtcatgtgggaatgaaccagtgtacttaaaatatggctcgggggtgtgtgtgtgtgaggaatagggtagaggtggagagagattgtgaattttgaagatttacattcacgaggtaatgaatttgacattaatttattttcagaaatagactgtggtacccctcctgaggttccagatggctatatcataggaaattatacgtctagtctgggcagccaggttcgttatgcttgcagagaaggattcttcagtgttccagaagatacagtttcaagctgcacaggcctgggcacatgggagtccccaaaattacattgccaaggtgagttttcaaaaaatacaggttcccaattcataccaccttgaaactgttttcatatttttctctaaatttcagtttcagggaataaatgagttaagtaaacctttaaaattcctatttgtttctcatagattttcaggtgattttcttgatttttcaggaatagtatcatatcatctgc

SEQ ID NO: 42539 - DNA, 2300 bp, Homo sapien
gcctgctaagaaaagagcttgtgaggccagatgcagtggctcactcctgtaatcccagcactttgggagaccaaggtgggaggattgcttgagccaaggagttggagaccagcctgggcaacatagccagatcttgtctctacaaaaaaaattttttaaatgagccaggcatgatgctgcgcccctgtagtcccagctactgggaggttgaggctagtggactacctgagcccaagaggttgaggctgtggtgagctgtgcactccagcttgggcaacagaacaagaccttgtctccccaagaggaaaaaagagcctaggaagatgagctttttctttgtttgtttttgtttgtttgtttttttaagagagggggtctcactgtattgcccacatgggccttgaattcctggactcaagcaattctcctgcccttcagcctctttagtagctgggactacaggcatgccacacttcacccagcttgaagttgatttttaactacttgttaagactccacaactttagcccttatatgggtgtgtttgaaagtggtgagatttacggcaggctcatggcagagagtaaacaagtgaggatatggggtgaagtagtggggtgcctgctctcggctgcgctcccacagacatcacaagctcaaagccttcaaaccggatcttatttatttccttctccccgactagtcataaaacctagtggattccactcttacacactgccctcttcacactcatttgtcaatgcccagctgcaggacacatctatctctatctctatctgtctgtctgtctgtctgtctgtctatctatctatctatctatctatctatctatctatctatctatctatctatctgtctatggagtctcactctgtcgcccagtccggagtgcagtggtgcgagctcggctcacttcaacctccgcctcctgggttcaagcaattctctcgcctcagctttccgagtagctgggattacaggtgcctgccaccgtgcccacctaattttttttttttcagtagagacggggtttcaccaagttggccaggctggtatcgagctcctgacctcaagtgatccacccgcctcgacctcccaaagtgttgggattacaggcgtgagccaccgcaccgggccaggacatgtcttctattgcctgattcctgcagcaactccgggctggactctttgccttccacatcccaacccaaccccaatcccaattccacagaacagacagagatgtgtcagtgatgaagtcattcactgcttgaaactgtgacagcttcccggcgacctccatcacttgggttaggagggctaacttccctctgcagctcaacgcccctctccaaccctctgctctcactctaggtccccattccccatttctacaacaaactcccgcttagattcctccccaacgtccttctcatccttgggtcttggtttactccttcccttgggatgagtacggctgtgatggaggtaggggctggcatcagcgcgtcccaagccgggtgtcctcagagcagcggggactgatgccagcccctccctccatcacagccctactctctctcactcccggtgaccaggtgtcacctggtcaagtgtgtcgcccctgggtggcctgggtctgcgtcttccgacctctcatctgggccttgcgctgtggtcacctcatccagctccctttcacgtcctggaagatttccgccccttgctcccctcacccctctccccgggggtgcctccctgagccctcgagtggcttgaatcctccgcaacatttcctccccagcactctccggggctctgcgtccagctgtgtcattatccgatgagtgtctgtccccctttgcgaatgtgagcggcgagagggcagcaagtgcggagccagagacggacgcggaacgggcgtgtcctaagcccaggccccgacaagaggaaggacccgcgctctgcggcctcccggggaccccgcagcgccccccgcttccctcggcggcgccggaagccgccggctggtcccctccccgcggcgcctgtagccttatctctgcaccctgagggccccgggaggaggcgcgggcgcgccgggagggaccggcggcggcatgggccgggggccctgggatgcgggcccgtctcgccgcctgctgccgctgttgctgctgctcggcctggcccgcggcgccgcgggagcgccgggccccgacggtgagtgcgggctgggacgggcacgggcggccggcggggcccccggctgggcctcg

SEQ ID NO: 42540 - DNA, 2300 bp, Homo sapien
gagctcagcttgcagacagactctgtagggcagaaaactggccttcagtatctttatggtagccttgacacattttctttctgtagttttcctttcctctttatttacttaaattgtatcaagtgttacagttcttcaaataattagaatatgaaatgcttttggtatttttaaaaggtctatcagttccagctgttcctggagctcttggtcctctcacaatcacctcttctgctgtcactggaaggatggccattcctggggctagtggtataccaggaaattctgttctactcgtcacaaatctcaatcctgatgtgagttgaaaagtattatatgtaaatagtctttcaggagaaggtatagtagcacttttttctttctttcttttcttttcttctcttctcttctcttctcttctcttctcttctcttctcttctcttctctcttctcttctcttctcttctcttctcttctcttctcttctcttctcttctcttcttttcttttcagaaaggattttactctgttactcaggcttcagtgtggtgctgcattcactcactgtgacctctgcttcctgggctcaagtgatcctcccacctcaggctctcaggtagctaggattacaggtgcccactaccacgcctggctaatttttttttttaattcttttgtaaaaacaggatcttgctatgttgcccaggctggtctcaagctcctgggctcaagcgacacacacctcagcctcccaaagtgctgggattacaggtgtgagccaccatgcctagccatggtagcttctgatccagggttgtattcaaattaaaatgcttaagtttgttttaagaacttctattaaaattcatcactagtatatacggaagaagcatataaaaccatgctttaaaataaaatcaactgccattacagtataaataaacttattttcaatttttacttaaattgtcagacacttaactttgtgttaccctttacagcttatcacaccacatgggctttttatcctatttggtaagttcatttttgctattttattattgtctacaggtgtgaattgagcacatttcacttttttagtaatatgtattgattacttctgtgtgccaagtattgtgctgacactgaggataaaacagtgaataagacttagtaagtaattacagtgatgatttatagtatgggaaatataggttttgtaaagggagtgtaacgcagggagacctaacctagcagagggactcaatagaaatgatagttaagctgacttgttcaacatgagtaagaatcagccaggcagaaagggagggcaatgtcttcacaggggaggggagaggggagagatgggtcctggtgcatggaagtgaaggaagcccagtggtgagcataggcaagcataatggagacctggtgaaggtggacagctgcgtagggtcaaaatcgtgaagagctgttaaaagctttgttaaggaatttggtttttacctaagaacaatcggaagccattgaataattttaaggcaagagagtggtataatgcgattcaggttttaaaaatagtctccaaactttcgaacagcatagaaatatgagaacaatgaaataagcaatatttactattttaaagatttttattaaggacagtttatttttccataaaacatgattaacatctaatgagcagtatgattaatatgctttgatattactaaaaatccttgttttcattttgattcagtaatccaagggtagattatttcactacttgattttaatggttgtcatagctgaagaagataaatcataaatatatataatctaaatgcaggggtttcattgttgctgtacttcaataattatttcattatttttttcatgtaatccaccaatttttgtcatgttttatctagaaaagttagattttttccccgtaaatcagtggatcttgaaaactgttgtgtttgaatatgtctgacaaatagagttaaaactcactgatatgcttcatttgtaagatttttaaaataagatagaaaactgcttccaaattttttgaatgtgatagttttagagacagggtctcactgtttcccaggctggagtgcagtggtgtgatcatagctcactgtagtctcaaactcttgggctcaagcagtcgtcctccctcagccttccaagtagctgggattataagtgcaagccacaacaccaggctgataggttttttttaatggaattttttcagatgtaatttacaaccatacagtttacctgcttt

SEQ ID NO: 42541 - DNA, 2300 bp, Homo sapien
ctgatattacttgtgtagctaaaaaaagggttaaggaaatttcatcaacagaatatatcccaaatacagtgatagaaagactgcatcagctacttatcttgttgatattctacatttccatctggcaatgtttacaaatgcaacttaatatttagatttaatatacaaaacaaaatgtatttgacattttggaaggggactgaggttagatacaggactttaagaattacctcaccgaattactctacctatttgaaaagttgtatgtcaaaaatatacataaacggactgaagaatccattcaacagtgacggctggaacctgattttcttgtgtattcatgcagtgcccggcacatagtaggttaatactgactgaatgatgaatgagtccacagtttagatctttttagcagcacctactgatctgaaagcaggaaattagcaaggatagatgtttgaggttcttgttagttgcttttcaaatgacgaagccacggggaggagccccgctcttttttactcagtaggttaagaatttggcttaacagtttagggggttacattttggtgatctgtgagttgaaaaagtactcaatttctcactaaaaagggaaaaaagcaagcgtgttgtcactcgttatattatatatatactttttgctcagaccagagggaagggctctggtgcaaacgtttcctggttgtgaaactgtgagcaaatcactctctttgtatatgtattttcatctgaaaaaagggaataatgagtaaacttttaaaaaatgctgggaatatagccattccatgtttgtacaatgaatttttcatataaattcaatactagacggttaggtcgaaatgcactcagatacttaaattgtatacaaattccagtccgggcagcctctttcacctcattcatcgtcccagccacacctatggggctggtgtcggtcccagcggtcgactccagcgccgggctgccagaggctggtccctggacgtgtcatctacagcctcgcgcacccggggcaattccacctcgtttctggggtccttgtgggacattccttcctactcttgggagtcaggtccccatagcttttcctgccggcagagggaggcattcaaacctggcaggcccggtctgcgaagccggaaggcccgcggggccgcgggagggcgggcggggtgcgcggcggagcgggaagcacaaggcgcgcgctcccgcgaacgcaggagggaggctgggggcgcgcgcgcgcgccgggccgaggggccgagaggcggggtcttacagcgaccgcgggaagagggcgccccagagctgagccggaggccggctgccagcggggcgagggtgggcgcgagcgcaggggcgggccccgagggagggcggggacggtgagggggcggggtcgggctaggcggggacgcgctcgcggggtggggaaggcgggggcgcggcggtggcgggagcgtgcccggtccccgcccctgttcccactctccttccacctcggaccggccggggctccgcagagccaaagctcgcttgtccccggaaccgccctgctgccgccgcctgcttcctctgctcgcggttagcccgtcagtccctgctctgtgcgcgcctccatctgggccatggatgggtaagtactaggcggcgcggcggccgcaccgggttgccttggcgccgcttccacccggctctccgcgggacgcgtaagggctggggagcagtgcgcggcgccggcggccggaggagcggccccggccaagcccgacggcggggcttccgggcgtctcggtggggatcccggaatcgcggagttgccgtccgccgcaggctctcctttccccacgcggcgccccggacacgtccgctgcttcctagccttactcgacacacccgggagcagaggaaagcccggtccggccgcggtgccgaggtccgccctccgcgccccgagtccggggagcccagctcggcctcccgacacttcctctcagaaaatggtgcgcggcgctgggggaggcggaggcggcgcgcggggcgggcgtcctcctgccgggggagttgctgtttaccggcgaggtggggcgagcggccgacggcgggtgcacgcgtcggtacacgtctgggcggcgacctggtcgcaagccatggtcccacgcggggtcccagggccgccgcgggacttggccgaggtctcccgacttgtgctgtgagatacgttaacgctttctcgacaccaggggtctggacttagtgaccatggacgcttccccctc

SEQ ID NO: 42542 - DNA, 2300 bp, Homo sapien
gcttcgaactcctgaccttaagtgatctgcccgcctcggcctcccaaagtgctgggattacaggtgtgagccaccatgcccagctataatccaggatttttaggtgaaaaaaaaaaaaaaaaaaaagaaaaatggtaaaggtcgctgggtgcggtggctcacacctgtaatcccagcactttgggaggctgaggtgggtggatcacaaggtcaggagttcgagaccagcctgaccaacatggtgaaaccctgtctctactaaaaacacaaaaactagccaggcgtggtggcgggcgcctgtaatcgcagctactcaggaggctgaggcaggagaatcacttgaactcgggaggcagaggttgcagtgagctcagattgtgccactgcactccagcctgggagacagagcaagactccgtctcaaaacaaaaaaacaaaaaaacaaaaaaacaaacaacaaaaaaaagtaaggtccagaaggatgcacgcagaattgttacagtggtagtcatgggcagggggtggtttgggaagaaaaatattaatgataacttttcaatattttatagtgcttgaattttccaaaatgagcatttatgctgatattacttgtgtagctaaaaaaagggttaaggaaatttcatcaacagaatatatcccaaatacagtgatagaaagactgcatcagctacttatcttgttgatattctacatttccatctggcaatgtttacaaatgcaacttaatatttagatttaatatacaaaacaaaatgtatttgacattttggaaggggactgaggttagatacaggactttaagaattacctcaccgaattactctacctatttgaaaagttgtatgtcaaaaatatacataaacggactgaagaatccattcaacagtgacggctggaacctgattttcttgtgtattcatgcagtgcccggcacatagtaggttaatactgactgaatgatgaatgagtccacagtttagatctttttagcagcacctactgatctgaaagcaggaaattagcaaggatagatgtttgaggttcttgttagttgcttttcaaatgacgaagccacggggaggagccccgctcttttttactcagtaggttaagaatttggcttaacagtttagggggttacattttggtgatctgtgagttgaaaaagtactcaatttctcactaaaaagggaaaaaagcaagcgtgttgtcactcgttatattatatatatactttttgctcagaccagagggaagggctctggtgcaaacgtttcctggttgtgaaactgtgagcaaatcactctctttgtatatgtattttcatctgaaaaaagggaataatgagtaaacttttaaaaaatgctgggaatatagccattccatgtttgtacaatgaatttttcatataaattcaatactagacggttaggtcgaaatgcactcagatacttaaattgtatacaaattccagtccgggcagcctctttcacctcattcatcgtcccagccacacctatggggctggtgtcggtcccagcggtcgactccagcgccgggctgccagaggctggtccctggacgtgtcatctacagcctcgcgcacccggggcaattccacctcgtttctggggtccttgtgggacattccttcctactcttgggagtcaggtccccatagcttttcctgccggcagagggaggcattcaaacctggcaggcccggtctgcgaagccggaaggcccgcggggccgcgggagggcgggcggggtgcgcggcggagcgggaagcacaaggcgcgcgctcccgcgaacgcaggagggaggctgggggcgcgcgcgcgcgccgggccgaggggccgagaggcggggtcttacagcgaccgcgggaagagggcgccccagagctgagccggaggccggctgccagcggggcgagggtgggcgcgagcgcaggggcgggccccgagggagggcggggacggtgagggggcggggtcgggctaggcggggacgcgctcgcggggtggggaaggcgggggcgcggcggtggcgggagcgtgcccggtccccgcccctgttcccactctccttccacctcggaccggccggggctccgcagagccaaagctcgcttgtccccggaaccgccctgctgccgccgcctgcttcctctgctcgcggttagcccgtcagtccctgctctgtgcgcgcctccatctgggccatggatgggtaagtactaggcggcgcggcggccgcaccgggttgccttggcg

SEQ ID NO: 42543 - DNA, 2300 bp, Homo sapien
tcaccactgataccatcttccccctttgctcctacatctaatcattagttacatctgccaggttccatatcttgagtatgtcttttcatttctactattactgccttagttcaggttactacttttcttacacattacattactatgggcttttaaatggcttctgtgcctttatctactcacaaactattcttcatgctgcagtcagaagtgttctaagccaaaattattcaccttccaaaatgaagatctaattatgttcacaagtcctctccttcacccattcctcacctctagcattaatctaacactaggttaatcaaggtaatggggtagaaggtcatgggtaactccaaatcacactttaaatgaactctagtcaaagtactgaatacaatggatttaaacttgcttggtaaaactacctctaataatttaggaatatatttgccttctgtgaaagccatcgcaaagtataaaaatagtgtaagtacaggtatttaggctcacaaaatatcgttatgactgaaaaattggcaaaggttttttgtttgctttgcctcttcgttgagctctctttccgtaacaaatggaaatagaagcacacaaattcaagaaaggaggctctaacagactgaagatattgtggctttcaaaaaggagagaacattttagatgatatgaaggaaatgtcaccccgttactaagaattcactctattcgacagatatatacacgcttcagcaagtgctcctaaggatgagaggagagtaagttattttcatctaacagtctctatcaacactcttcttaaaacacctaatgcttaacaacagtctaaagaacacactggctactcatacctcccataggcagagaccttgtcctttttgagctgctgtatctcaggtaatcagcaatcacttagtggatgataataatttgcaaattcctctggagcctctaaagaccgtatcatgaatcatcaattcaaatgcctacaggagtcgggcaggtgatatgcaggaggaaatagagtcatttagggcccataacaaaggggagagaggccgggcgcggaggctcacgcctgtaatcccagcactttggaaggccgaggcgggccaatcatttgaggtcaggagctcgagaccagccagcccaacatggcgaaaccccgtctctactaaaaacacaaaaaaattagccaggcgtggtgatgcatgcctgtagtcccagctactccggaggctgagggaggagaatcacttgaacccgggaggcggaggttacaatgagccgagatccgcgccactgcacttcagcgtgggcgacagcgagactccgtctcaaaaaacaaaacaaaaacaaaggagagagtacataagccatctccaggctagtttctttaactagtcttcatataataatctcctcaaggtcctgttctatccctacaaaatacaaaacagttcctcgtgtcttccttcaaatatactacagtctttagctcatcagagtagctgagttagtccaaggcataatcccaaaagcgaaactgaatgtcagaattgatctcatttcaacactcattccagaagtagaaacttctgcaagttcagcttttgactatgaattcttcagcgcgacttttgcagagagctctgttccaagaagctggcgccttaacacaagctatctaccgatgcacaagggaaggctggcttgggtccagattcggcgggagagtggaaacgcgacgctggccgacttcagccacaaaggcaatttctgcccagggctagcgttcctaagagggggccgagagaacgccaggctcgggcgtaggggcaagaagacccagagctaacgcacctctcggagggcccaagctcagggctcagtcaccctcccagctcggagccggcgctggaacacagcggcgcgaggagaaacccctagagacagggaaaaggtggacgtagcggctgacgctgcccagacgctaggcgccgacaggagcctgattgtcaccgtacgaccagtgagggggcggggcggagctgtgcctcaaagcgcctgcgcggagagcctgcaatcagggaccaggcttgggaggcgacgaagaggaacgctgggcgcaggaggcccactgcatacgcaggcgcactcggcgatcccggcttttccgcgcgcagttcccgcacaggcatcggggggggcaggggcggggcaggggcggggataaatgcggagggacggtccagctttagctctctgctcgccgccgccgctgtcgc

SEQ ID NO: 42544 - DNA, 2300 bp, Homo sapien
tcatgctaagtgcaaggcagaagtggattgcccccagtgcaggcaataaaggggtacactgtagtaaattttaaaacaataataaaacaggctaaaaaaattctttaaggctttcatctctaatatctgttcgtactttaacttataaaaggaaaatgattttttttatttgtggaaacatcataatgaaaggcaatttatattcagtatactttatgaattaatagcttactttgtactatggagtatctttatgctgtcaattagatttcatgtaataacctttgaggaattgtattagacaagatggctgtgtataatttgagttgagaaacagattcaccttcagcctagagcacagattggccttggagttaatttaattaacgaattgttcttacctgtttctgggggcaactacttagctgcctctatgtgattctagaatgataaataaaggaacagagaggccgggcacggtggctcacgcctgcaatcccagcactttgggaggccaatgtgggtggatcacctgaggtaaggagtttgagaccagcctggccaacatggtgaaaccctgtctctactaaaaattcaaaaattagccgggcacggtggtgggcacctgtagtcccacctactcgggaggctgaagctggagaatcacttgaaccaggagacggaggttgcagtgagccgagatcaagccactgcactccagcctgggtgacaaagcgagactgtctcaaaaataaataaaggaacagagacagtattggggggcagcatcatgatatgggagcaaagcagtcctatgaactgctgtcttctcccctggctgatcatatgttaagttgttatagccagtgggttaagtgaatgcaagttttaaaatgttgcaggtaacctccattcccgtgacctagtgtttccagagagggcagcctgttagtcaggggactaacagtttaacctcccttttcatctagtgggagggataatctgaataagtgagacagggagaagaaactgaggttgtgtgtcagacccttctgagcattctctctttctgagcaggctgtcctcagttttttacatgatctctacttaagagcatttctaacccgtgatgggaggatgcagggtcaatccatgggtgaaaggactaggtgaatagattgaatttagaggtggagtgattagaaagtacacttgggtgttgattcaagctacagtcttcagtttagctccaccagttccacagctgatattttgatttccatctttctgattccaatgtctttttgttctcatttggttttagaactgagagaaattgacaaaggagtgattgattatcatccctcatactccagtagttgtgtttaggtctgtttcttttatttatttttttgagacagggtctccctctgtcaccaaggctggagtgcagtagcgtgatctcggctcactgcagcctctacctcccaggctcaagtgatcctctcacctcagcctcccaagtagctgggactacaggcaccaaccaccacgcccagctaatttttgtattttttgtagagacagggtttctccatgttgcccaggctggtctcgaactcctgggctcaagtgatccacccgccttggcctcccaaagtgctggaattacatgcatgagccgccacgcccagccttggcctcacaaagtactcagattatagaaggtttgtttatgataaatatttatagtttagtagtattttttaacctaatctgaaagtcagccttttatttggagagtataaagatttacatttatagtcataattgatgtgtgtttgactgttattctgtcaatttgatttatgcttttagatgccacttaatgcatttaaagtcattttggtcaaataggtctaattggtggcaagtctgtcctgctgattaattaattctgtgtggggtccttcactgccaagcattaaggtcatttgcttcaataatatcttataggtgctgttccagaattcaaagaagagaaactgcagctgcaaccaaaaccacgttctggagctgtggaagaaacatttagaattgttaaggactctctcagtgatgatgttgttaaagccactcaagcaatctatctgtttgaactctccggtaaggactgcatctggtaatctgaagtttttatgaaacaaaatggggtgtttcctttggaagaaaatcagcgtccaacagtgatcccctggatagttggctgcattcaagacccttactcttgaatgtagaca

SEQ ID NO: 42545 - DNA, 2300 bp, Homo sapien
tagcaaccactattctaccgtcttgtttccacaagtttgacataatcccacagtttacatacctctacatagttcatataggtcaaatcataacagtatttgtccttttgtgactggtttattgcacttggcacaacatcctcaaggttcatctatgttgtagcctgtgataagatttccttcctttttaaggctgaataatattccattatatgtatatatcacattttcattcatctcttcatctgttgatgaacatttgggctgcttcaacctcttggctattgtgaatagtgctgcaatgaacatgaatgtgcaaatatctcttcgatatcctgctttcaattcttttggatatttacccagaagtgggattgctggatcatatggtagctctagttttagttttttgaggaacttccccactgttttgcatagtggtggtaccatctacattcctatcagcattgcataagagttccaatttctccacaagatcccatctttagaatatgcagcaattaactagggggttttcatttttggtcttttttgtttgtacaaacattattgtgtcaacatttacacagattttaaatttcagcctagacctggaagagtgttgatagaggaaggtgttaagaacatcaaccggaatcagctctagagatggagaggggttggcagaagctacctaaaagagaacatgcttgatgtggtaatgaagttacctgcttggattctggacgaccctggatattttctcctttgctaagaagttagcttctttctctccctcaaaaatattcttctcttcccttacctactccaagggtacaagtgactggggtatgcctgtcacagatgaggtgaggccaagatgtgggcactacgtaaggcctgacagatatggtgtaaatgttatttattaccatgattactgttttggagatggtcagtgctgtaaatagaaagggagttaagagcagactctgaagccagactgtccggaatgaatccaggctcctctagctactatctatgtgatgttgaaaaaatttcttaatttctctgtgcctcagtttccttatcataaaatggcaatgttaatagcacccactatgtagagttcttaggattaaataaattaatattcgctaagtactcagtgcaaactgtgggcacacagcaagtactacgaaagtgttaggtaaaataaaggtggaccaagcctggtagcacctagcaagtccagcttcatctttgctgtgctgagtcgtgtaggtggtgttcttgtgtctctggtttgctggaggacctagttttagtgtattttaggtatcattaagcatccccgctccctcgatgggataggggtgtgtgtgttacaggtggttgttgggcaccttcacggggcagcggtgactatgggctgtacgtagtatctcggtagaaagtgttaatgcacatccctgggcggagaggtaactctactcaatgcgttataagggaaatcacacacctcacggatggtgtaggttctgtctgctccttgcgtttcagtggaggtgcacagagctccggggggcatcggggaccgcgggcccaggacgtgtagtagggagcagtgctgtacacttcctcggaccatagcggggacggcgggttccacacctgtcggggcagtagggactgagctcgtgcgcgcggaggatggattgctccaacctctcggtccagcgcgccggccgccgcgtgcgaacgtgtgtgcggcaggaggctcgatctacacctcctcggggcagcaacgactgcgagctcggtgcgtgccgtaggaggtgtcgttacacacttcctgtgggtctcgccgaccacggcgcgtttccggtgccggctggagcccggggtccgagcccccgccccgctcgccggccccgccccggcccgcccgcgccccgccccctgcccgcccgccgcgctccgagccgggcgcgcggagctcggggcgcacggagcggcgcgcggcggtcggccgagccaggctggcgcccccgccccccgccccgctcctcggtccgccgcccgccgggcgccttccccgctccacttacctttggtgcccggccctctggccgctctcctcccgccctcgcgccccttcggcccgtcccgtccagcccgggctgcccggctctcgcaggcccccccgcgccgaccgcgttcctatggacagacgcacagacacctgcaggtgggtgagagcccgcgcgcggggcggggacgagtgcgccgacgccgcg

SEQ ID NO: 42546 - DNA, 2300 bp, Homo sapien
aaaagtgcattaaattgtacactgtttactaattttcaaaccttaatgaaaatttaaatacataattttccacgtttttccttcaagtttagatgataatgctttttgtttttttaggaaaacctctattttttacatatgactgtccatataattgtatgcatggcccccaaaactgcttcttcgtttttttaatctcctgggtaactgtcagacttaactttgtcaatataaattctcacagggtgggcaaaaaagagtttccagaacggagcagtagattgagattgatacaggcataaatccatacctgcgtattaaaaatctgaatctgtaaaattaattttctgggtgcttattcaacctcatttattatttgagtatctacaatacacagcaaccgttcatgaagaaacttagctagctaatcaaataagacaattcagaaacatcaccctacagtatttttcaaaacactgtatccatatccatgcacaacccaatcgttgggttatatacgtggaataaaatagtaaaggcacaatcctagaggggaaactcaattctgacattcatggtctcatgggtagggaaagatctcatatcttaaatcagcagaaataaaggcttcagcctgaagggaaagctagatcattgtttattgcactccaatttaacctccaccatggaagctgtcactacctgactggcttgttagctgtttatttcgtcgggagaggattccgtcttgcgaatcctaacgagttcgggaaaaaacaaaactttactcctaaacttcaaaacacacacacacacacacacacacacacgcacacacactaaatacatataattgtaaaaatcacagccacgttcattttttttaaagtcccaatctaaaaccttaaagaaaaaaaaagacttgaaggaaccaaaaacattctttgattttggtttgacgttgttcagtccaacctcctcctacccaggggaatacatttctcgatatatttgataacaaacacaaatcactgtgcgcagcctcagatgggggtgggggggcggaagagccttttggagaaagccctcctccgttagaaacaataaataagggagcgaagccatgcacgttccttcacacacgccccaaacgcacctcggcgagccacccgaggaggaaaactagtggggcagagccctgaaccacctctctttctccataagcatctcaagacttggaaactaagaggacagaccttttcctcctccttcccgccctccttcccacctccgacagacccaagagcaggagcgggggcgccagccccacgcactgcgcctgcagccgccgctgagacccgagctgccgggcggcggggcggcccggggcaggcggaccggagccgccaccgggggtctctgcgcctcgcacccccaagcccggcgctgccgacgagcggccgcccgggtccctgccctcgctccggcctcgctcccccgagaggagacaaaaggaaggttcagccgggtcaccgcgcggccgctgacggggaagcagagtcgaccccggcgcggccgccccccacacaaaggggctccccgcctgggtcgcggcgtcggcgcactcgtccccgccccgcgcgcgggctctcacccacctgcaggtgtctgtgcgtctgtccataggaacgcggtcggcgcgggggggcctgcgagagccgggcagcccgggctggacgggacgggccgaaggggcgcgagggcgggaggagagcggccagagggccgggcaccaaaggtaagtggagcggggaaggcgcccggcgggcggcggaccgaggagcggggcggggggcgggggcgccagcctggctcggccgaccgccgcgcgccgctccgtgcgccccgagctccgcgcgcccggctcggagcgcggcgggcgggcagggggcggggcgcgggcgggccggggcggggccggcgagcggggcgggggctcggaccccgggctccagccggcaccggaaacgcgccgtggtcggcgagacccacaggaagtgtgtaacgacacctcctacggcacgcaccgagctcgcagtcgttgctgccccgaggaggtgtagatcgagcctcctgccgcacacacgttcgcacgcggcggccggcgcgctggaccgagaggttggagcaatccatcctccgcgcgcacgagctcagtccctactgccccgacaggtgtggaacccgccgtccccgctatggtccgaggaagtgtacagcactgctccctactacacgtc

SEQ ID NO: 42547 - DNA, 2300 bp, Homo sapien
aagggggtctggaaagatgccaataggaagtagccgcaggttcagttttgaagaggctggccaggtgaggaaagagaagggcagcatatcaagccaaagaatcagattctcaccagtagggggtttagagaagaggggaccacaagaagtgtgggaagaggccatggtcgtaggaaatgaggcttgagaggtggccgtggccacatcaacagagaccttaatagtatgttaaaggatttgaacttacctaacctccctgacagggcgccatggagtcagggcagggaatggctcaggtgtctgtccactttggtgtaaccacctgacattgtggttagaccatggtgcctgactgcagagcaccagcggggcacctcttgtcacccacagctgcagatagccagggccgacaaaatcacacataaagattcctgtgcctccctgaccagtgctcccaggacccccctcttggcagagccttactaacctttccagccccttgcagactccacatgtcccctttcactttcctacccatcatgttgtcctcactcctcagggactcctaacaagggcttctttttgtctcctgcctaataaggaatgatttgcttctatttgatagttggttatgcttggctttatgagaccctcagatggtagaaaacaccagacatactttgtaacctctaatggtgggatgaaaggcaatatttcaggaattgcagacagccaggagacaggaagcctggtcctaagagtggttagagcagggcctcccgcttccccatccttgcttctttggtctacagccttcccctccagcaggtctcctcccagtctgttctcccttctctgcttttctttcccacttctcaaatcgagcccctcatcctctccttggactcccagttgcattgtcttctggtgcccagtagaggactggcttgctctctctgacctccgtcctaagatggatctaaacctcctttgttggctctgcctctagtagtaaagtttctgatgacaaagggtgtcattggagctgcatcctcttggttaatgcaagtaatagacacaattttattattgagggaccatctgaacctctctgtcagtgactttggaagtaaaatgtaccatggaaaagctcatttctttattgcttgtttctctttttctttctctcctttctttccccccttaggcaggaattattataacaataaagaaaagtaacaaaatttttctccaaatcccacaaccatcagtcatcagctgtttttacttttcctggtattctcttccagtccctgctcatctacagcgaccttaactagattcagttttgaagtgcgttttttttttatgccaaatgatcatatttggaacaaactgaagtaattgagctataggattatcttgggtaataatggcttcttcttttgattatttccctttaggagtgacactgctgatcctgtaacatggaggattgtcttcatacctcatctgagaatctgtccaaattggtcagctgggcccatagccatgggactatttgcagcctcattccaaacctgaaacacttgctttctgaaggttcccatgggaacctgacagcaatgtggggctgtagtgctggccatgcttatcactggccactaacagctacttgcagagctgggtcccaagagagggtctgtttccaggataacagaagttttaactctgatagtcccagtataatcggggtgccctctgagacacagactagccctgttgaaaggtaccctgggagaccagtgaaagcaaagctagactgtaaccggaccagagactcttgtgacttctcctactgtagtgagccctctgaactggatgaaactgttgaagaatatgaagatgagaacaccctgtttgacatggtttgtgagtcttctgttacagatgaggatagtgactttgaaccccaaacccaaaggcctcaaagcattgctcgcaaaagacctggggtagtcccatcttccctccattcaagctcccagacgcagatggttgacgaatgcagcaatgatgtcatcatcaagaaaatcaaacaagaaatccccgaagattattacattgtggcaaatgcagaactgacaggaggagtagatggaccagccctgtccttgacacagatggcaaaacccaagcctcagactcacgctggtccctcctgtgtagggtctgctaaactgattccccatgtcacatctgccatcagcacggagctagacccacacggtatgtctgca

SEQ ID NO: 42548 - DNA, 2300 bp, Homo sapien
aaatcctccatattcagtgctttcattgtgtataattatgtaaactgtagacaaaaaatattcctgaatttgtgtgtgtgtgtgtgtgtgtgtgtgtgtgtgtgcggatgcgcaatccgagatggttgttaaagctcgaaagcgagtttagcttctagagtcgcccctcctccgaggcccagccgaggtggactcgcaccgtcgcaagaccggccaggcggtggcaatgaataaaaagccagtcttggtgctagggacccaggtgttctccgtcccgcccctgcctggcagccccgcccctcccccgccccgggccacgccccaccctggcccagcccccaaaagtaccgtttgcatctcccgtgagcctcttcgactgtcactctttggaaaaaaaagtgacgtctgcactgaggtggccgctaaagtgcgaatcacgacgggcggtggccgttgggtcccggcgggaggcggggtttccgctccctggggcgcacgtcagtcaggaggcggaagcgcagcgggggcgggaaggttgtagtgccgcgagttgagctcctcttgcctaagtggtcgcgccccctttaagagcagcgattgtaaggagaggcggtcccggtgtcctcgggtcccaggtaagtacgacagtctggaggcaccgggcaatagaaaagtgtggctccggtgctaacctgtcgccgccgtctttgttgctacaggcagcgacctcccttccgaccttgccacctaacatttctggctcctacttgcttccttcgtctcgttcacagcccgggcccagccggctctgcacatccgtaggcagggacctttctggcacgccagtctaccctgtcacaagatggccctgttgtcctccagtcctaaccccgcattgctcgctctgtgtttcagccgctggagacacctaacgattcatttactaaaaaccggtgtctgttttctatcccttgtgtctttcccgggctccctagactaaggcatcactctttgctgccaatgaaatcaattctttgcctccggcactgtgcccaccttttaaagagcgggtttgttaagctttttttttttttaattaatagtatggttgcttgaataagactttattttcccttctgaaagcaggattagggtcttgctcatcttggatctccccaggatttagtacgaaagcacgaagtttggaaaccagcagcccaaataattcctactagctctatgaccctgggtacggtttcctcatctataaaatggtgataaataaataaaggaactaatttcgagcatgttacacagtgtatggtgcagagcagatacagtactcctttaccttttttagctttcagtgtacacagtagtttttgggtatgtgttttagacgaatgcagagacaccatagatgaatgatttttcttcctagcaccatgattatattgactctatcaattggttgatatatttggtaaatacaacctaatgacgtttattaaagacagtaatgctaaatggtatgaacatctgcaagaataaacaatgccgtatttaattaaatgcttgaggcactagcagagtttacatttgtttcagtctgtgtacatttcaaatgtatctttctttcttttctttttttttttttttgagaccgagtctcgctgtctcgctctgtggcccaaactggagtgcagtggcgcgatctcggctcactgcaacctccgccacccgggttcaagtgattctcccgtctcgccctcccgagtagctgggactgcaggcgcttgccaccacacccggctgatttttttttttaattttatttttagtagagactgggtttcaccatgttagccaggatggtctcgatctgctgacctcgtgatccgcccgcctcggcctcccaaagtgctgggattacaggcgtgagccaccgcgcccggcacaaatgtatctttctgaagagattaagaaacagcaaacatttcattgtaaggaggctagctgttccttttagtttgtgattaaaatatggtgcattgtatatgtgtgtacacatattttataggtgattgtgaagtgctgaccaattgccactggacatacttgaaacaaaataggaaaatggcagcaaactcttcaggacaaggtaatgacagcaggaatttctttactatgaacatttccccaatatagtaaatgtatttgaataagagaaaatttagcatagggcagttactgtagccagaatttaaaaaatgaatagcaggccgggagcggtggctcac

SEQ ID NO: 42549 - DNA, 2300 bp, Homo sapien
tcaagcaatcctcctgccttggcctcccaaagtgctgtgattacaggcatgagccaccacacccaggctcagctgatctactgaccacttgccaagacacccagtaaaacagattgttcattgtttatattctaatagtcaacatttattgagttcttattatgtgccaggtgctattctaagtgatttacgtatacccaatcacttatttttattcccattttatagatgacaaaacagaggcaccaaaaggttaaaccagggctcaccatcattaagtggcaaagctcgaatttgcattcaagtaaactgactcactattaaccactgtgttagaggttaacacaatgaggcagaagttccaaaaactctaggagaagacagaagggtttcaagggctatgacctaccaagtaaaaggcaaaagaattggcagcaagttaaatttatctttctcctgataatgttctttcaactctcagaggctgaatttgctaagaaattataaaatgttgtttagggttagaactgtttttactcccacctccttaaataagctttgttcagaatgtccatttgaaacttagactggaactttctgtgccctagtttctatattagctaggccacaaaacaaaaaaaaattctaaggttctatcagccatatagatctcagtcatctttttagtcatactagaactcaccaagtcctcttaactgaaaggactcctggcctaccatcaaaatgctcatgtgttaggctttatatctggattaaagtcaagtcagcaagaactggtctcagaggaattcattcctccagagcagaggcaatgtgtgagatttaagaactcaggccttagcatctggcagatctttaaatttgaatcttagctcgctacttgacatagagcaagaaacatgagtctcaaatataaatcagggaacagcaggaccagagctgatgcacaggaagcacctcgcattgtagaaggcactcaatagctgcttggtatagagtaaatacatgcttggttttcagtaaataaatacttgatattgaaacgattatttcagtcattgatccatgcacaagaaaattgtgcatcataaacattttactcttgagcaaacatcaattattaaaaacatatgttcaaattcattatccattctatttaattaaatgcttgaggcgcttggggagcttacatttgtgatttaagtctgtgcgtttttcaaatgtatctttcggaagagattaagacactgcaattttaagcagggcaggtggctcacgcctgtaatcccagcactttgggaggctgaggtgggcagatcccttgaggccaggagttcaagaccagcctgggcaacaaagcgagacactgtcaccataaaaaatatttttttaaattaaaaagagtgcaatttgaacacatgtcaatatacgattaccttttaattcaaatgtgtagctatctactgtgctggaatcaggtgggcagcaggtgatcccactagtggcaacttggtgttctgcgatgtggcacatccacttcttaaatgcagattattgcactgtaataaaaatcctccatattcagtgctttcattgtgtataattatgtaaactgtagacaaaaaatattcctgaatttgtgtgtgtgtgtgtgtgtgtgtgtgtgtgtgtgcggatgcgcaatccgagatggttgttaaagctcgaaagcgagtttagcttctagagtcgcccctcctccgaggcccagccgaggtggactcgcaccgtcgcaagaccggccaggcggtggcaatgaataaaaagccagtcttggtgctagggacccaggtgttctccgtcccgcccctgcctggcagccccgcccctcccccgccccgggccacgccccaccctggcccagcccccaaaagtaccgtttgcatctcccgtgagcctcttcgactgtcactctttggaaaaaaaagtgacgtctgcactgaggtggccgctaaagtgcgaatcacgacgggcggtggccgttgggtcccggcgggaggcggggtttccgctccctggggcgcacgtcagtcaggaggcggaagcgcagcgggggcgggaaggttgtagtgccgcgagttgagctcctcttgcctaagtggtcgcgccccctttaagagcagcgattgtaaggagaggcggtcccggtgtcctcgggtcccaggtaagtacgacagtctggaggcaccgggcaatagaaaagtgtggctccggtgctaacctgtcgccgccgtctttgt

SEQ ID NO: 42550 - DNA, 2300 bp, Homo sapien
acgttggcctgccttgctagattggggaagttctcctggataatatcctgcagagtgttttccaacttggttccattctccacatcactttcaggtacaccaatcagacgtagatttggtcttttcacatagtcccatatttcttggaggctttgctcatttctttttattcttttttctctaaacttcccttctcgcttcatttcattcatttcatcttccattgttgataccctttcttccagttgatcgcatcggctcctgaggcttctgcattcttcacgtagttctcgagccttggttttcagctccatcagctcctttaagcacttctctgtattggttattctagttatacattcttctaaatttttttcaaagttttcaacttctttgcctttggtttgaatgtcctcccgtagctcagagtaatttgatcgtctgaagccttcttctctcagctcgtcaaaatcattctccatccagctttgttctgttgctggtgaggaactgcgttcctttggaggaggagaggcgctctgcgttttagagtttccagtttttctgttctgttttttccccatctttgtggttttatctacttttggtctttgatgatggtgatgtacagatgggttttcggtgtagatgtcctttctggttgttagttttccttctaacagacaggaccctcagctgcaggtctgttggaataccctgccgtgtgaggtgtcagtgtgcccctgctggggggtgcctcccagttaggctgctcgggggtcaggagtcagggacccacttgaggaggcagtctgcccgttctcagatctccagctgcgtgctgggagaaccactgctctcttcaaagctgtcagacagggacacttaagtctgcagaggttactgctgtctttttgtttgtctgtgccctgcccccagaggtggagcctacagaggcaggcaggcctccttgagctgtggtgggctccacccagtttgagcttcccggctgctttgtttacctaagcaagcctgggcaatggcgggcgcccctcccccagcctcgttgccgccttgcagtttgatctcagactgctgtgctagcaatcagcgagattccgtgggcgtaggaccctccgagccaggtgtgggatatagtctcgtggtgcgccgtttcttaagccggtctgaaaagcgcaatattcgggtgggagtgacccgattttccaggtgcatccgtcacccctttctttgactcggaaagggaactccctgaccccttgcgcttcccaggtgaggcaatgcctcgccctgcttcggctcgcgcacggtgcgcacacacactggcctgcgcccactgtctggcactccctagtgagatgaacccggtacctcagatggaaatgcagaaatcaccgtcttctgcgtcgctcacgctgggagctgtagaccggagctgttcctattcggccatcttggctcctccgcagaggtttgttttttttttttaaatggagtttcgctcttgttgcccaggttggagtgcaatggcgcagtctcggctcactgcaacctccgcctcccaggttcaagcaattctcctgcctcagcttcccgagtagctgggatcacaggcatgcaccaccatgtccagctaatttttgtatatttagtagagacggggtttcaccatgttggccaggctggtctcaaactcgtgacctcaggtgagccacctgtctcggcctcccaaagtgctgggattacaggcgtgagccactgcgcccagccccttgttgaggtttgatgatggtggggccattatgttctctgcccttgaactgcttacttatattggtttctccagcacttcctaaaagatgaattggcatgaaattgattcaaagcactaccatagtttgtttctcttggtcgtaaaagatttgttcactcaagaaacactgagtagggagaggctcaggtgtttcgaaagttatttttgggttttagaaatgtttattggtttggctaaaccagctgcttttgctgatactctccagtatgttttcatttaattttaaggtgctcttttcttcttttaggatctcattttgcccaacggtggtactccagcaggtacttcaagtccagcttcttcatcttcccttctcaacagacttcagcttgatgatgatattgatggtgagactagagatctcttcgttatagttgatgatcccaagaagcatgtgtgtacaatggagacttacatcacctataggatcaccaccaaagtaggt

SEQ ID NO: 42551 - DNA, 2300 bp, Homo sapien
ttagatacatttgcactcaaactgggaaccattgatcgaatagcccagcggatcatcaaagaagaaataggtgagctgtctgttgaggtctcgattatgccctgcagccacattggcagaaatgccattcatgtgtgctacagagaatcaaactgcaaaatgctggagtgacagaactaggccatcttttgcttatcaaagaaatacaaggaggggaggagttacttgtgactggaatgtcactttgcaccccgtcctttgtcctgctgtgtcagccttgtgtttgcttttcccatggccagcactgctgattcgccaggtgtttcctcttttatgctctcttaactttagctttaaaagtggagacatagactcaactgcccttcatccatagggaacaataatttagtaaacaaacttagataccttttctggcagaaagatggttcagaaagatagcatggagacctgtgtttgccaaagttatgaccctgatgaatcttcagacttgtaattgactcacccaccccaccgtggttcattttaaacccactcctgcatgggggagttgccagggcctgtattgatccttcctcgtttttgcctccacttccttcccacccctctcggggccacctgctttgccacatcccataatgttgggatcttttatctccttacatatgcatggggcggacagacgtgagcagtgtaaatgatcgcactggcatgggaagcacgttgaggattccccagcagttgccattcatcggtcactaagccatgatgactgtgttctgttgcaacaatggcaagactcttggtgacaaatgatgggccagattttctttacgggggaaaaaaatcaacattttttttttctcatttcttgtacttgttccctctacttgacccactgatgataccatgtggggcccataggttttggagatagctgtggataccatccacacctaaggatcttgcagagtaaattctgatgggatccaaggggctgaggtggccaccgagtgatagagtgagtctgccagtgtaagaccacatctcttgtatcaaaatgtttcctaaaattccattgtttatccattgtgactgtttttgtttttcgttttttggtttttggttttttttttgagacagagtcttgctctgtcgcccaggctggagtgcagtggcaccatctcggctcactgcaagcgccgcctcccgggttcacgccattctcctgcctcagcctcctgagtagctgggactacaggtgcccgccaccacgcctggctaattttttgtatttttagtagagattgggtttcaccatgttagtcaggatggtctcgatctcctgaccccatgatccacccacctcggcctcccaaagtgctgggattacaggtgtgagccaccgtgcctggcccctgattttattttttaacctttaaaaacatctccctaaacctatatgaaactctgcctccattgcctgttaaaatactgcttcacactatgggtaggcgagtggttcttttctttttttttttttttttttttttgacggagtctcgctttgttgcccaggctagagtgcagtggagtgatcttggctcactgcaacctctgcctcctgggttcaagcaattctcctgcctcagcctcctgagtagttgggactataggcgcctgccaccacacccggctaatttttttgtatttttagtagaaacggggtttcactgtgttagcaggatggtctcgatctcctgaccttgtgatccacccaccttggcctcctaaagtgctgggattacaggtatgagccaccaccaggccagcgagtggttattttcgaagatgtttggtggatgtggctgctactgcttttccccataaggcccattatccagagggatggcattcccatcacgggatggaatggattgatgtaacatgagctgtcagaggtttttaagcagttgtgctagaaacagtgttgtgtttaaagaagagtgggatcaggtgagtgaatggccaaagaaacacatgttcatgtagagagctcttggctgtggtgattactgagtcagtaatagcagcaactgctacccagccagattttaattagtttctgttccctgttcagagtaccttgtggagctgagagaatacgggcctgtgtactccacatggagcgccttggagggtgagctggctgaacccctggagggtgtgtcagcttgcattgggaactgctctacagccttagaagagctgacagatgacat

SEQ ID NO: 42552 - DNA, 2300 bp, Homo sapien
aaatagactgtcctggtggtgtgccagtgaatgtaatgtaacagtggcagcagcagaaatcctttgctgcctttgggtctggggcagcagctgcgttggtgggcagaggagggtgcagttggcagcctgtccaagtccagcacggttggagcacaggatttagaatgggatggtcctgggttcaaaccccagctgcgccctagcttgcactgatccgctcctcagcctttgtgggcctcagttgcctcccacacatgagtgttgtgatgccataaagtgctcggcgtagtgtctgacgtagtgacagatgctccgttggaggagtctcccgtgtccacactggctgcagtaggaatgtgggcggagaactttgttttctgggtttgctgtcacatattttaagaagtcccttttctgaccacagtgttttagacattgtttcctatgtcctcaagcttcccctgcctccctagccctccacacacctgtcctccccgacagcccatcaggaggtttggtggatgctgaggaaatgagcaacttaaggttttgctgtgctttgcctgatgtggttgtgagctcacgaagccagagctgctgttgatgagatttttttttttaaaaagccagggaattcggaagtgggttagggctgattctatcccagggcctcggctaggtcttttgggaactgatggtgggagcgaggtagctcaggggactgtctcaggagtgccggggaggagaggtcccctggtatgggcatggtcagcagaagatccgagggagtctgggggcttacctcgttatcaggtgaaaccttgaaaaacttgcgctggataaggagggaaagttgatttttgtggagtcatggagtggcatcaaaatctgatcacttttttgtaacccaggggaaggaagtggcctcatgtcttcacaaccttccctgtgaatttcaacgtggggtgatcctcttaggggagtcctaggacgtcttgtggggaaagagcacgtgctgagggcagaggatgcggaggcctctggagctggggaagaatggtggtgtcctagaatgcaaagttttgcattgtggttgggctgaggctggagaaagctcagcagacactgaggtggtgattcccaggcagatggagctttggattctggagacttggccttctccatgttaattgtgaggttggagaagcgacatgcacttacttagcaggggctggctgccttctcctgggcctgttgggctgcagcctggtgtacaccttagaatctaacccgccatggaaggtggggggcatcagagctcttacagaagataaggagaagctgaggaattagattttaaatggcaccgggagcatccgcaccttcgaatgacagtgagggtaacagagagggagctcttgccttttcctgtcttctgcgttggactcttttcagtgctaatacacttggtataactagctccaaaaagaacaaagaagggatgccagggagaaggcttcacagaattcctagttatcttcaaaaagtaaataaaaaaagcagggtgctgttttaggccctgacccacgggtagcctcatcctgggtgggtgccagatgaagaagtttaaatgggtggtgtcggagtgcagatgaggagagatgggccgtgtggaggggacctggggtgtcggtgttggggggctggcctgtggtgtgtgtggggggtgggtgtgtggtgtgtgtatggggagggcacgtggcatgtagggagggcgtgtggcgtgtagggagggcgtgtggtgtgtgtggggtatgtagtgtgtgggggtgggtgtggtgttttgggggagcatgggtgtggaggggagtggggcattggtgtgggaagtgtggaggtgtgtcgtgtggaggtgactgggatggaaaggtgcacagagctgttccccctctggttgagagaagagcagagggaaagtggaaattgggctctctggacaaacctcttgaaggctgtagaccttggacagctcttagaaccaccgggatagtgaatgttctagaatgggaaagacgtggtgggtagtgaagtgagaatcccaattgtaaactgccagcagggagacttctacatacagagctaatgcagaccggagagtggggcctcgtgtctgttgtttccagacccttctggcaagtgaggaccctcaccatggggcagaagaccaggtgcctccagccagagcaggcagaactcccccatcccctcagctgacttaagtcccaccgcagccaccctct

SEQ ID NO: 42553 - DNA, 2300 bp, Homo sapien
gaattcctccttcctcctcagaactcctttcacttcctcagaattcctcctggctcctcaggattcctcttcagagctcctcccacctcctcagaactcctcccgcctcctcagaactcctttcaccttctcacaatttctcccacctcttcagaactcccgctcctcacacctctcccaccccctcagaactcctccccacctcttcagaacctctccccacctcccccaaacccctcctgccttctcagaacccctctccacttccccaaaactcctcccacctcctcagaactcctccctaaatgactcagtacaaagtcctcctccacccctggggctgctactgagaagccttatgtgattaacttgccctctttatgcaagagactttccaaagggcgaatcatttctgctctcagaggacaatgccagagtgttctgagttcttggcctttcacaaggatctgggatgaaaagaggttggtgtagtggagagaacatcagcgtgggaaccatgagctctaccatggacaagctgtgtgtctgggccagttatttaacctgagtcttgtcttccccatccatgaaatcagtgtgtatgtgtcgagtaataattctccttcatagaggagctgtgaggactggtgataactaatgtaaagtatgtcaccatgtttggacataataaaactcaataaacactggcttccctcttccatattcccttttgagagattcaggtgtggcccaaacaagcaaacttgaggttggtgaggaagagtgggctttccacccgctccaagtcaggtgcctggcctgctccaactatgatttccatcctgcataagcgccacccacacctggagcagtgtctccatccctgccgagattctagggactcttcaggggtttcctgcttgggcttttttctgcttttttgaaaggaaaagaacttcctccagtaaatccatttccattcactggatctgagctttacagactaacatgaatgcatttaagccttgcagagatattgctgtctttcataaagatggggtgacgcattcaaaacaaacacctgttacctccccgtttgtaatagttatggatgacacatgcaggcatcattagacaaaggtaacccagcaggatcgacaacgaaagggtaggtcagagcagaattgaagctgacccgaaatcggaaactcaaagctgatactgtgtgtgtatgttgtcgttccagtgcctcatggcgtgggagtcgattattccactactgcaggagaaacaagaggccaagtaaagttctttcttgggacggagactcttctacctacacagggcctggcaccctataccggaatgtccctgcagtgccagagacgcagtgctgggaaaacaaccacagaaacatctctcctttgtgtatttttccctcccccacctttcaccccacagtggttttcaattagtatttattccatggtggagtctgtgaggctagaatatctctcagcaagagcagcatacctccatgttgtgaaggcatctgttcagtgaagcactacgaaaatttgaaaccaagggacaagacaacctgcagctgacgctctgacatttcatgacagtttcctctttagggacagctgagttgccagttgtgggagagaacccggggcctgcttttcaaggatgaggaggaggcaggaacagaaggcagctgctgctttctgtggaaacctggcccctctggaattggcctctgtgggcattgactcgtcttggcctaggaggcattggtgcctccctggcaagtccttaacgtacagtacctgtagctgtgagtgtggcctgctgcctgcttgtgatgagtgataccgtcttactgtttctgtttcacatagggacatttaaatcaatgtcaatgtgcgtccatgcttgagtgagcaagccagcgtccttgtcctcctgcaatgcctttgggaagctcaggggaatgctccccaagcttgtttctgacactagaatgcaacagattggaaactttttgtgtaaaatgaaaaaaacaaagtgctggttttttttttttttctgtgaaggtcttcagtgttttgcttgttcactgtcatcagagcagggattagacctgttagggaatatctattgtcttgaagtcagagtagctccccattgttgagatcagtgggcatataccaagctccacccccagtgtcagctttgtgcaatttgcctttacctcaccaaaaatacctactttaatatttcctcctgtgtcc

SEQ ID NO: 42554 - DNA, 2300 bp, Homo sapien
agtacataataagggctcaaaaaatattagttgctactgttttttttcttagttcctttcttctggaatagtgtgattttatcaatctaaacatcagagatttagtacttgcactttaatgaagccaaccttgcactggagactagattctatcttgaagtggcaaggtcagggctctacttgctggtagcctgggctgcagaggatgaccaggtgctagctcacctggggcctgcattcagagatggagcaagaagtggggacatgatgagaatataatccaacccacagtagcctaaactgggagagacactgactaccctgagtcttgttcatttccaggccagagaactcagaagcctgggggttcctagggctgactagcatcctaataacccagctcctactagatctgttctagatctgatgtgactctctcagagacccttcaaatgtccctggtttcccaagacaatgggaagaactgaaataccacagaccctcccagagatgacaagggctgccccctacagtctagagccctagaatgcacagactccttgatcaagtggccagagtggtccatctgggtcaggttgttctcatggccatatttgattgtggaataccacctggccccataacctactcattcactggagtctccacccctcataggatcaaggtgtttggactgtttgctgtagcctctggaaaaattaagaatggagtgggagagccaggcttgggttgggtgaaacatgtatctcccaaggtgaccctaggtgagggggaggaagaaggaaatgggctgctgggccagatccatggggcacatcttgaagggcaagactaggtgtgtctttctctttgcagaaggcagagtcgtctgggcctagacacgaggaggctgggccatgctggaggttgagggtggcaggggaggagattatagcccacctaaacactaccaaaagagcacatagatacactaaatcatttggaatccagtccctactccctacatgagtatattatccatgtggcattttaagctctccctgcatacctgcgtctccctttcatgtctttgggttcctgatcatccacgctgccagagctatagtggattgtgggtagagggacaggaaggctgtgtgctttgagtctccatccctggggctgaccatggaacaggtcatgctctgtggtacattttggcccctgcaccatccatcaccctggttttctttgcagaagtatgtacctaaacaagaagcgaggccacctgggaagtggaggtctcagcccagcccaggggagtgagcccacagacagaagaagagtgactactaacaagcagaaagggacctgggcacttgattcagatgaggaccctggtgactctgccccttccagtgggctcaagcccctgcccaagagtccagttttatcatctagggggacatctagggctggcaggatcttgccgtctctcccttggccctggggtttggggcaggagccttctagacaaggcccaggcactaggcccaccaatgcaggtgtaccaaacaggactcttctctaagaggcctttggcttggagaagagcctggacctggcggctcccaagtttttacttctctcaaagtgctacccagctgcctatagcacatgggcccctgttgcattaaatctataaataaaacttcacaccccaatacttatcctaggcagaatcctaggcgtcccacccctcgcgcaaacctgccttcctgggatgggagaatttggaaacgctccctgagccagtcctggggagcttccttccagcccctgccccggtggtggggggtccgcagagatccgcgggaggtccgggcacgcacgcctggctgtggggaaattcggccccgtcaggcggccgcgctcacaggagcagcgtgacccgtcggccccgggggtgctggcgccaggagccagcactcgcggtgcgctcccccgcgcctggcttccctggactgtcgccagtcctactctgcctgaggtggcgagggcagggtggagcgcggccttttctggcctgaggaggagtcactcgggaggtcactcggctgctgggcgggctgctgtcacaggcgctgcgtgccctggctctgctcgccactggccggcgcgctcccggcgcacggagcacactcgcgctcccggcgcacggagcacactcgcgctccgggactgaaacctgagcagccgtagcagccgaatttgggagcatatccttgtcactgcagcca

SEQ ID NO: 42555 - DNA, 2300 bp, Homo sapien
ctgcagacagaggctcccactgagaagaatgaaaacagtgagtgaatcctgcactggtgactgaggtatccaggttctcctattgggacttactaggcaattggcatgacccatggagagtgaggaaaagcatggagagtgaggaaaagcacggagagtgaggaaaagcagggtggtgtgacggcccacctggaagccacacaaggcaaagggagctaccacctgcagccaagggaggcagtgagtgattgtgctaccctgcccaggaaaccacactttttccatggatctgtgcaacccacagatcaggagatccccttcgtgagcccacacaccagggccttggtgtgtagccacaaggctagagagagcctaccacagagctgtgcagattctcagcagccactaggctggagactgcctaaggctgctgagttcctgcgggaaggactggccaccatcactgtggcttcctgctgcctaagatgacttgagttcccggtaggaggagtggcagccatcactgcagctccagtctgccatttttcccctgccagtgctggggagactgggtagtttggacccaggaggaattgcccacagcacagcacagcagctataaaaggttataaccagactgtctctttaggccaggccctgatcaatcctcctcactgggtggggcctccctgcaggaacttcagcaattcctgccaggagtttagaaacagaactctgatctctctgagactgagctcttgtggggaggggtggctgtggtctccatggatcaacagacttagtcttttccccctgctggctctgaggaatccgggcagtctggacgagtgggattccacccagcatagcacacctcctctgccaaggggcagctagagtgatttgttaggtgggtcctggatcccatgcctcctgactggggagatctccccaacagaggtcaccagacaccgtatacaggagcattcctgctggccttagtttggtgcccctctgagacagaaatcccagaggaaggagcaggcagccatctttgctattttccagcctccactggtgatacctccaagtatgggagggacccccagcaaattgcagtagccctatgggagtggaacctgactgttaaaagaaaaacaaacagcaacagcaacaacagtatcaacaaaaaagtcccacaaaaaacatatccaaaggtcagcagcctcaaagatcaaagctagataaactcatgaaatgagaaagaatcaacaaaaaagtaaccccactgaaaactcaaaaagccagagtgcctcttctcctccaattgattgcaacacctctccaggaaggacacagaacttggcagaggctgaggatggatgaattgacagaagtaggcttcagaaggtgggtaataacaaacattgctgagctaaaggagcatgttctaatccaatggaaagaagctaagaatcatgataaaacattacagaagctattaaccagaaaaaccagtagagaggaacataaatgacctgatggagcggaaaaacacaacacaagaacctcacaatgaagccacaagtatcaataaccaaatagactggagaaaagaatttcagagcttgaagactatcttgctgaaataagacgggcagacaagattagagaaaaaagaatgaaaaggaattaacaaaacctctgagaactatgggattatgtataaaagactgaacctataactgattggggtacctgagagagaatggaaccaagttggaaaccatacttcaggatgtcatccaggagaacttccccaacctaacaagacaagccaacgttcttattcaggaagtccagagaaccccagtaagatattccatgagaagatcaaccccaaaacacataatcatcagattctccaaggtcgaaatgaaggaaaaaatgttaaagtcagccagaaagaaaggccaggtgacctacaaaggggagcccatcagaataacagcagacctctcagcagaaaccctacaagcttgaagaggaggccaatattcaacattcttaaaggaaagaacttccaacccagaattttacatacaaccaaactaagcttcgtaagcaaaggagaaataaaatcctcttcagacaagcaaatgctgagggaattcactgccaccaggcctcccttgcaagagctcctgaaggaagcactaaatatggaaaggaaaaattatttccagccactcctaaaacatgctgaagtataaagaccagtgacactatgaaacaactac

SEQ ID NO: 42556 - DNA, 2300 bp, Homo sapien
ccctcctgcgcagcaagaaacaacaaaataaaaagataaaaaagcaaccaacagaatttattttttggagaaaatattttcagaccatatatctgataagaggttaatatccagagagttaatatctgcctgacaaaggaattcctatgcatcaatggcaaaaaacaaataacccaattaaaattgggtgaagcatctgcatagtcatttttccaaagaagacatacaaatagccaacaggtatatgaacaagtgctcagtatcactagtaatcagggaaatgcaaatcaaaaccacaatgagttatcaccatacttctgttaaaatagctattataaaaataaatacataacagatgatgtagaggaaacaaaccctgtgtactattagtaggaatgtaaattggtccagccactatggaaatcaatataaatgtacctctaaatatagaattaccctttgatccagcaatctcacttttgggtatatatccggaggaatggaaatctggatctcaaagagatatctgcacttccacgtttattgcagcagtattcacagtagccaagatatggaaacaacctaaatatctattggtggacaagtaaagaaaatgtggtatatacatataatggaatattattcagccttattaacaatgaaatcctgtcatttatgacaccatggatgaaactggaggatattatgctaagtgaaagaagttaggcacagaaagacaaatattgcatgatctcacttatatgtggaatcaaaaatagggaaatacatagaaacagaaagtaaaatggtgaaggggctggtgagggagaaataggcaggttttggtcaaagagtacaaagtttcagtatttatttatacacaataaataagatctggatgtcttcttaccataaagagcctatgattcacaatagtgtattatatacttaaaaataagtaaagagggtagatctcacattaagtgttcttaccacaaaaggtgggggaagcccaaaggggtggaaacttttggaagtgatagatgaatttatgggattgatggcatgatggcttaatggtttcacaggtatatatacttacctccaaacacatcaagttgtgtatattaactgtgtacagttatatcaatcatagctcaataaagcaattttttaaagtatgtatagttttatacttgagaatatctaattatacagaatttgtatatatatgcatagaaattacatatttaaatatataatagggagtatcttggagtgaacttttatctgactaattttgttctttttccttacctctattctctgttatctacaatctgtctatctatctatattcgtttgtttaagaaaaaagttagatatacatattccctcttcattatattcgtttttcggacgtttttgtcaagaacagatgtggaggagtgaacagattactctacaaggatgttcatcagtatactatttttggtagcactgaagggatcataacctaagttcctaacaggaagaaaaaagctagaaaaaaatctaccccaaaagtatgacctcattcttggatggaatctctctggtgcttgctcgctgtctctctctctgccccctgtctctgcccgccccgcccccccgccaccgtcccctcaacacacactcataacaaagaagctagctataaatcagagatttacttttagaatgctaaaaaatattaatcactgcgttaataaatatttctgcaatgaatccatctgggtagtttggttttttatctgttgaataaagagttatttataaatcatctattaatgtagtgaataggtattacttttgtgtctggggtgttgttaacgcaaactttgcatctctttggatttacagttgtttatagcaaaagaaaaaatcttttccttttttcttcttttcatgtaaacaacgatggaaacgacgcacgttcgcaacccgcaaagcattagaaagacaccggtgaaagacgcagctcaagagggcgctttgcagaagatgctgggaaatgtagttcctggcggccgcgtgcgcaggcgtacttcctggcttgggaaccacatcgcccgaccgtgctctttatttttcggtggagcaggtgagctttttctttcccgacccttgcactcgtgtgggaggtggggagagaggtccccttcaaacacaaccattcgggcgggtcgggagaggcctgagaatgcattggccgggcccgggggcggaggaaagccgattaggtcaggctgggtatttgg

SEQ ID NO: 42557 - DNA, 2300 bp, Homo sapien
tgccttcaagtatgaatgacaataaataccatacatatttaccgtgtgtgacctcttcattagggaattcactagaatcagccgaattcacacagttatcgccgcacttgcttcccctgtccctgtcgggagaattttcaggtctactcgaatgaatatactcaacagtacaacattatgttctgatcctccgtactaactcatccctaccacatatatatatatgtgtatatatatgtatatatatatgtgtgtatatatgtatatatatgtgtgtatatatgtgtatatatgtatatatgtgtatatatgtatatatgtatatatgtgtatatatgtatacatgtgtatatatgtgtatatgtatatatatgtatatattatgtatatatatgttggtttcaagaaaatccttgagaaactgaactgcccctctttctgatttgtgaggaagaaaggaaaggagaggtattgaaaaaaatattgtacctttttacgactctaatatcaggaacaattaaagtcaggaccatatctgaggcagaaacaaagcaattgcctatccgtacaaaggtgacgctcaaagaatactctgtcaggaacacagtgtagggggccgtgtcttaagtaggtgaagagtaatttcaagccatcaattatttttcagtcttcactgagtccttagtttagtattgctggataacaaattatcaccagctttagtggattaaagtatcacaaacctattatctcacagattctgtaacctggaagtctgtgtatatcatggttagggtgatggttaattttatcggtcaacttgactgggctaaaggatgcccagaaaactggtgaaacattgtttctgggtttgttagtgtgtttctgggaaaagattagcatttgaattagcaaactgaataaaaaagcccccaccaatgtgggtggccaccacctaatccactgagggcctgaaaggacaaaaaggaaaaggaagggtgaatcctcttttctatttttttttaatctttaacttttgtgggtacatagtaggtgagtatatttatggggtacatgaagtagtttgatacaggcatgcacagtgcaataatcacatcatggaaaatggggtatctatcccctcaagcatttatcttctgtgttacaatccatttatactttgttatttcgaaatgtacaactaaattattattggatatatacacctgtagtgctatcaaatactaggtcttattccttctttcttttctttttttttaaaaacccgttaagtatccccacttccctcccaccttttcttttttcttgagctgggacattcatcttctgccttttgacattggagaccctggttttctggcctttggactctggacttacatcatccctacccctctccactctttttccagtaccttgcatagcgcagcacctaacctgcacatattcaatgaatgcaattaatgcatgaaatggcgcattaaggaattatttctccaagtgcttgattattctggtgaaatatcttcaccaaacccgggctctcacggaggagtggtgtgtttacttaagtttctgtttcagtttttcttattgttcttatactatatatgaaaagatttatcgtatatctcaaagattaacgtcctctccctataaaataatgttatttgttcgatcaggcttttctccgttatgcttccaatttctcgcatcctgcctttctaaagtccgcactaagcgttgtgattcccggacttctagccgctggccgcactgacatgtattcggaaaagcaattccaaattctgtaaaatatcttccggcagtgatgcgatccgaactccggcagtgggttgtcaggcccaggtcagtcctgtagtgcgtaacggaactcggttccggctggctctgatcgcatcactcctgcatcctgcaagtaacgccctcgccagcttccacctcccgatctaattgtcccagaagtccccgcacttccgctgtacggctgagtgtttgccaagatggccgcgcccgtgcgctattaccgaagggcgccgccatcgcggctgccggacccgctaaggccgccctccgggtagccgccatgtcggtctccagcggcgtccagattctgacaaagccagagaccgtggaccggaggagaagtgcggaaacgaccaaagaggccgggcgaccactggagatggctgtgtccgagcccgaggccagcgccgcggtgagagctgtgatgagacagggtgttttggcggtcagag

SEQ ID NO: 42558 - DNA, 2300 bp, Homo sapien
cgaggactggggcttttccaatgaaggccattttccagtttcgtctaaaagcacagaaggacttcgtgaaatgtttggcttcttcctaagggaaggaggtgcctacagcgttgccatcactgctgctggccacaggaagatgcgtacatatcgtcccgccctaagatcgtgttttgaaagtgggcgactttggaaattaactgaggctgtaaccgcagagctgacgggatgggggagctgctctgatgagtctccagagcggcccggtgaccgcaggagctctgagtcatcaaagaccggggccagggagcctggaagaggaagggcccgctgctcccgggccacgccgggacacatgagttaggggcaaaatttaatgccgcaacaaagcgactcatttttttggaactgaggctgttccagaacttcttactcactctcggcgccgcccccgcgcttccaggccccggacccgccgcaaacaccgctgggcttggactcaaaccgcggtccggtcccacccggtctggtccagtcccgttggaggcggcggttgggctcagcgccaggcgcgcgccctctgctggccgttgggaagcggcgagggaagcgctgagctcgcggccgagcggtggtcgctcgccccctcgcgggctctcccggaatcgctgacattctccgtcccttgctctctgctcctggctggggacgctctgctccagccttgcctgctccctttcctgggatacgccttggagccatggcttaaaagtaaggacatcttcatgcatttgagatacctgaatagtagatatctgaatagtatctcctcttagtcaggcctgaatacaaagacctgctcctagttctcttgggaaacaggacatagtctcaaaatccagaagacccaagactcctgttcccaccaccacattctgcaggcttcaaccagctggacatggagggccatggtggtgcgtgagataagatctcctggagaaactactaccctccagccttgatcactatcaggaagatgaaagcaggaaatctactttgtccctgtttgggaatcgctgtctaaaggttcttccaaaaatttgcccccatctgaaggcaaagaaatacagtctttgcctgggaggtttttaggggtgaaattgaagtgctcttcttccaccaggcgcgatgtatcacgcctgtaatcctagcatttgggaggctggaggtgagagaggtgagaggctgagggggaaggatcccttgaggccaaagttagagaccagcctgggtaacataacaagaccccatcttaaaaaaaattacattacatgaaaatatggttttatttcccttcatgtgacgtttcccacaggaaaactgtagaggaagttaaacttgtggctctttctaatcaattatacagatggtttgcccagctcaaaaagaaatcgcaactcttttgccccggttggcaaatattagtaccaaaatcatggaattattttgacaatatcttgtacattatgagttacaaaaatgtttagagagaagaaaatttgtattccttgaatgaatattatttgtaatattctttgatctattacaatgatataaaatggcatttgctgttcttctgtttgaacttatcttgtgacactttcttcagaatggtattttgttaaaactggtaggtattataaaaataaacagtgaccagtagcttgattgtattacaaatttttctttcatgtaagaggttggggcaggtatttctcatcaggtgactcacctgtttggctgtctcccaaacagtgatttagaacatgggttacctggtgttttgaggctttgattaccgtataactgattttgtaattgtggtgcttaggtctattccaatccatgtaaatggagcatccccagccaggagcagagagcaagggacggagaatgtcagcgattccgggagagcccgcgagggggcgagcgaccaccgctcggccgcgagctcagcgcttccctcgccgcttcccaacggccagcagagggcgcgcgcctggcgctgagcccaaccgccgcctccaacgggactggaccagaccgggtgggaccggaccgcggtttgagtccaagcccagcggtgtttgcggcgggtccggggcctggaagcgcgggggcggcgccgagagtgagtaagaagttctggaacagcctcagttccaaaaaaatgagtcgctttgttgcggcattaaattttgcccctaactcatgtgtcccggcgtggcccgggagcagcg

SEQ ID NO: 42559 - DNA, 2300 bp, Homo sapien
cgaggactggggcttttccaatgaaggccattttccagtttcgtctaaaagcacagaaggacttcgtgaaatgtttggcttcttcctaagggaaggaggtgcctacagcgttgccatcactgctgctggccacaggaagatgcgtacatatcgtcccgccctaagatcgtgttttgaaagtgggcgactttggaaattaactgaggctgtaaccgcagagctgacgggatgggggagctgctctgatgagtctccagagcggcccggtgaccgcaggagctctgagtcatcaaagaccggggccagggagcctggaagaggaagggcccgctgctcccgggccacgccgggacacatgagttaggggcaaaatttaatgccgcaacaaagcgactcatttttttggaactgaggctgttccagaacttcttactcactctcggcgccgcccccgcgcttccaggccccggacccgccgcaaacaccgctgggcttggactcaaaccgcggtccggtcccacccggtctggtccagtcccgttggaggcggcggttgggctcagcgccaggcgcgcgccctctgctggccgttgggaagcggcgagggaagcgctgagctcgcggccgagcggtggtcgctcgccccctcgcgggctctcccggaatcgctgacattctccgtcccttgctctctgctcctggctggggatgctccatttacatggattggaatagacctaagcaccacaattacaaaatcagttatacggtaatcaaagcctcaaaacaccaggtaacccatgttctaaatcactgtttgggagacagccaaacaggtgagtcacctgatgagaaatacctgccccaacctcttacatgaaagaaaaatttgtaatacaatcaagctactggtcactgtttatttttataatacctaccagttttaacaaaataccattctgaagaaagtgtcacaagataagttcaaacagaagaacagcaaatgccattttatatcattgtaatagatcaaagaatattacaaataatattcattcaaggaatacaaattttcttctctctaaacatttttgtaactcataatgtacaagatattgtcaaaataattccatgattttggtactaatatttgccaaccggggcaaaagagttgcgatttctttttgagctgggcaaaccatctgtataattgattagaaagagccacaagtttaacttcctctacagttttcctgtgggaaacgtcacatgaagggaaataaaaccatattttcatgtaatgtaattttttttaagatggggtcttgttatgttacccaggctggtctctaactttggcctcaagggatccttccccctcagcctctcacctctctcacctccagcctcccaaatgctaggattacaggcgtgatacatcgcgcctggtggaagaagagcacttcaatttcacccctaaaaacctcccaggcaaagactgtatttctttgccttcagatgggggcaaatttttggaagaacctttagacagcgattcccaaacagggacaaagtagatttcctgctttcatcttcctgatagtgatcaaggctggagggtagtagtttctccaggagatcttatctcacgcaccaccatggccctccatgtccagctggttgaagcctgcagaatgtggtggtgggaacaggagtcttgggtcttctggattttgagactatgtcctgtttcccaagagaactaggagcaggtctttgtattcaggcctgactaagaggagatactattcagatatctactattcaggtatctcaaatgcatgaagatgtccttacttttaagccatggctccaaggcgtatcccaggaaagggagcaggcaaggctggagcagagcgtccccagccaggagcagagagcaagggacggagaatgtcagcgattccgggagagcccgcgagggggcgagcgaccaccgctcggccgcgagctcagcgcttccctcgccgcttcccaacggccagcagagggcgcgcgcctggcgctgagcccaaccgccgcctccaacgggactggaccagaccgggtgggaccggaccgcggtttgagtccaagcccagcggtgtttgcggcgggtccggggcctggaagcgcgggggcggcgccgagagtgagtaagaagttctggaacagcctcagttccaaaaaaatgagtcgctttgttgcggcattaaattttgcccctaactcatgtgtcccggcgtggcccgggagcagcg

SEQ ID NO: 42560 - DNA, 2300 bp, Homo sapien
cataaagacccaacattctgcaggaattacatgttgtgcatgtggtcttttcatgagtctcaagttcctctactgaacctcagaaggagaaatgactggttggatttccgctctatcaactgactacaaatgagcccaggttaaagggcctctaaataatctttgtgacactcaaggcagtgccatctttcctgagtggggattctgtctcggggggtctaggtgtgctatggaaagacaacaacagactattgctccgtgaaaggaggggagtcatgggctgtcaaaacacagaatccggaatctcttgccatggacccaggcttgggtggctgtgttgtgatcttatgatctaggatcccatggtttgcaacaagctctctgcctgggggacagggaaggagtgcctctggtggtacagaaagaaattttaggactccctggctaagtgttgtaaccaaaacatccatgaggaagttagaagtaagtgtaaaggtcatcagattgtgacaaagccaacaaaaaccgtcaaatgaataaagctgtgttgcagattcttcaatgcaggtggggggagtggggtgcaccagagcccacttatgtgaaggtcagattatcttactcctgcttcccatgtaaggcccagagaggtgaaaagctacacccaaagccctccccagctcttggaacccagatgcttcagagatacccttagcccttctccccagtgcttccccatggcccagtaaaccatgacagcagcagctctccctctccagccccatcacagtgccacggcccatgttctctccctgaagctgctccattagctttcagactgagaatcttaaaagctgtgtgggccgggcaagatggctcacgtctgtaatcccagcatcccagcactttgggaggccgaggcgggcagattacgaggtcaggatttcaagaccagcctgaccaatatggtgaaaccccgtctctactaacaatacaaaaattaaccaggcatggtggtgcgcgcctgtagtcccagctactcgggagcctgaggcaggagaattgcttgaacacgggagatggaggttgcagtgagccaagatcgcgccactgcactacagcctgggcgacagagcgagactctgtttcaaagaaaagaaaaaaagctgtgtgaccctgaggattctaccatttactgaacaagctcccactgccaggttacatgataatttaacatgtatgttttcatttaatccctatgacatagattttattattattttcattttactgaccagaaaactgaggttcagagatgtaagctatttgcctacggtcccaaagccaatagttgatgcgtatggatgtgaactgaggttagctccaggctcaaggtctctgctaatactgtccttagtaaggtttctctgaagagcctctttactcataggctgattagcaaagggttcctaaatatgcttaagaatcaataaccattaaaaatccctcaccctacaagaaactccccatcaaaaaactggatcagtgaaatgaacaggcaatacacagaaatggaagtacccgtaagaaaaatagtttactaccctagtaatcaaagaaaaacaaaattacacgggtgtattccttttggcttatcagattggaaaatatttttctaaaaagaaaaatgtaattatcttgtaatgactacactaaaaatctagggcataattgacttaatttactccaaatgtgttgctattgcgtccatagcacggacttgcccatttcaactcaatatatgttacgcttggggtagtttattacaatgagcaataaacattctcataatcgccaagacaagccaagtgcaaaacaggaagggcgaagacagagggcagcaggtggtccctctcgctcgcgactccgggaacgccaagcctcagcccttgggaacctggggcgaggcgcctgggtctcggccagggggcgcgcccgaggacgccgaagtagggcgcgtgtggggaccacaactcccaggcgcccgcgcgccgcctcgcccggaccacgtgatccgtgcggccagggtagctatcgcggcggcggcggcggcggcggttgaactgactcggagcgaggagacccgagcgagcagacgcggccctggcgcccgccctgcgcactcaccatggcggtaagggccgggcgctacggtgaagagggtgggcggttggggcggggtctcctggagctgccatctcggcaccccgaatcctcgctgccgctggcccggggctggt

SEQ ID NO: 42561 - DNA, 2300 bp, Homo sapien
tttccagctctgaacaaaccatacagttcatcttcccagctatctcctgcttctctggcttcagaaccatcctagccaactgctctctggccagggcaggtgtctctcaggcggcttggtccccagcacccccagggagcctccactgtgcctccctttctctgacctacaacctgttgtaattatttgctcacttaaatgtcccccctcatagacaggtagctccctaagggccaaagacttgtcccattcatctctgtatcgccagggtctgcacagacctagcacaacaaaaagaaatctttcaaattactcttactgttctgtgggtgttcaggtctatggcaaaacatgtctgggctgttttgggctcctaagataactggcccaggcccaaggatgatagaaggaaaccagttatggcaactccctgactgattaattagccactagggacattccattcataccatctgctttaccaaatggactcagagaaggggtgatgggtgtcacccctacctctacctggcagagatggtgctagaggcttctgctgaggatgaggccatctccggtgtaaatggagtttcacagtattgtttgtacctgtttggttttgtatatcaatcttgcgtaaacattttgctgtgtcaaaatgttttttttttttttgaaagcctaacaggagagatctctgagtagtaagactcaaaatgattttttactttcttttcggtactgtgtcagctttttacattgagctagtgccattgggggtggggggtaaaagctattcttatttttaaactcttcaacattttttaaagtcttcaacatgatctttatcatgttgtgatgtgaccgcctagatttccattttgaagctctcatataatttacttgaccagtccctactggttgacaggagaccatcatggttcctatgatttctcaaagtgtgacccccaacaaacacctgtcctagaaacacctgtcccagaaacacccagtacactaaggtttgagaaccagtacaggctttccagaaaactctctggctctgggtacctgattgccgagtgaccatggggagataagtgggcttttatgtaccttccttgttaaagaggttaataatagtaggcacctgcggagatgtcacagggagtgacacataataaatggaaggtgaacgtggtacaggcacatgcagtccctcagaagacacagagctgtgtggctgttctgtccaatcagatgctttcacatttctttctctgtcctgcagctccacggtctccagtgagcccagtccctgggtaggcgcaggcaggggttggtgacacaagtcagaccccttttggcactgaaaggcatgttagctgagtgtagggagtagaacagccaggttagtcccaggtctctaccaaaccccaggctgcagcgtccaaatctgagagatgcatagatgtggtgccccatccaacccggaaacagaggcacactcactgttattgttgttgtttttgagacagagtcttactctattactcaggctggagtgcagtggcatgatcttggctcactgcaacctccacctcccgggctcaagtgatcctcccacctcagcacctcccaagtagctgggactacaggcacatgccaccacacccaactaatttttgtattttttgtagagacagggttttgccatgttgcccaggctagcacttttttcttttacaaggtttcaggaagagtagatagagttcaagatgggagcctgtgaaagtgaggccaaaccaagggaaagggttcctagagtcctgtcctcatcttacagacgaggagactgggtccacagggggctttctgcgtgtcagcagctcaaggccacgcagctggttcctggcagagctgggagggagatccaggcagtgcagctttagagaccgtgcccctaaccactagccttgctgcctctgttcaaactgcaacaaagtgaactgagcctcagaatctcctgaagggggctggttaaaatctatgtcttccctgtctcctgtggctctgaccctggactctgatttaggggcctgaggaggcccaggaatctgtacttttaataaggccctggagtctaagcagctgctgctgtccctctacactaagccgcttgccagtgtggagctcatgattggcctgtggtttcccagtgattcacccgggactgactctgcctctgtggatccggctataacagcatcgtcatccacacctgtgatccgctccagtgt

SEQ ID NO: 42562 - DNA, 2300 bp, Homo sapien
gacaatgaaatgagatgatgtagaaaaagcccttgatgccaccctgaacacaaggtggagcaagcaccctctgaaaaggcatctgacaggcactgcatggtcactgcttttacctgcagtctttcctgtaaggctgtgaactcaccaaggtcagagacattaacctacttccataatgcttggcacacaaactgggctcagcaaatgtatagtgaatgagtaggcagatgtggagtacagtgaagacagctgcctctgggcccctccacgataaacactgtgggatctgtctagactgaacaggacaaagaggactccaggcttccatcacacgggagcctgttctggagctgcagcagaatggctagggtcccgggggggtaagaagaggcagttgcacttggaaggcatggaggggacatccccacatagtctgaggacactgtcacatcccgagccagttggtccagtgaggatggacactcccacacctctattctcatatggagcatggccagctcaattatagctctgctgctgaccctcttgggcaagtctcagctctttatggcctcagttggccctgatgacttctgatggcccttccagcacttccagtgaccccatttttctgggctcccagaggaggtgctggagagcattaaggaccgtaacttccactgccctgtgcccctatgatgcagattcctttctctttcagatgcatttcatcttctcagatacagcggtgcttctgtttgatttctggagtgtccacagtcctgctggtaagaattggggacctcagacttgtagcttggaaagccttgtagtactaggcaagggagaatctgggttctcttgattctctgtgggcatttaagtgaggctgattcctctggcataaacactgagcaggaacttcacagttataattccatttgtaaccactccccttcagatcgcaaagggctccattatcttactgatcctcacaaaggccgagaggcagggaggcagcttttccctctgttacagggcaagaaactaaagcccagagacaggaagagagactcgtgcagggtcacacagtaagtacgcatcagagccactactagatcaaggcctccgggtgtcacctggcacctcccttatccagggctcattgttctgcaccagttcagaagcccacagcagctgctggagatgagacaccaatttgaaaggaaagaatattcctttgatttgaaaaggcagagtttgtcactaattcatgaagaagttatttttcaacttaaataactgcatcttaaaaagagactggaaacagcccaaatgcccattattgcgggtgcagattaaataaattatggtcagccctacaatgggttactatttcttgttatctattgctgaataaacagtggcttaaaacaagtcattttatcattctctctcaaggttctgtgagttgactggacccaggtgagtggtccttactgaaggtctctcatgcagtatagtcaaacagtggctggaagtagggtcatttggaagagttcctcactctcatgccaagtggctgatactggttgttagctaggacctcagctggagttgttggctgaacacctacatgtggcatctcctatggcctgggcttcctcgtggcagagtggctagattccaagatcgagtgtcgcaagagaacaaggtagaagtacgtgggattttcaagacctagccttggaaatcagataaaattacttctacctttattggctgaagcagtcacgaaggtcttcctaggctaaaggagagggaacaaacatggaccccaccacttgatggcaggagtgttgacatcataagaaggggatgtggggtgggatacattggagtggctgtctttggaaaatgtaatctatcacagatacgatgaagccactggggaaaaggtaaatctgtgtgaactgaggtaaaactggatgataaagtcaaatgcaaaacagtatgcgtagataggatgctgtcatttggacaaacagaggctgatatatacattgagtaacagaggttgctctggggaggagaattggggtgaagagagattggggtgggaagaaaactgatctttctctttttttgaaatggagtctctgtcgcccaggctggaatgcagtggcgcgatcttggctcactgcaatctccacctcccaggttcaagcaattctcttgcctcagcctaccgagtagctgggactacaggcaggcaccacaatgcccagctaatttttctg

SEQ ID NO: 42563 - DNA, 2300 bp, Homo sapien
agagacttgatgtttgggtggttctcctccccttgggttttctgaccttcacctggttcctgaggccacagccacagtctgtttgttttgcagtgtttagccctccaggcccaaatcacagctctcaccaagcaaaatgaacagcacatcaaggaactagagaagaacaagtcccagatgtctggggttgaagctgctgcatctgacccctcagagaaggtgagctggtatttcaaatgagaagcaagccatttatatcaagcattcagaaagaacatggccagtatgttgtgttaatagctctttttctaactttagtgatgttttacttgtctgatgactttaaaatgaaccagatttggtgtttgtttgtttgagacggagtctcactttgtcaccaggctagagtgcagtgatgtgatcttggctcactgcaacctccgcctcccaggttcaagcgattctcctgccgcagccgcctgagtagctgggactacaggcacgcgccaccacacccagctaatttttgtatttttagtagagacagggtttcaccatgttggccaggatggtctcggtctcttgaccttgtgatccgcctgcctcagcctcccaaagtgctgggattacaggcatgagccaccatgcccggcccagatttggttcttgagtttaaggagcttacagcctagtgggaaaacaaacaaatacatacttacatattaagtggcaaacccaaaagaaccctatctttctgaggttttgacaggtataggaagggcctctaaccacagaagaagaatggggcttggggagtgtgcccagcatccactggcctctgacccttagagcctatggcagctcctagtggtgctcacagtgggagggggacatcaagaaatggtctttaagcagtcttgggcacacagaccacagcttgcctgcccttgataggtaactctcatgactagcccttctgtcaaagtgctgctcattatttaatatcatcctctccacagtgacagccttcagtgtctctgcttatgaccagcagtatcccagtgtagagatctaagatggcttcattttggccttccatacacctctctggaatttaatgcatcctttagtgacttgattttgacagcatgtgttttgatgttcacacaggtcaagaagatcatgaaccaggtgttccagtccttacggagagagtttgagctggaggaatcttacaatggcaggaccattctgggaaccatcatgaatacgatcaaggtacagccagccagctgtcatttgtttcatcgtattgggcattttgttgcttaagtaccttctaagggatcatgaataaaaaattgttcaaagctggcacagtggcttatgcttgtaatcccagcattttgggaggccaaggtgggaggactgcttgaggccaggagcttgagaccagcttgggcaacataatgagactttgtctctactaaaattaaaaatttaaaaattagccgggtatggtggcacgtgcctgtagtcccagctacttgggaggctgaggcaggagaatcacttgagcccaggagttcaagactacagtgagccatgattgcccccaactgcactccagcctggataacagagcaagaccctgtctccaaagaaaaaaaaaagaaaattattcaggactgttcctcagtaattaggatgcctggagtgacttgacagatatagtcagcctcttttaacaggaaagaagcaaagtcatttaaactacatgaccagtagtgttaataagaattaggagtggctactgtgttcctttcagtgaccatctcttccttggcttttgaatagatggtgactcttcagctgttaaaccaacaggagcaagagaaggaagagagcagcagtgaagaagaagaagaaaaagcagaagagcggccacgaagaccttcccaggagcagtcagcctcagccagttctgggcagcctcaagcacccctgaatagggagaggccagagtcccccatggtgccctcagagcaggtggtcgaggaagctgtcccgttgcctcctcaggccctcaccacttcccaggatggacacagaaggaaaggggactcagaagctgaggcactctcagagataaaagatggttcccttccacccgaactgtcttgcatcccatcccacagagttctagggcccccgacttcaattccacctgagcccctaggccctgtatccatggactctgagtgtgaggagtcacttgctgccagcccaatggcagctaa

SEQ ID NO: 42564 - DNA, 2300 bp, Homo sapien
gagtctcctcccagctcatccactttattccaccaaagaaaaatgtgaacaaaaaagaaagacatgaatgttttatcaaccagtggtaactcgtcagtttctcagccctatgcaggtatgcaagcctacgcttatccccaggcatctgccgtcacctcccagctgcagcccgttcggcctttgtacccagcaccgctctctcagcctccccatttccaaggtagggagtaattccctcagtttctcatcttccgctcttgctgtgctttccctcttcttgctcctccttcattttcacaccaacagctctctactcattgtttcttctcttttttaacagctttgttgagatataatatgtattccacacattcattcattttaaatgtgcaattcaaaagtgttttagtaaatttgcagagttgtgcattcatcactacaatcctattttagaacatttccgtcatcccccaatgtttccttgtgtccacattctgtgtttttttccttggattttctcccctggcccttttaattcctctgttagagtagctagagtttagagaaaatagtaaaagagcaaaacattggaggaaattgggagaaagttgaatactataggtgtttagtatctctaatgaaagctactctgttaacatttttaaattatgaaaataagagacttttataaaaaagtcaagcagtacaaaagggtgtaaagtgaagttactgtccttcccctccataaaccccctgaccttgggaaactgttgttaacagttacttgggtaacttttcagatattttgtatgcatgtacaaatgtgagtatctaatgtaaaaaaatcaaaccaagataaagtgtaaactgctatgatggaatcctgccttgttctgctattagtcttctgtttagtaatcagctttggtattaggacagtggtaggaagaagccagtatgtcctgcaacataatttgtggttctggactggtcaggatttcctgaatgcagcctttatctggaagctctgcccttctccatctgggatacgctttttcatccatcaaaactgtcatctccctctgtgaagccttccctgactattctctgtccctctttcctctcttcccacaaacacaactgtgtacgcgtgtcaccaaagagttaatcgtgcttttctctgtgctacttttatacctagtatatggtccattgttttgcacttaatacactctcttgtaatgatttgtttacatgtcagtctcccagccagactgagagctcaccaagggcagaagccgtgttttgtttactgctgtattcctggtacctggtacaatgcttggcatacagttggatgaacgggaaagtaatctgagctgccggtgctgtggcagtgcaaagtgggcatatttgtgcccttggaccagatgtagcccttgatgcattttgcaggaacacggcttagttattgtttactttgaagcccttttgcctctactctctcccatatatcttctcctgacagggtgaagtcacctatagcatttcctagtgtatggaagtattaatttctttctttactggaagagctactagcttttcttcatacagtttcctctgctccagtttcataagtttctttttggcttgtatctgtttaggatcaggtgatatggcttcatttctcatgactgaagcccggcaacataacactgaaattcgaatggcagtcagcaaagtggctgataaaatggatcatctcatgactaaggtgactgagtcagagttggggtgatgttgaaagtggggatgtaaacagggagcagccagaactgtaggtaaactcttctttgatttcctgcattggtagtagtgagaggttatttccctacaaggatagttataattatgttgggatccagttagtaggagaaaactctaacttaacagttagagattgtcccaggaactcattaacccccttaacaacagggtcaaatcttgggtaaattgtatttcttcattttataatttctcacaaggtctttctggtatcccttttgtaggttgaagagttacagaaacatagtgctggcaattccatgcttattcctagcatgtcagttacaatggaaacaagcatgattatgagcaacatccagcgaatcattcaggtgagggtgattaagaacataccactcaggctgaaggtcttacccatcctctcttctcagaggtactactctttaacacctccaccccagaaatagcctgtgataaacgctacactgggttag

SEQ ID NO: 42565 - DNA, 2300 bp, Homo sapien
aaatcagagaattgtggtgaaactttctgtattctcagtgttaaatttgatttggttttcctgataactgtggggaacaaaaataaactataactttcctcagtatgtcttttaccatcaaattagctgttgtctatgtctaggagcacagtcacatgcctagaattcaagtgtctcagatccttgagaagcctgctcaggaaaaaagaatagttgagccaccaagaatttatctctggccaggaatctggaaaagagcacatggctgtcattacctatcccataattttcagtcagcttggactgattgttgcatgaaaattgggagccctaacattacagacttctcccaaatactttcacatagtgaagaatgcgaatttaaagtggaatagggaaaaaaggaacaaaagcacagcttaactgtaaaataactgagaaacggaaagaactcaaagtggaactaagtgaatgcaggccatctaaagacggggtaggaagggaacagagtggtgagagtgaaaaagactaaaaggtaggtaatatagagctagtcagtgtaaatcaaaaattcctacttaaggacaaaagaaggccagtgtcattttatggtcattcatctattaactcatttgtttatgtattgtctatgactactctcaccctacaaggcagaactgagtatttgtggttgcaatagaaaccacatggcccaacagatctggaagcaacttaagggcaggcacagcagtttaatcatttttgtaacctcttagcatttagcagaataaggggcatatgtggtgcatttgtcatttttccagtacattcttcagcacgcacaaaatttgttaagcatatgttcaaagaaaagctctgcaatgatcagagcttggtagctcacaagtttggaggaagtcaagctgtccactggcacaacacaatggaaaaggctaaactgactactaaaagagacaaaacccttcctctctttaaagatttctattccaggctggtatatattaatataatgcttggggaaactggagaatgacagaagtctgttacgttggttttaagctttaagctttacaaagtgcaatttcgcagctattattcattcaacagccacttcctgagcactcactatgtgctaggtaccatgctgcatgctagacagaaatgaacaccataagcagtccctgtccggtgaggactcataatctaataggtgcggggtataagaatagaggcaaacacacctagctgcaggaataaggaagagaaagcaattcattctgcctgaggttgcagaaggaaaagcatccaaaacgtgacatccgagctgggccttgaagaatgctagagctgacccaccaaggcctggttctaaagtgtcttcgccttctccatggagaaaagaagtctcacatcagccccagctgactcctataaaaattctgaggcaggaagtctcatcagcaatcattcccatttcaccggagaaattgtgacccagaatgcaaaaggcaaacccagggctatcttcccgccaagagagatgccgggtcccgaacctcagatcggcagggtcagcacagttgcaagttctgcccagattctgagaggtgtagagcaccggaatgtggcaagggtctccccccggaagttgggaaaaggcctgagaagagatcgacccccctccaacaatccgccggtatctctcagccacgccctccagcgcatacttctcagtcactcacccgccgctcggcgagaggaaatcggtgtcgtcctcgtcccccgcaccgaacattgcgttggctttcaccgggttgcggggaggaagctgggtattcccagagtcccagggcctgtcaccgccgacgtcgtaaaatgccgcggcggcgtgctgctttccggcagggcgaactccagcacggtctctggaccgaaagtagactgggctctggagaaggtggggcaaaggcaaatgagaggctcgcgcgggcacgagcgccgagtgacgtcaggcctctccagcccgcagcggggcggagcttcacagccccttgcagggattggtcggtaatgctagggggcgggagggggcgggaaatcctcggcctcggtggcggtggtggacacgtcgagccgggtagaagtggaggggccgttcgaagagtcgtgagggggtgacgggttaagattcggagagagaggtgctagtggctggacttgacctggaaaggtaaggcttctctcggcccctctttcgcacccctgtgcatgggtaccgt

SEQ ID NO: 42566 - DNA, 2300 bp, Homo sapien
ggaattcagatttcctgattcctagtccagtattaccaatctgaagatacacgaatttaggaagacagtggctttctttttttttttttttaggtgcacccagtcctgcagttcaaagcctggcaagactcaccatcatcttcctcctcctcatactgctaatgagaatcagcagctgtgtttctacagtgataatctgcgtatgcatgttcgtgatgttccaatcaccaaaaaggctattgattttaggattcctgagtacctacaaaagctacttaaacatccaggataaaatcagctccacccaagaatacaagataagagttcaaatattcccttggccattttttttttttaaagaaaaggctggaaggacatgtcataaacacctagaaagattctgcagtgagactgctttgcaagtgactttaagtattcattccatgttaaaaataccatagataatgtaagccaggggctagcaagctctttctgttaaacatttagatgtttcagtgctgcaatcacagtgaccggtgttggggagagggattagaaagtgccatggtacttaatccagttactcccccaacacctccaagaggtagccaagttcacacactaaacagagctactgcaacagttctagtgctagtccttagattctagttccagttccggttctagtgcttagattccagttgcatcattccaactgtgagccttcgctgctttaacatctttgccaggaggtgcaaagttctctgggagggagctaccaatcatttcatttcaatttcatactgacagattgaaacattcacgtaagggacacctgtagtaccaacctgactgtgaggggaagcccaagaactccagtgagtctgtggacgctacgctgggacactatctccttagccacaccttgtctaagccaggactaccccaggattgtttcgagaatgataccaggttaaccaaagaaatacttatgtaagatacagatagggtggaaactggaggcagaggagtccgccacaattgatgttgatttagggctgtcgcaggaagacccagggaaacccacgccaaagttggggtggggatgtgtctgcctccaaagtatcctcctttccatcacccaccgccagaatatcttagctcttctgcacctcatccgcgtagaatacaggtggactctagaaaggggactttcctcgaggtgtatgctacagtctttcaatagtcactctgtaagggcacacagtgcttaagggctgataaggttcttgttcacccactagctcactatgtcctgaatcaaaggacgaggaatccagtctcagtctgccctttactctttgtgacctcggactagtcacccgggtgcttagttccttcgtctccctatctgtaaattctgagattacgaggaggccgggattgaaatccatggcctctgagctctaaaatcttctggaccagcaggcacatggaagaactggacaaatggccggttgcatacacggggaaactgaggcaccgagcaccccggcccaaggtcactctggctatgccactgcaggggccgggccgaagccccagtctttaaccctccagtcccgagctctttctccttccgcggagctgaggaaagcggcgaggaaggtccttgtcccgctgggaaaaggacggtacccatgcacaggggtgcgaaagaggggccgagagaagccttacctttccaggtcaagtccagccactagcacctctctctccgaatcttaacccgtcaccccctcacgactcttcgaacggcccctccacttctacccggctcgacgtgtccaccaccgccaccgaggccgaggatttcccgccccctcccgccccctagcattaccgaccaatccctgcaaggggctgtgaagctccgccccgctgcgggctggagaggcctgacgtcactcggcgctcgtgcccgcgcgagcctctcatttgcctttgccccaccttctccagagcccagtctactttcggtccagagaccgtgctggagttcgccctgccggaaagcagcacgccgccgcggcattttacgacgtcggcggtgacaggccctgggactctgggaatacccagcttcctccccgcaacccggtgaaagccaacgcaatgttcggtgcgggggacgaggacgacaccgatttcctctcgccgagcggcgggtgagtgactgagaagtatgcgctggagggcgtggctgagagataccggcggattgttggaggggggtcgat

SEQ ID NO: 42567 - DNA, 2300 bp, Homo sapien
tgggcatgatggcattcgcctgtagtcccagctacttgggaggctgaggcaggagaatcgcttgaacccaggaggtggaggttgtagtgagccgagatctcgccactgcattccagcctgggctacagagcgagaatccgtatcaaaaaaaaaaaaaaaaaagataaaagttgatggtgggggcccaggagaaaagttgatggtgggggcctagtagaatactcatgctcggtgcctgtggtggtaacgctaacatgagggcaaaagcctcccactcacgtgaatgtctcttattatccagatcttctacttttaaatgttctaagcttctttgccccaaattctcatttagaattttcattcatctctaactgacttgttttggttttctggcagcctatgaccttctactttggctttaagaatgtggaactactgttttccggtttggtgatcaatacagctggaggtgagtaagccattaggtagtgttggaaggtgatagtcacatgagagacagtgacaaataatttggaagtccagcacctctttctgtcctaattactaagtcaacatggtaatgatgcataaccatcttggttcctatttcctacctagaaggtaggaaacacagtacttttttggtcctctggtaaacctctgttaactaacatgtatgttttggagctctaaaaaataatttagataccagatagaatcttttgcaatccattttctttcattcttttccagagtgtttaatttttttttttttttttttttttgagacggagtttcactcttgtcacccaggctggagtgcaatggcagctatcttggctcactgcaatctctgcctcccaggttcaagcgattctcctgcctcagcctcctgagtagctggagttaaacaggcacctaccgccatgcctggctaatttttgtatttttaatagagacggggttttgccatgtttgccaggctggtctcgaactcctcacctcaagtgatccacccacctcagcctcccaaagtgctgggattacaggcatgagccaccatgcccggcctcagagtgtttacttatttgataagttattagtcctggacataagactaactcaaattaagtaccacaaaataagtttaaaactattgttctaatacttcaattttacaataaattaagtgccacaaattgtgaaatgactcgccatcaatcatagagttaatatgtcagagctaggacaaggacccagaccttctagagctacctagaccagtgttcttttagtctaccaaactatggcccacatccttcctgattcttggcacggcccatcttagacactcctagttttgaggtagatgattacccatctgtttgtgtctattatgttgtatggtatactttaaatttaacttgcgcaaactcaatagtcagttggactgccttaggtaccagatgtctgtttggagccataaaatcaatttgttttgggaagaaggagagcatttagttcaggtaatgtgttaaattagcagtttgaatacatttatatcattaccaacacttcacagtgtgaaagacttagaattgaaatgcctattcaggaaatgtagtcagccactgatgaaactaaattgttttattccctgttccatattctacattgtgtgtttcagtgtaacaaacctaatttaatgatatcaagcagtctgaccaaaaggttattgttgttctgattatttttcttatcttaatcagaaagtaaatatgttcttggcagaggcaatagttttcagttacaccatcttagccgttctcctatctgagcaagagaagaggtaaaaatataatgtcttcaaaagctgagagtagcattttttctatgtgtctttctagctggacagcacattggctaatgattttgcacatgtttgacagtacctccatattttccttccatacttagaaatggctggagcttttgtggcagtgtttttactagcaatgttctatgaaggactcaagatagcccgagagagcctgctgcgtaagtcacaagtcagcattcgctacaattccatgcctgtcccaggaccaaatggaaccatccttatggagacacacaaaactgttgggtaagaactgaacagatccagatgaagtcctaaagaactcgatcagttaagcagcaaagcgcagctgtgtgatcagcagcagccctcttcttgagttaggagttctgtatgaccttgatcaaaactgtccttggaggtttgggtttgtaggtca

SEQ ID NO: 42568 - DNA, 2300 bp, Homo sapien
ggcaagccttcctggagaaaatgatgtcttagttgacttctgaaggtcaggcagagagaagaatgcacaaggaggctcaagtacagctttggtaacgtagcaagaccctgtctctacaaaaaagtaaaaaaaatagctgggctggtagtgtgtacctgtagtcctagctactcaggaggctgaggtggaaggatcacttgagcccaggagtttcaggttgccaccgtgagccatgacctcaccatgagaccccaactcaaaaaaaaaaaaaaaaaaaaaaaaaggctcaagagagcattccacagcctgaaatcccaaggtaatactatgttaacaaaaaccattttgttttgttttgtttttgagaaaacacaaccccccaactgagtttaatatctgttgatggcatcatttgtatattctccacagcatcccctagagtgtatctataaaaacagtcagtaaatgtttgttgactagaaggtgagatcattcttgagcaccgtgctgtttttccattcccattctttacattcttattttaacacaaaaaccctgtgaagttgacaaaatgattcctatttcacacataaagaagtcatcgaagcaagctgttcagtttggttaataattttagcctcctataaaaattataaaggtcaacatgataagcattaagtgaaaatgatggaagtgaaaactccttgaaagtatgtacagatacaaattattacacgtatctaggatgaaactaaggactgtgaagtatacaaaggaagaaatagttccttctcccatgaagcttaggatactacaggtgatattatcaacacaaaacactggcacattacatttcaaattcctttgtactaaatcaggcattatcttctaccagattccaatgcagacaaatggtagagaaagccaaagttccaaagagggaaagagagggatagggatacctaaaagggggaaaaaaaaatctatacattttaccttttctgcaaactgcaaaaaactggccactagggagcagtatagattaacagttaaaagtgctggctgtagaggttaaagggcacaggttttaatcccactacaccaccgatcctgaacaattcgtttcatttctcactagaccttagttccctcatctgtatcctactctgctgttgtaggaagtcaataacgtaatacagagtaagctcttggaatattatttggcatttaataaatgttcaataaataacatctattattgctgtaattgttctagggggttgcatgaggatctggccagctagggaaacgtcaatattttgaggatctcccaccgcccatgtggggataaaaaccttatcctgttcgtctctaatgccccagcatccagcagggcagagagacgtacagagttacctgacaccttcctatccatcatcttactctcaatctgatacaaagaccaggctgaagacaaatcaacaaaatcaggccgaagctcctccgccgggtctttatttgactttggcactagcgggctcttctagcttaatctcccgccgcagcccaaatccaccgccgagccatcaagctcagagggggagcctgggaagacttccggaccatggaggagaacagtcctcgtcccctagctccaggcctgtacctcggagcccaggcaagggtttctatggtaacatggtcctcggctccaagaagacgtaaacgcccccgtacgcccggggggcacagcggaccccggaagcccttgactcgctccagagttcagccccgagccgcgcgagtcgactcacctacctcttttcaagccggcctagccccttcccggaacctcggctcccccccaacgaaactactgctaagccaactggactacacttcccagactgcttggagcctctctctccgcagaacctcgtcttccgcgagcttttcctggaggttctaggagggatgcccctcaatgccacgacgccatttcctactacgacttccatcatgctccgcgccgctccgggggcggtgacccctcttggcccacgtcttgtcagtgacgcacttcctgtcagtgacgcacttcccctctgctgggcgcgcggtggacggtctgaaagggagtgttcgggtttcgctggggcctcgcggctccagagcccagcatggcttcctcgcgagcctcttccacggtacagagcccgggatcccagctcactctggcagggagcgctaagggggaaggggatctctgcgggaaggggccgttaaggagcgggagaagg

SEQ ID NO: 42569 - DNA, 2300 bp, Homo sapien
gctcagtcaggtgcagtggctcacgcctgtaatcccagcactttgggaggccgaggtgggcggatcatttgaggtcaggagttggagaccagcctgggcaacatggtgaaacccagtctctactaaaaatacaaaaattagctgggtgtggtggcgggcacctgtaatctcagctaatcgggaggctgaggcaggagaatcccttgaacacaaaaggcagaggttgcagtgagccaaggttacgccactgcattccagcctgggcaagagagtgagaccctgtcacacacacacacacacacaaaaagatttcactttgggtaaaaaataattacaaaacttcaaaagggagaatatcatgaaccactctagctgcaaaccaatgccagaactatgttagatctccagaagacaaatggaatcaatctgaatccaaatgtacactgaatttttgataagactgctcactcatagaagaaaaactatataacagattgtaagaaaaaggctctctgcatgataataagggggtaggcaaaatacagccttatagctgcaagtttaagaattgaaattctgccgggcacagtggctcacacctgtaatcccagcactttaggaggacgaggcgggcggatcacaaggtcaggagtttgagaccagccagaccaacatggtgaaaccccatatctactaaatatacaaaaattagccgggcgtggtggtgtgcgcctgtaatcccagctactcgggaggctgaagcaggagaactgcttgaacccgggaggcggaggttgcagtgagccaagatcgcaccactgcactccagcctggcgacagagcgagactctgtttaaaaaaaaaaaaattgtaattttttgacattataaaactgtggtatttaagtttagaaaggtattcattacacaaagaggtaaagatgggctcacaatttgcatcttaccagaggttatattaatatttccagcttcgatccctgctttaagtccgtctttccccaaaatcccagactctcctttggccagacgctccctctccttctcttccaaacttccataatagatgtgtggtttcttcacgaccggagcaactaagtcgtcgggtgctttagttttggttgcctgctaaatcaaagatctgcattaaactaaggtttaatcttggcaatttaccggacttcaccagaggatgaagctcaccctgagtttcacagtcctgtttcctctgtaattgaaaggacaaattggacactacttaagacgctcttcattgatttgaggaggtgaaggtagggtgagggtgtttcagtccctcactttggttgatgggattaataaaactagtgaggttctctcgggtattttcctatgaaaggtttgctctgaaatctgtttacttcattccgttggaagtgttcaatctcgtgttttatgcttcccggattactgcttatcactggggaaatactaaggatagatgaaataaccaacgcggtgctaaaggataacaagttacaacattacaagtgtatacatttcaaacgttcctagacgtgaggtagtaggagttagtaggtctcattaaaattctgagatctgccaaaggcataaaccttggccaagacacttccctatttcagagcaccgttactggatgagtcggaagagatgcttgccctttggggctgtagtgggagaggtgcaaataagctacagtccacgaaagcgcttagggatcaggaaaacggtggtccgctgtgtaggacaccgctgagtcccgcagccttcctcctcagccctccaccgccttctcccgctccttaacggccccttcccgcagagatccccttcccccttagcgctccctgccagagtgagctgggatcccgggctctgtaccgtggaagaggctcgcgaggaagccatgctgggctctggagccgcgaggccccagcgaaacccgaacactccctttcagaccgtccaccgcgcgcccagcagaggggaagtgcgtcactgacaggaagtgcgtcactgacaagacgtgggccaagaggggtcaccgcccccggagcggcgcggagcatgatggaagtcgtagtaggaaatggcgtcgtggcattgaggggcatccctcctagaacctccaggaaaagctcgcggaagacgaggttctgcggagagagaggctccaagcagtctgggaagtgtagtccagttggcttagcagtagtttcgttgggggggagccgaggttccgggaaggggctaggccggctt

SEQ ID NO: 42570 - DNA, 2300 bp, Homo sapien
aggagaaatagaggcacagagaggtcaagcaattcaactggaatcacagccctaaatagccatggatctggcatcatgaaccttgacagaaactacaactggatccctagaactccactgcttcttgggaagtggctttgattctgtccccaaagatatcacttatcccatccccttttatctcctctgccactgcctaacctgcaccaccatcacacgcctgagccacactgctgcagcccgaacgggtgttcccttcccgatcttatccctctcagcctgtcctctgctctgcagctagaatggtgttttaaaaatggaaataggatcaggtaccttaccctaccgctcacccctggaataaaatccagatgagctcctgagttcacaggtcccgagtactataccctcccaccttgcctactccggtcaccacaccttgatcaccctgggctcctttcactttctcaaattggaagagcttttctcacctcggggccacacatgctgttccctgggcctgcaacgctcttcctccactgtgcgtggctggattcctatatactttggtctcagctcttctgtcatctctttgcagaaaccttctctggtggtctcattgggagcagccaccaagcacccgaagcccattttcctttttgccctttattaacaaccattaaaattgtgtatttatttattgcccattattcattaaatgtctttttgcctcactacactctaaatgtcatgaggtcaaagacaatgtctattttgttcaccataataccttgcacagcacctgggctagagtaagcactcaataatgtccgagtggatgaatggactgcagaataaagcactggtgcagagccctgctaaactaccctagtttcgcttagggctccatctccctctgcatatcttcatttcctccttccctgtttggagcagtgccagaggtctagaagaaaaccaggaagccacaggtccgagagtataagcaggttttgcttcagacatcggctcagtcggggtagatgatgtcatatcaggggctctagggagactcccttcccccagatcccctcttccacagttcctggatttctaccatgagtcttctggccgtgaaggattcctgatcacatgcaaacacttattatctagctagtaacacgcactgagtagggggacggcatggatgcagccttctgtctttacgaaaaccatgagtctgaagacatgggtcccatgtcaccattaactagctgggtgactttgggtgagtcacttcttgtctctcatctgcaaagtgagtagttcagatggagaattggtttttaaactttttcttttccccagcagatcaactcttcaaattattcgaatgacccatatgagaaacagagaaaagccaagtatttctggttgaaacggagaagctgggctggagtgcgcctccctccaactccccgctttaactccctaaggttggtgggatggccagctctaagatctcagaaggctgaccagctgtgtgctaagaacaaagcagaaggcagcgaggtttgtacacgctgattgcagttacttaggcacattaaaagatcagcgggtgactggactgaatctgatagtcggagctcttaagcttcgaagtaggtgactttcacagcaaccaaagtgctgagcaggcagcccctttgtgcaaggaggaggttccagccactttcgaagagaaatgagggccccagagagaggaagcccagaagactcagttaccctcttcacatctacaaagacgaaattgccaccctacctttccagaccagggactccaggtgttgaagggactgcccacaatctcacaggtgcttggcttccaggttcaattagttgccatgccctggggggaactcaggtcccccatcttcctccccaccccaccccccaggaagctctctggccttggctccaagcaggtgtgctcaagaggctgccgactgggccacctggcagccccaggtgctgcgtgcatgctgccatggagacaggcccctgggttggtggcaagaaggcagtctcccaaagctttgccgattcaggggagggagcaactggagcctcaggccctccagagtagtctgcctgaccaccctggagcccacagaagcccaggtgcgtgccctgaaggtttcccaggacaaagggagggaggaggagccagggtaggcagaggatggggaagaggctctggaaggggaagaggctctggaaggggaagaggctctggaagg

SEQ ID NO: 42571 - DNA, 2300 bp, Homo sapien
catttttgcattattctttcattcaatatttatatatttataatgagggggttagatcaataggggattggtgaagtgatttatggtacagccattcaatgaaatctgatacaaccattaaaaaaccgaagaaggtcttctttttttttttttgctctgtcgcccaggctggagtgcagtggtacaatctcagctcactgcaacctctgcctcccaggttcaagcgattctcctgcctcagcctcctgagtagctgggactacaggtgtgcaccatgacgccggctaatttttgtatttttagtagagacggggtttcaccatgttggccaggctggtcttgaactcctgacctcaagtgatccacccgccttggcctcccaaagtgctgggattacaggtgtgagtcacagcgctgggccaaaaaccgaagaaggtctttatgtactaatacagaatgatatctcaaatacatcatcaaatgaaaaaagaaaaatgcagaacagtgtacataatatgcacatttgtgtaaaaaggaggtaaaggaatacatagatgttttgccatggacatgctgtttgtgtatgtataaaacatctttggaaagatacacaacaaactgatagtataatactttgatttccagggaaactaggtggctgcgaagagacagttttcactgtgaaatcaaaccattcacatgctcaaccatgtaaatatattacctatttaaaaatcaaatgtgggcacggtggctcaagtgtaatcttagcacttttggcaagtggattgctggagcccaggagtttgagaccagcctaggcaacctggagaaaccccatctctacaagaaatacaaaaattagccagccacggtggcatgcacctgtagtcctaggtactcaggaggcggaggtgggaagactgcttgaccccaggaggttgaggctgcagtgagctgtgatcgtgccaccgcaccccagcctggatgatagagtgagactctgtctcaaaataaatcaatacataaaaattaatgtaaaaaaacacaaaatgcggggactagggcatttgattacatcaccaagcagatacatttatttacttgtttatttctcaagtatggctgaaaatgtcagtaaagaaataaggggccaggcgcggtggctcatgcctgtaatctcagcactttgggaggtcgaggcaggtggatcacctgaggtcaggagtttgagaccagcctggccaacaaggcgaaatcctgtctctactaagaatgtaaaaattagccgggcatggtagcgcgcacctgtagtcccagttactcgggaggccgtggcaggagaattgctggaaccagggaggtgggggttacagtgagccagtatcgccccactgcactctagcctgggcgacagagcaaaactacgtcttaaaaaaaaaaaaaaaaaagaaagaaaaaaaaaaagaaagaaagagagagagaaagaaaagaggaccataggtacaaaaagaatttgagcgggaacaaaagatgggccacgtgaacagaccggttataacaataatagttctggttaacatttagcgagttactgtctgccaggccctgtgttattacgcgatctcgacacgtattacctcatttaatctacagatcaagtaggtaggttattatggccattttcaggtgaggaaactgaggctggcagaagttaattaatttgctcaagtctccatcggtagttaaacggagtttggattctcagtgagggctgaactctgacctagaagtgtgccttgcttgagaaccctggctcttcaggcagacgctcaaccgtctcccgactatttttctgctgtattagtggccgcttttgtcagtattttgcaagagctatctgtattttggttacagggactcagcatagggaaggatccatctcggcagaagccaggagtcgaggcaggtcagcgcacagaggacagtggaatccgaggggatggcaggagatcaatcggacccagaacagaggcctgcaaggatgagcgcacttgatcccctcagagaaaaagccagagtgactcacaggagaaagacaaagcaaccaaagcttccagggtgtacaggaggtccaaagtcaccagaaggaagaagaaaacctgaaacagcgagagctggccaaacgctgctaagacctatgcaaataagacccacccacgctacctggaaatcgggcctgggaagtcagaaaacaaagcacatgcgtgcagggctgcacgaacggaggcggaggaggc

SEQ ID NO: 42572 - DNA, 2300 bp, Homo sapien
accaaatctgtcctacaacagtcttctagaactcagctcctctcaagggagacagggtagttccctcagagaatagaggcaggaccatgtcttgtgggcattctgcaaacagctgtggccacaagccaaacttccatagtaaggacagcctgctgtactgttacctggagtggcttctccagccactcaggtgtaactgttgcttgaggaaaaagagcagatgttttagacttaatgatcataaatctgaccagggagaacgagatctggaaatgttgacctgaccaagtggcacagattccctgcccaccaggtatgcgcctgtagtttttagaagagtggcctctaagatgcagatggagggagatgggtcagctgaaacccccaaagactgcctttcgggctctcccattatcctccatctccaaggcatcaagaccccaggaagccagcagctaaagatcagtatccttgtgtgtttttccctgcctgggccctgctttattctctgggcaggtgactgagggcacctttgtaacatgtctttagccggtgagaccccgacacttcttggtgatggtatgcatcctgtttggcccgtgtgccattctctaccattgaagtcatggagttggcccaagttctgacctccctggtatgctttcctctgaagaagtggggtctctctcatacgggttagatatgtacagcaaatgctttatttccttgcatttctcatgaagacatcacatttcatgatgctacactcttggcctaatctgctggtccccctttcccccccagcctgccttttcaccttgtctctggatggatcaggacccttgacttctctggctgttggtgacgccatctccttattgtgtgcaagttttaacagaggaattcacttactcagaatggaccacagccaagggctggaactgcaggaagtggcagcattctgaggccaagagacactcactggacaatatcaaaccatggctcctcctcagcatggctttgtgtctttcccagttatcttgaggggagtgggatgtagggctggtattctttgcttaggttcatttacaagatgtatcagtgttgtaagtccaataatttaagtccagtgattcaaaatcaggtatagagtccagaaacatggactacacataaggttctctatttaagttaaatacaaatgcaactttttagtgagcttttaggactactcttcaaaaaaagtgtattgctcagaatgatgacctgtaaatgtaagagtggcaggcctctgtctgtgaaagtcagaacacagggctcgagcctctggaactgaccctttgcaagtctttacaaaagaaaaaaggcagtggggagagagagtgttttggttacatcagaaataattgagatgggaaagaatagtgcagctccatagaggagacggactgtagacaatgagattaagcttcaatcactgctcctcagcaatgtgaagaatcaaagtcagggcaagaaagcgaaagcttggacttctattcaaagtggcagcagagtgggagggcggtacccttctagcccagtgctgctgagcttgtgtgaaaatcagacctgagatggcttgaagcagccaagaaccacatgggcattgcccagaattacaggagttagcacaccagctctacagataagaaaacattgaaattcaaagattaaggccaaaaatatctcacttgcaattttaatattttcatttggatttatataaatgaaacatatatatgttttggaatggccagagtgaggcaaaggggatccctgaaataacattagaacatacaggaaaaacgaggcaggcagatcactttaggtcaggagttcaagaccagcctgtacgtgcgtgcctgtagtcccagctactcgggaggctgagatgggagaatcacttgaacctgggaggcagagtttgcagtgagctgagattgtgccactgcactccagtctgtgtgacagaatgagaccttgtcttgaaaaaaaaaaaaacaaaaaaccacatacaggaaaaaagagagggatggagtcaactgtgccccagacattaagcccccttcagtgaggaggggcaaggtgctcaggcctgcctgtgtggcccccaggagtcagacctcagcctcatgctcactggtccattttcctccagggaaaatggagttctttctgccttcagagatgcccacacataaggcacatgaggctgttggtgacaccatcaccaacactggagattccctttctgacaa

SEQ ID NO: 42573 - DNA, 2300 bp, Homo sapien
cagggttcagccatgttgtaacatgtatcagaatttcattccttttttttttttttttttgagacagggtcttgctctgtcacccagactgcagtgcagggacctggtctcggttcactgcaaccttcccttcccgggctcaagcaatccacttgcctcagcctcctgaatagctgggactataagtgtgcgccaccatacctgactaatttttgtattttctgtagagacagggttttgccatgttgctcaggctggcctcgaactcccgggctcaagtgatctacctgcctgggcctcccacaatgctgggtttacaagcacgagccactgtgcttggcctatttcattcctttttaaggctgaaaaatagcccactgtatgtatattaccgcattttgtttatccatgaatctgtcaaaggacatttgggttgtttccagcttttggctattataaacaatgctgctatatatatatatgtgtgtgtgtgtgtgtgtgtgtgtgtgtgtgtgtgtgtgtgtgtacaaatatctgttctatatttactaactgttttactttcaatcttaaagctgttttgcattagatatgtcttattttttatttatttattgagacacagtctcactctgtcgcccaggctggagtgcaatggtgtgatctctgctcactgcaacctctgcctcccaggttcaagcgattctcctgtctcagcctcctgcatagctgggattacaggtgtgtgccaccatgcctggctaattcttttttttttttaatttttagtagacatggagttttgccatgttggccaggctggtcttgaactcctgacctcaagtgatccacccgccttggcctcctaaactgctgggattacaggcatgagccatcgtgcccagcctagatatgtctcttttaaacaatgtacaggtggctttagtttttaactcagtaagagtactgcctttcaataagtgaatttatcccaattacatttactgctatcatatatatgtttgatcttgttccttccatcttttctgttggtttttgaaaaacactttgtcatattttcattgtcttctttttctataaaattgtatatttgtttttagagttatttttccctttatatttttaatttaaataatatggaacttaagttcttctcatgatacctctgtatatgtattaatatccttaaactcatattctcaatgtattaatttcagaaagaaaacagaatctcctgtaaggaaaattttttttttctttaattagcacaattatattacttctggctcgttcccacttttgtaagtactctcttggatttttatctagtctattatcatattattaatattttgtattttatacatataaatttttaaaagaattaaaacaattacatttcttctcatagccctcgttttgacaattctttagacataattctgtgtttaattggattgaaggctcatacagtgaattcagtttggaacttctttaatattcattggctttattattcatcattcattcacattctttattttttattttttattttttgagatggagtttccctcttgttgcccaggctggagtgcaatggtgtgatctcagctcaccacaacctctgcctcctgggttcaagtgattctcctgcctcagcctctcgagtagctgggtttacaggcatgcgccaccacacctggctaattttttatttttagtagagacggggtttctccatgttggtcaggctggtcttgaattcctgacctcaggtgatctgcccgccttggcctcccaaaatgctgggattacaggcgtgagccaccgcacccggcccattcacattctttaataatataccttcaactatattattgaggaatgctttgcatatggcaagattttacaaatttaagaatgtcttcccattgcctttacacatgaacaacactctccgcacatacagattctttttctttcttcctttcctttcctttctttctttctctttcttttctttctttccttctttccgtccttctttctttctttttctttttctctcttctttctctctctctctctttcctccctccttctttctttctttctgactgggtctcgctatgtcacccaggctggggtgcaatggcacaactatagctcactgcagcctccatctccctggcttaaacgatcctcttgccttagcctcccaagtagctttgactataggtatgcaccactatgaccaccgaatatatttgtatttt

SEQ ID NO: 42574 - DNA, 2300 bp, Homo sapien
tccagcatgggcaacagtcactcacatggctggcatttggtgctagctattggatgggccatgtctctgaaacagactagcctggtcctcttcccatgctggcagtgtgccaagaggatgggagcagaaactgcaaggccttttgaagcttaaactcagaagtcccacgatgtcactcctgctgcattctattggtcaaaacaagttacaaagccagccttgatgggaagagctacaaagaagttgtggtcgtttttaatctatcacaccctgatgttggcctgaatccagctggtaggtagagagaaggtttttatttttataatgtttgggaggcagaattgagaagtctcggggattgttcttgaacgaggaagcaagggtaaagttacaaatgactcctagatccttggcttgggtgattggtgaatggtagtgcccagcacttacagggaaaagagggggaacaggtttgaggggaagatgatgtttccagtatgagtcatgtcaagaatgaggtgtcttttaaactgccagttgcagatgggcgggtggcaggtggatatacaggtccgactcagggagaggcctggctacaggtaccagtttgggagtctttcgtgcctgaagcctaaagcctctctctcagagggaaaaacatccccagagcaggaacatcttgggtgcagagatctagtaactcacctctgtagctgcactgagcctagcccagtgtcccaggacaaagcagtgagtctatcctggttgtagcttgccaggctgttgtgggggaaagggattaagtctgtaaggagagccattggttctgagcgaagatcagagtttcaagtggcatacgggtagatactttctcctgccagaaggaaatctcccaacaataggtcactagcttagaaagtaatcagcccatcattacagagtgagcatcaactagggctacagatacttcatcagggatgccatggaggggatcccttccctggactggaaaacagacccaatagccagtatgtggaggcaaacttctctcaccattcccaccccctcaaaggcacccaattttcagaaactccacaaatcttcattgaaggctgttttgccagatcaacactgcagaggcacctactagggttcaaaataaatgttggggccgggcgcggaggctcatgcctgtaatcccagcacttttggaggctgtggcaggtggatcacctgagatcaggagttcgagaccagcctggccaacatgatgaaaccccatctctactaaaaatacaagaattagccgggcatggaggcgcgcacttgtagtcccagctacttgggaggctgaggcaggagaatcgcttgaacctgggaggcagaggttgcagtgagccgagatcgcgcgactgcacttcagcctggacgacagagcaagactccgtcttaaaaataaataaatgttggctaggatccctgccattgattcattcaacaaacattcaacaagcccctactatataccaagccccatactgtgcaccaggaatacggagatgaatagactctagtctggtagcaatgcgaccgcagctgtaaaaactgtgtttctacaactgtcttcccatttggatctcaagaaggtactgaggggtctcttcttgctatggtactaggctgtaatggttcaatgaaaaaaaaaaaacgaaaggaatagaggagtggggagctgggggagtgtccaaaggaggaatttctagtcgaaatcagggaaactccaaagaaatacggcaacacgtatgtctgagcgaccaataatttaaaagatgacctttattaagtgctttctccatagctattacaaaggtacccgttttgcttggattgtctagattcttctggcagcggagtcctgggcacaagcgtcctctcctctggacctgatcacgaagagagtagcgccgggcgctcagttcccgtcccagctttaggcgaacggaactgcggttcggcggcctgcgagggtgcccggaggcttttctccagcactcccgccctagcaacgtgcgcctgctgctaggggcggaggcgcgggagggctcggaggctgttcccacccccaggctccgcgttcccgccggccccagctccagccccgcagcccaccggtgggtactgagcctgaggtgggagaaaggggcatagcggcagactaggagcgggcaaccctcgccctttggtcgaagcggagagcggttatgagggccaaccttgggctgggtggcgctaggttccca

SEQ ID NO: 42575 - DNA, 2300 bp, Homo sapien
ccccacccccagaggagtgtagatgctgttatgaggccatcaccctcccactgggatgcactggaaacttctttagatgccaggaaagcagcacccctgtcgccaaagaacctcacacaatttacattctgaaacctgctacaactgtatttacagatcctcacacatataataaaaccttttattatcccctactgtatatcagacacccaaagtaaatactttgtagacaagatctcatttcattcttgaagtagccctctaaggtagatgatagtattattatcacctctgttgtagagataagaaaacagacacagaagctgtgagtaacctgaccaagatcccatagctgtaagctgcatagctgggatgaaaccaatgactatatttcactcagtgttctctctaatcatatggtgtaatattgtctatctggggtgacaatgtgtccccattggatgatgacaccactgtgtaccgctctgggtagctctggggctgttagctgcccttacccctcaggtgctaaagcagtagtggctgagaaggaaagggttctatctcctttgtgtggccattgcttagagaagcttcagagtagaggtgctagagcccctgtgagctatgggatgtaatgtttctctttcggtttagctcccgcctgtgttcagttctgatgcactcagagtactctctgacacctgaaggcctgggcccttccccttttgagagagtgcccagctttctgccaagactcctaagaaagaatttggggttggtggccgggcgcggtggctcacacctgtaatcccagcactttgggaggctgaaggggggagatggcttgagcccaggagtttgagatcagcctgggcaacatggcaaaaccctgtctctacgaaaaatacaaaacttagctgggcacggtggcatgtgcctgtagtcccagctactcaggaggctgaggtgggaggatcacttgagctggggaggtcgaggctgcagtgagctatgattacaccactgcactccagccagggtgacacagtgagaccctatctcaaaaaaataaaaaaaaataaaaaaaaaaaagaagaagaagaatttagagctggagagcagcgttctccttgtatgcccagacagactagactggatccccagcagagggctcaatctgggctcagactaatatataagatcctgagggtgggaaaagccctaaacagctcaggaacatgttagcagtttttctttctggggtgggagtgggtggatttttcttccacatgcttatttgcatattttgttttcttcgaaataaaaaggcattactttttttcaatgctagtttaaaaagaaaactcaaatattcaaattcaaaaagtttggatgtaaatactttgggaaaatcagcctaatacagatatttctcactgggcctcaatgttcaatttaaaaaattattaattatagtaaccttaagtcacactgcctaggttccaatctcatagctaccaattagtaactgtgacccttggcaagccacttaacttccataaaaatgggatcctaatagtactttcctcgcactgttagtagacacttagcgattgcagctgctatgttccagatattgttttacgtatttagcgtatttactcctcagacgtctgggaggcaggtactctcaccccattttacagctggagttcccacccagtgagcagccaaacgggatttgaaccaggcagtttctcagcagagccttgcttgaagctaggcatctaaagctgcctctcaaaaagggcagtggtcgggattacataacagaacgcttgcaaagctctcagcgaaagcctggcacttaataagtgctcaataaagtttcctacggtcacagtaatatttggagttttatgtttgttgtagaacaaatacgcatacaatcgcgatttcattcaacaaggaatttaaagagacctgctgccccgggcgggatgggagcgcgggttgggtgggaggaggcgcagctgcggggcgcgctggcgcaccgggagggccgggggcggggtcagccaggccccgcccgccgccacctgcgacaggtggagcgcacggggcgggcgcacggccatgtccgccgagggcgcggagccggggccggggtccgggtccgggcccgggccggggccactctgccccgaacacggccaggctctgagctggttctgcggctccgagcgacggcccgtgtgcgccgcctgcgcggggttgggcggtcgctgccgggggca

SEQ ID NO: 42576 - DNA, 2300 bp, Homo sapien
agagccatgaactgctgaacctcttgtggtcaaggcagtgggtgttcgttcattcaacaaatatttattcagggccttctatgttcagaaactctctttgaggtactaggacatagagaagtcagacttatggtgcttctgttccagtggtgggggagacagatacccaaaaaggtaaacaaacacataatatatagtcagagagttataagtgcaagggagaaaaataaagcaaagtaagagattgggtgaggagggagatggtcagggaagacctctctgaagagatgacatctgaatgcagttggggagtgagacacacacacacacacacacacagactggtggaaacggaactgcaggtgcaaaggcactgaagtcaggacaagtttggtacatttaaggaacagaaagaaggccagcatggatagaggtagaaagtgatgttggagaaataagctgagtcacatcaggtggggctaggttggctaagctaagaagcctgatgtcattgtgagtgtactgaaagccattggagggttttgagtaggggcatgacctggtctgatttccttacaaaaggtggctctggctagctggggggttgggggtgcagggtacccagttaagaggttctaacagtggttcctgtgagagatcatggcaacctggatagaataactggagtagaggtgaccagaggagagagagagactttggagatggggttgataggactcactaatggaattgatgtggggttggagacaaactcctgggtttttggtctgggtaacaggtgaatgattgatggtgctgcttaatgaatgaggataacttggcagagagcagttctggacagaacagaaggtatggacagtcaggcagctgagtatgacggaggaccaagagtgtgtgcgccagaaagtggttataacgggctgagcgtggtggctcacacctgtaacatcccagcactttggggggctgaggcgggaggattgcttgagcccaggagttggagaccaacctatgcaacatggcaaaagtccatctctacaaaaaatgcaaaaagtagccaggtgtggtggcacgtgcctgtagttctagctactcaggaaggacatgggaggatcacttgagcctggaaggtcaaggctgcagtgagtcttgatcatgccactgcactcagcctggacgacaagcaagactctatctcaaaataaatacataaataaatttaaaaagaaacaaacgcctgggtgcggtggctcacacctgtaatcccagcactttgagaggtcagggcgggcagatcacctgaggtctggagttcgaaaccagcctggccaacatggtgaaaccctgtctctactaaaaatacaaaaattagctgggtgtggtgacacacacctgtaatcccagctacttgggaggctgaagcaggagaatcgcttgaacctgggaggtggaagttgcagtgagccgagatcgcaccactgcactccagcctgggcaaccgagtgagactctgcctcaaaaaataaataaataaaaaaaaataaaaataaacacaagacaaaatggactttaaggcaaacatagtactaaagataaagtcacttagagaatgtgcagttcaccagcaacatataatgattctaatcttaaatgtttctaaataatatagcctgagaatattcatagagcaaaaatttgttttaaagttattataatgataggctggggttctgggatgaagacggaggtgaggtcacagaaggggatgatggacagtgaaaggtagtcccactagtgtgttggtggcctcaactgagctgttgctggaataggtatcctagaattagggagtgagaaggatagggcatggtggggagagtgtggatccttgaaatggagatttaggaggtggtacagtttttgataatgatgagatctgggctatgaccatgggagtgggtggctgacatgtggtaacaggagaaaatcactgggatggagtgaatggctcaggtacatggaccaagatgccacaagcgttgtttgtgttgcagaacaagattgtggaccagtgtgagaggctgcagttacagagtgctgccatcaccaagtatgtggcggacgtcctgccggggaagaatcaaagagcagtggtaattcctcttctttcctctctactcagccccctcccaggataaggccttagacttagggacttgggcaagtctagggtcccttaccaacctcacagactcattgtgctactagcaaagcttctc

SEQ ID NO: 42577 - DNA, 2300 bp, Homo sapien
acatacattacttttgcaaacaaagataaaactctttttttattcttcaaaagaataaaaaagctccctggtggtctagtggttaggattccaggctcttaccacagggatctttttttttttttttttttttggggacacagtctcgctctttgcccaggcaaatattgtgcagtggcagaatcttggctcactgtaagctccgcctcccgggttcatgccattctcctgcctcagcctcccgagtagctgggactacaggcacctgccaccatgcccggctaattttttgtatttttagcagagacagggtttcaccgtgttagccaggatggtaccacagggttcttaaaaacaaaaagaggccaggtgcggtggctcatgcctgtaatcccagcactttgggaggctgaggtgggcggatcacctgaggtcaggagttcaagactagccaggccaacacggcgaaaccctgtctctactaaaaatacaaaaattagttgggtgtggtggcacacacctgtaatcccagctactggggagtctgaggcaggagaatcgcaagaaactgggaggcgggggttgcagtgggctatcgcgccactgcactccagcctgagcgacagagggagactccgtctcaaaaaaaaaaaaagagaaagaataaaaaagcaggttactgcagcggactctaccctcaccaagttatcttggatttaacaagtttccaactgaaagcaattccctccaataccaactggggaccctgagaccagagaggggctgggccttgcccaggttcacacaacactaagcaagccaggctgggtcccaactcccctcctcccactcaacctgggtacttctcgggggtttcccgatccaaaggaggccaggagccggggttggggatggggagcggagacagcggtgaggagcggcggtgtggcgggcagggggtgcgcagacagggcggagaaggtgctggtaacgggggctgcggagcggaagggtgcgggctggggaacctcagagggtgcggggagggaataaggggcgtagatggtgcagggtaacggaggcgcgcagtgaaggcgggtgacaggggcgcagagaggtgcacagtgagacgaaggagggagaggggacggcgagggcgacgggagatggggcgggagagggcgaaggtgagggggataagggcggggacggggcggggacagaggcgggtcgggatggtagggaggggcggcccgcgcgatccccgccccaccgcccggcgcttgcgcacctccgcccgagctcgcgggccttgcggctgcgttttcaatctgcttccttgtgagtcaggtgggtcctgggcccaggaaccggcccggagccgtggacgccctacagctgagaaggggacccaaggggtcggccgcggccaaggcccctaggaccgccgccccagctcacgctgccgacggcagctatagacattctgcgtcaggtccgggctcctggacttcgcctttcccgagccctggaggtggggagaaaaggtgagcagttcgtgcctgcagcgcagagccccaaacccgcggttttagaaatcgaaaaagccctgccgggcgcggtggctcacgcctttaccgtaatcccagcactttgggaggccggggggcggggtggggcgggggaggatcacgagttcgggagttcgagaccagcctggctaacatagttgaaaccccgtctccactaaaaatacaaaaattagccaggtgtggtggcgcgcgcctgtagtcccagctactctggaggctaaggaaggagaatcgcttgaatccgggaggcggaagttgcagtgagccgagatcgcaccactgtacacctgggtgacagagtgagactctgtctcaaaaaaaaaaaaaaagaaaaaaagccggccgggtatagtggctcacgcctgtaatcctaacactttgggaggctgaggtcgggagttcgagaccagcctggccaacatggagaaaccccgtctctactaaaaatacaaaaaaaaaaggagccggggatggtggcgcatgcctgtaatcccagctacttgggaggctgaggcaggagaatcgcttgaacctgggaggcggaggttgcagtgagccgagatcgcgccattgcacttcagcctgggcaacaagaacgaaactccgcctcaaaaaaaaaaaaaaaaaaaaaaaaaagccgtgggtcaggagccagagccctctgctctagtcttagctgtgccaatgtgactccctgtgtgatttggg

SEQ ID NO: 42578 - DNA, 2300 bp, Homo sapien
aggggcaggccaccccttcacatgtagaaacaggattgcacaaaacgctaatagactgaatagagaaacccaccaagacccatctgtgtagattcttcttggcctctctgtgcagtgttccttcctccagggtatgcggcaagaccctctcaaaggggcctgggtggtgggggctgtcttatgacctgtcttgcctaaggtcatagtgcaaggtgatgagactaaagaggaacagagcacaggcacagaagtatctcaaagcttcccctccggtacctccccagcctctttggcccaaaccccctggctagcaacattcctatagttcctcagtgtctctttggttcggaaaaaaaactttcttgcctggaggcctttgcatcagggggtcccttaaccatcactcagatccttcccctctgcatggccaactctcatatgtttgtattttttagttttttgagactaacatgcattacatgcataccttatttatttattatttttttatttttttatttttttgagatggagttttgctcttgttacccaggctggaatacagtagcctgatcttggctcactgcaacctccacctccccggttcaagcgattctccttcctcagcctcccaagtagctgggaatacaggcatgaaccacctcgcctaattttgtatttttagtagagacggggtttcaccgtgttggccaggctagtcttgaactcctgacctcaggtgatccacccacctcagcctcccaaagtgctggcattacaggcgtgagccaccgcgcccagccaacatacattacttttgcaaacaaagataaaactctttttttattcttcaaaagaataaaaaagctccctggtggtctagtggttaggattccaggctcttaccacagggatctttttttttttttttttttttggggacacagtctcgctctttgcccaggcaaatattgtgcagtggcagaatcttggctcactgtaagctccgcctcccgggttcatgccattctcctgcctcagcctcccgagtagctgggactacaggcacctgccaccatgcccggctaattttttgtatttttagcagagacagggtttcaccgtgttagccaggatggtaccacagggttcttaaaaacaaaaagaggccaggtgcggtggctcatgcctgtaatcccagcactttgggaggctgaggtgggcggatcacctgaggtcaggagttcaagactagccaggccaacacggcgaaaccctgtctctactaaaaatacaaaaattagttgggtgtggtggcacacacctgtaatcccagctactggggagtctgaggcaggagaatcgcaagaaactgggaggcgggggttgcagtgggctatcgcgccactgcactccagcctgagcgacagagggagactccgtctcaaaaaaaaaaaaagagaaagaataaaaaagcaggttactgcagcggactctaccctcaccaagttatcttggatttaacaagtttccaactgaaagcaattccctccaataccaactggggaccctgagaccagagaggggctgggccttgcccaggttcacacaacactaagcaagccaggctgggtcccaactcccctcctcccactcaacctgggtacttctcgggggtttcccgatccaaaggaggccaggagccggggttggggatggggagcggagacagcggtgaggagcggcggtgtggcgggcagggggtgcgcagacagggcggagaaggtgctggtaacgggggctgcggagcggaagggtgcgggctggggaacctcagagggtgcggggagggaataaggggcgtagatggtgcagggtaacggaggcgcgcagtgaaggcgggtgacaggggcgcagagaggtgcacagtgagacgaaggagggagaggggacggcgagggcgacgggagatggggcgggagagggcgaaggtgagggggataagggcggggacggggcggggacagaggcgggtcgggatggtagggaggggcggcccgcgcgatccccgccccaccgcccggcgcttgcgcacctccgcccgagctcgcgggccttgcggctgcgttttcaatctgcttccttgtgagtcaggtgggtcctgggcccaggaaccggcccggagccgtggacgccctacagctgagaaggggacccaaggggtcggccgcggccaaggcccctaggaccgccgccccagctcacgctgccgacggcagctatagacattctgcgtcagg

SEQ ID NO: 42579 - DNA, 2300 bp, Homo sapien
tcccaagtagctgggactacaggtgtccaccaccatgcccagctactttttgtaatttttgtagagactgtttcgccatgttgccaaggttggtcttgaactcctgggctcaagcgatccaccagccttggcctcccaaagtgctaggattacaggtgtgagccaccacacccagcctaatctccctttcaatcctccccatctccccagtggaaatcactattctgagtcctaacaacacagcttaattttgcttgattgtgtagttaatataaatgaaatcatattatatactattttgtgtctcacttcttttactcaacaatatgtttaagatttattcatattattgcattcacaatactgaaagattaaggtaaaatgtttcaaaaggtggaggctggggggagagtgggaacaggtctttcagtcaagaagaagaaaagacatgggggaaataagctacaccaaacagcaacattttaaaatttcccgttctatttgggttcttagatggttctaattatttttagttaccaataacctcagggaaggaatgagtgtcaggaaagaaatgtcgggcagggaatctaggaaaaaacaaataataattgcccctatggagtgtggttattagcaggcattgcagagagagcccagtgtaacatggggcaaattatttaatctagctggcaattgttttcccaatccgtaaagtgagaatagtaacatcgttgctgtcaagattagataaatgaatgtaaaatgcatggtactgtccctgactctttaatgcacagcaaacattatttgctttctatccccttccttgttgaatacagatcagaactccagtagctggaaactaagcagtgtcatatttccctagccttacgccgctaggccccttaaatttaaaatataaagtatacaacaggtttggggtacagattttgagaaatttaaaaaaaaatttttttttgagacagagtctccctctgtcacccaggctggaatgcagtggcatgatctcagcccattacaacctccgcctcccgggttcaagcgattctcctgcctcagcctcccgagtagctgggattacaggagcccgccaccacgcccggctaattttttgtatttttagtagagacagggtttcaccatgttggtcaggctggtcttgaactcctgacctcaagagatccgcccgccttggcctcccaaagtgctgggattacaggcgtgagccaccgaaccgggctgagaaataaaatctgagaataagtgtaatgtaacccactagtgtcctctacatttgaaagtcaacttttcaataatccctgaagaaccacctgaaaggcattgcttcgctagggcgatgatgcccgatcgccattttactcatccaatcctactggtttacccaggccccataagcctcaccagatccctcttgcctctgcacatctccaatctccataaagacctttgatcggatctatcattgtacctatcataggtctgatgcccctatcaagacttggagttttcctaaacgcccatgtctttcacatcacatctctcaactcatagcattgccgtaccctgagaaataaatgaagctggtacaaattttctctgaaaacttggaagcctggcgctgaactcaacaactttagcttagtccgcaaaaatggacttagctaatactgtgttaggcataatggtgctgttttaacggctttgacatccaattattctttcaccaagccattaaccagagccaagtttgccctaggctgggcaaaggaatgctgtgaagtgaaacctgggctgtaaccgcctccgaggccggctcacacccagggaccctcccaagcggttcctgcgccccctcgtggcctccctcctgcagttcgctgcacaagcgcagggcccggagcggggacgggcgggccctccaggccctcgacacacccaattggccaggcctcgttgcgtgtgggcggggccgcggctggagcggaggagccccccagaagaccgccttcagggggcgtggcctggactgtggagggggcggaccgtggggaagctgcttccgggtgagccccccccgctcttacgcggtctgtgggagaccggagcgggagacagcggtgacaggagcagcggccgggagcccttagggaggcaggtgagcgggggctggatgcggggagatagcgggcctggagggcggctccagggcgaggcggggactgtggcaccaagagtcctgcgtccccagattgtgc

SEQ ID NO: 42580 - DNA, 2300 bp, Homo sapien
ggccataaccttcagattgatgaagcaaaacaggattctgctactcagatgctctgagtttggtaagtgctggttttgacggtatttctagtcagtttttattctgatcttttcaggcacttttgcctgagactactctgcccagcatggaaaagcttcacagaaacacgtagcacgtctcatttcaagtggtaccttccaaggtgccacagtctcccgcccttttcagttgtctacttcttcctcttcattctgttcttcttcttccagcctttcttcgtcttcatcattgtcctcatccctgctcttgtcttgctcttccgagtctgtttttttgtctttgtccttcttcttttgctctgaggcctccttcttgcctttctgctcccgcctatatgctgtaaggacggaacaaggggttaggagacagagctgaaagtgagccagacggactgcaggagctaattacattgtacaattggaaaaacggaggcagatgggcgcggtggctcacgcctgtaatcccagcactttgggaggctgagacgggcggatcacctgaggtcaggagttcaagaccagcctggccaatatggtgaaaccccgtctctacaaaaataaaaaatgagccgcacgtggtggcgtgcgcctgtagtcccagctactcgggaggctgaggcaggagaattgcttgaacccaggaggaggagactgcggtgagctgagatcccatcactgcactccagcttgggtgacagagcaagactccgtctcaaaaaaaaaaaaaaaaaaacaaaaacaagaaaagcaagacaaaaacaaaaacggaggcagagaaggaaaaataacttgctcagcattacaaaacagatctgaggtggtgcccaccgaactgggtcgagtcacatcaagtgctggcttactggacttaaagggacccgcgctgagaaggctcagggcctggtgaacaggtcacacaggatgaccatcttctatgtggtttagaagacaagaggctcgttaccttccagagcttctttcaatggggtaacgaaccgctggaactccatctcttccatggctgagagcacatcactggcattcagcgtcttccgctttcctttcattgcaaagttgttagcactgagagaagagaaaggctgtcagactccctcttgtttgtaaggcgtgagtgggaaaaggagcacccagaggtggaacgggaaagcctgcctcttacatgtatggattttggtgtgacagggataagtccttcccttctctgcacaaaaaagctaaagcaaagtgattttgttgtgttattttgcttcagaacttgtaaaaactggcagaggactgtgaacatgtccccaccgagggagaacacaatcgttggggtttgtaggctcccagccagcaactcccagccaggtatccccgcgcctcccttatgcctctgtcccgctcaccaggatgtggcgtacagcacgaagacgctggcggcgcgggagatggcgctccgggcctccttggagatgttgacaccgtccgggagctgcgaggagaccgggggtgagcaaagctgccgttccagcacctgcttccctcctgcccgttcgtccgccccccccgagctgctcaccgcctccttgatgatcctggtgatcacggcattgggcaggtttaggtcctcgggcctctccgccattgccgccgctggggcttaaactccccttcgcctccgcttcagggagctactgcgtccggacttcccgcgtcgctacggtctgaccctgcgaggtttccgttccgccccacgtggcctacagtgtcccacagtgctctgagcgccatagcctccctcctccccccacagccccgcctccgcctcaaataccggcgcatccggattttgaagccgcagtggttttggcccgccaaggcttccatccaaccctaccgcaccccgcacgcccctccccaggtccatttctctgcttctcgccatcgccgcgtcgggaaccttctcaccaacttatttggctcaatggagcttccgtccgtttcccatggtgccctgcgccgctgctgggtgacggcgcggccgggcgcagcgcgtgggagacgaaggcgtggctgactcggcggggcggatccctttaggacccgaggcaggctctgggcccgccgggtccgttaatctcaccgcgccgcaaggggccacgttttaccacttgatttagcaaccctaagcggtttggaatctgctttgctctcacaggacctcagcccgtcgtgat

SEQ ID NO: 42581 - DNA, 2300 bp, Homo sapien
gggggaggggtcctgacttggtgtctcaggtctgtaaccacagcactttggtaggccaagatgagttaccccctctccacaaaaaataataaataacataagcagaaggcagggaatccctaagtaggactgcagaagcattaaatgagataatgtacttttattcatgggaggtgttcaataaatattatcatcttttcctttctagaggtgttttaggcaatcactaactaccaccttattcctaagaactttttaaggacagtgtccatttctttcttttattcaacacatttattgattactaaatatgtgaggggacctgctttggacatgaacagtaataaacaaactccctgttctaaacagtttcataatttagatcaaagataaactatcagcctgggattgcacctggcctattacttgttttgtttggctagcactttgaatcaattttaaatttgaatcaattttaaaattgaaatagcccacaatgtccttttagggaccaaaatacttgacaacactgagcccaattccagttgaagagcaactgactagcgctgagcagccctgatggtttcagccaggtctgttctatccaagcggagttcccccaccagaccttatggtctctaattgaaacactttcagttgccatttatcatagcatttgctcttttgttttaaaatatttctctataatcaggcttctatcgaaagcaggaaaactacagggcgacttgggactgcatgcttgacgggaaaaaaaagcagcattaattctcagtgggaggctgggcgccgtggctcatgcctgtaatctcagcactttgcaaggccgagggagaatcacttgagccctggagttcgagaccagcctgggcaacatggtgaaaccctgtctctacgaaaaatacaaaaaattagctgggtgtgatggaacgcacctgtagccccagctatttggggctgaggtgggaggaccacctgagccagggaggtcgaggctacagtgagccgagaccgtgccgctgcactccagcctgggggacggagtgagaccctgtcaagaaattttaaaaattaaaaaataaataaaatcagtgggagtgagaatttctacgaacttaatataaaaataacttaaaaacaacttaaaacaccattgcgccgggcgcggtgactggcgcctgtaatccctgcactttgggagaccgaggcgggcggatcacgaggtcaggagatcgagaccatcttggctaacacggtgaaaccctgtctctactaaaaatacaaaaaaattagccgggcgtggtggcgggcgtctgtagtcccagctactaaggaggctgaggtaggagaatggcgtgaacccgggaggcggagcttgcagtgagccgaaatcggcgccactgcactccaacctgggcgacagagtgagactgtctcaaaaaaaaaaaaaaagaaacgccattgcaaaaccttgagaatggttttaactggaaaaaatgtatgatgaacaatttaactgaaaaataaatacaattttaacacggtttgtttttgaaagcgaatgtgacgttgcattcttcatacagtgaaaaggctgcttctcgccctttcgttacctgcccagtccgaattgactcctgagacctaatcaggcgcatctctatatggccagcattatccctgggctgcctaaatagttcgcgttaaacacaaacaacaacaataaaatctaaataacactcagtcttagtaccattattacaaaagcgtgaggggcgaaaagattaaaaatgaacatcaacttcggtagagatggaaaaagactgcccactccattccaggaaagaaaaaagaaagtgggagaatctgatcacgacgggctgaggtcctgtgagagcaaagcagattccaaaccgcttagggttgctaaatcaagtggtaaaacgtggccccttgcggcgcggtgagattaacggacccggcgggcccagagcctgcctcgggtcctaaagggatccgccccgccgagtcagccacgccttcgtctcccacgcgctgcgcccggccgcgccgtcacccagcagcggcgcagggcaccatgggaaacggacggaagctccattgagccaaataagttggtgagaaggttcccgacgcggcgatggcgagaagcagagaaatggacctggggaggggcgtgcggggtgcggtagggttggatggaagccttggcgggccaaaaccactgcggcttcaaaatccggatgcgccggtatttgagg

SEQ ID NO: 42582 - DNA, 2300 bp, Homo sapien
ccactgcactccagcctgggcaacaagagagaaactctctcaaaaaaaaaaaaaaaaatcacctgtatatcttggctttctcttccctaaacttgcttatttctggttttctgtatacattttgccagaggtctattttactgaacttttcagagacaaggctttggtcttattgttgaagtttatttttttgaggataaatttcacctttaaccttatttccttttaaaattttctcctggccaggcgcagtggctcatgcctgtaatcccagcactttgggaggttgagatgggcagatcgcaaggtcaggagatcgagaccatcctggctaacaggtaaaaccccgtctctactaaaaatacaaaaaattagccgggcgtgttggcgggtgcctgtagtcccagctactcggggggtgctgaggcaggagaatggcgtgaacccaggaggtggagctttcagtgagccgagattgcgccactgcactccagcctgagtgacagagtgagactccgtctccaaaaaaaaaaaaatttttttttcttctgaattagcttattcctcttctaactttttgaaatgaatttttagttaaaacactttaaatctttgttattttctaaataaattatccccttgaactttctactctaattccatcgatctgtcttttctttttagttttatattatttaacaccatttaacatctggtagtacaagttccctttgttattatttttctaagttttcttggttattattgggctagatgatatcttaaagtcactaagattctttgagagttattgtgaaaatgcacccaaataaatccatttagtcccttcttttcaaactcaagtattccttattattccagatatagtcagtctttaaaaaaatgcctaaaatcattgctcgatactttattaagtgcttcaaatcaatctgtatatatgcatatggtatatatgtagtgtatgtgttttgtgtgcatgtgtcagtgtgatgtgtgcttatatatatgcataggatgcatatataatgtgtggggtgtgtttgtatatgtatgtgaggtgtgtatgtagtgtgtttatgtatgtgtatatgtgcatatgatgtgactgtgtgtgtacatgggatatgttgaggtatgtgtatgtatgtgtgcagagtgtatgattgttatcgtgtgtggtatgataatgtatgtgtggagtgtgtgtgcacatgtgtgaggtggaagaaccccagggggtgctagaatgctcaggacatgtgagaaagccaggcttggtccaactctcctgccttcttggggaaagcagggccatgatcatgagcctttctggatgttgcttttggacagcagtgtgggttaatagggccagtctctcctgaagtgccctgcccaagctcccactcacctctctcctccatctcttgaggaaagggtgaccgacctgtccttttaggaaaaggaagcttccagcacgctactgagtaaaggagccttactggtggtggtgaaggtgataccatcagaggggccagctcaggatcaggctggccttgcaatcttccaactgaatatgttagctgcagagtggggcaggagtcaggaggggacctacaaagcagtagaatctttgttcccattaccgggtgtaagtgcccagtgtgggcctcggtcttttctctcctaggtcacattcagacagcacacctttgcccaattttctttctggatctcaccgtcctgagtgttgtacctgcaggttgctcacagcctctggagcccaagatagtctcccctttgggaggaggctctacagtggtccctggcgaagttgtgaagaggtgactatcatctcaggcacatcaccttcccttttccctgtgggccttcctttgctgtttcctgaacaccatgctttctagttcctactgggagtgaacacaccttgcatggagcatcttcaggccatggctaactcatgctcccatcttgctcctgcaggtctgccacgtctctgtgctcagtgtcctctctacatcctgtggcttgagcctgagcttgcccatattccctggctggatggagtggctaagccctgatatcgctctgcccagaagagatgagtggactcaaacttctccagccaggaagaggatcacgcatgccaaagtccagggtgcaggtaagtccatctgtcactggcttgaggctaggagagtggacctgctcttgttaaaggcagtgttcaccatgtgtgtgtgtaaccggggttggagggg

SEQ ID NO: 42583 - DNA, 2300 bp, Homo sapien
acctacaaagcagtagaatctttgttcccattaccgggtgtaagtgcccagtgtgggcctcggtcttttctctcctaggtcacattcagacagcacacctttgcccaattttctttctggatctcaccgtcctgagtgttgtacctgcaggttgctcacagcctctggagcccaagatagtctcccctttgggaggaggctctacagtggtccctggcgaagttgtgaagaggtgactatcatctcaggcacatcaccttcccttttccctgtgggccttcctttgctgtttcctgaacaccatgctttctagttcctactgggagtgaacacaccttgcatggagcatcttcaggccatggctaactcatgctcccatcttgctcctgcaggtctgccacgtctctgtgctcagtgtcctctctacatcctgtggcttgagcctgagcttgcccatattccctggctggatggagtggctaagccctgatatcgctctgcccagaagagatgagtggactcaaacttctccagccaggaagaggatcacgcatgccaaagtccagggtgcaggtaagtccatctgtcactggcttgaggctaggagagtggacctgctcttgttaaaggcagtgttcaccatgtgtgtgtgtaaccggggttggagggggagagtggggtggggtgggggggtgcagtaaagagcagggcaggacttcacgaagtgccaggattcaaacaatcctacggcatttatgtgatttatcaccagtttgctgattcagggctccttctgcagtttctgctcctcgctggtggccacctgaccctgtggcgtttgctccttccacctgctgttggccatggggcagatgtggaggccaaggaagaataggacaatggcgtttggggcagacaggcctgggttcaaatttcagctctgcctattcctagctctgcaaaccttgggcatgtcacctgtcttctctgcctgaggttcagatttcttcctggtaaattggggctaatacttattagacttaccgtgaagattaactgagatgatgtgtgtaaattgcccagctcagctcagcctctggcatctggtactcaacacataactcttctctccactttctgtcttgcatctccccatcttgtttttgagtggatcactgaaccacaaatatccacttggcgatgaagtctggggaacagggacaaataccaacacttcccatttttagatttacacgagactaacagctttccttcccacagtggcaacagagatttgcagagcagatgtcttggtgtgaaactgctacgaggaggtgtcctgtaaatgtttgctgacaaagcagcaaagcagggtttgaccttccagctctgcctccccgcaccaggctgggggattcacccaccccactccgtttcctgtgcgttcctctttctcagaggctgtgggcctgtcctgctgtccgatggcatcaggctgtgggacggggggccatcaggttggttggagcaagctgctcccatccggacctgtgtcaggcagcacttgttcaagaggaggctcaagagagtgatccaggatgcagggtttgggaagaggatgcagcatggtggggggcgacctgtccaagcgcagagaacacttttccaaacctcactgccctgggccatcgggtgctcctttgcctttgcttggatctaatgattataggcctgagcttcaaagcaggttataaacccgactaattgctggtctaggagagctggacgaggaggccaagcctgcccagagtgggcaccccggactgggccttctcgtgggactggcatttccaaccgggagcgcggtgctggggccgggatacccggggtggccgcaccgtcctgctggctccttgggtggctgccgtcgctgctcagcgcgggtcggcggcgccgcctcccccaccccggcccagctctgctccggcaggtggaactctccccattcaaacccgcgcgggccaatcagggccgggcgcgccctggccgttccaacgcttggggcagccctacctcccgctcgcgctcctcccgccctggagactccggttactggggagcaacacagccgcctcgggttgcagacgctcctgtccgggtcgcagtgggacgccatggagcgctccctgcaccgcgtctccctcgggagccggcgtgcccacccggacttgtccttctacctcaccacctttggtaagtgcccgctggggctggcggcaggggctgcttcaccctgctcc

SEQ ID NO: 42584 - DNA, 2300 bp, Homo sapien
agctgttacttccgcatctcacagatgagagggacatacatggttcagagcattaggccctctctgtggccacacagctggcaggtggtgaaggcaggctctgagtgagggctggccaccttttcagtgtgctgtggcacactgcctcctgtgcatggcctagctgggaatataagacattgctgtagttcctaatagtattttacgtattacacaatatcggcgtattacaatctaccaaacattttcacgttcactgactcaagtcattcactcattcatcattcattaaatatttccacctatgtaggctgggccctgtgctgggtgctgggatgcagctctggacctgtctaaggccctgccccatggagcagtctagagctgtgctggccagtgtggtgaccacctgctacctgtggctattgagcacttagtggctagtgtgactggggaactgagtgtcaactttagttttaagtaatttcagtttacctggcacatgtgtctagctgcgactgggttagacagagaaacttgccaggagtaacttgtcaggtttgttttctgtggtttcattagttgaaaagctttcctctggcttctgtggggaactgcaaagacctttcctcctctctttctacttgccaagcacagagaggatggtgatcagggggcctccctcgtgattcatggaaattacatgggcatcaacaccgtaagtttgcttcctccaacatcacaggtttcttggtggcttgtaaagtcctcctgcgtgctggattctgcacacaggccctgagccccttgttctgaggtgcactggattttcctgaacttatgtgctcagagatgtctgtgggactcagcaaagagggtgtgcttctcagaggcttggttggggccgggggagagcccccagaggccatctcttcagctcctgtgctgtgcaggtggggagatggaggcccagaaacctgggtgacctgcccacagtcacacagcaaccaaagctgggttgaaccaaggaaccctctgtcatcaaggacttgagtgtgtggctgggcttccccaggggctctgagatgggcaaaagcagctgggctcaccatgcgctgctctgcaggatgctatcctgggactgccaggcaagaaataggacccaggttctggtcctagccccacactgccctgctgtttgaccataacctctccaggcctcagtttgtttgtcagtaagatgaggacgctgggttgtctgatgacctggaaatcccttccacatttgactttatggtccatgtgtatcaccagatcctgacagcaaaccacttccatggacaaaggacaaataaattgacttttttttttttttttttgagacagactctttctctgtcacccaggctggagtaccgtggcatgatctcagctcactgcaacctctgcctcctgggttcaagtgattctcctgccttagcctcccaagtagctaggactacaggcgcctgccaccacgcccagctaatttttgtattttttaagtagagacaaggttttaccatgttgaccaggctggtcttgaactcctgaccccaagtgatccatctgccttggcctcccaaagtgttgagattataggcatgagccaccacgcctggccgaaactgacttttaagtagtttccaagtggcaggcaggtcttcagactccaaatgttttatgttccctgtcatgagatgggatgtctgtgagtgcaaacccccccaaggtatccttggattctttaggctggggcagtctcctggatttctagcagggtccctgggacttgcagggggaggaggtgttgttatagagcagccacgttttctgcctgggttctcctccagtgaggggtgtttgtgagaacattggaatcacaaagtggcccatggcggagaatgcagccagaacaaaggcgccctctccccgccgggcccggggaatactaactagttgacaggaattttaatataaaactctccctcttccttgtcattctgaggtttcaggaagccttcgggcttatcgtgcagaggcacacagcacagacagggcttggggaggtgagaggtgatttcctgccattcttctgtggggcgggcttcccagggtgctcatgccaggctgacgggtccagtgcgggctcccgctgctgggggagagctgggttttcatggggcggcagccgaggcaggacccgcagccatgaaccgcttcaatgggctctgcaaggtgtgctcggagcgccgctaccg

SEQ ID NO: 42585 - DNA, 2300 bp, Homo sapien
aggacaggctctgtcagaagccgccaaggcctcggggcagggctgctcctttcacctccaggtcagagcagggctgagagccggagggtggagggggtggcacttcgagtcttatctccttgtctgtaaaatgggcatactcattcccctaggggctgcagggatggtcaggttctttggacactaccctctcaatgtggtcagtgatcatggtggacagagtgtaattctgcttcctccgagctaggaggtgagcttgcctcccggcaccctctcctcttcccctccttcacactcccatctggcttggactgtggtctgggctggcacttcttaagctggtgcccaggagggtgaggggcccccagcccacagtcctgcttggatgtggggtctgggtgtgggaggaggaggctgttttcttggagcacactcctccccagaccccactctccagttactgccccataactggccatccagagcccagggtgctgggatgggttttctatgcagggggctttggccctggatggggtaggggtggggaagtgctggataggctttgggaccccagcttgtgcttgggttgagggttggcttgtgaggcccctaaaaaatccccgctggttccatggagggggccaggctcctggcgtcttccctggcctcaggcgggcccggcaactagtggctgctcctttcccccagctttccacactcgtacccgcgtttgtttttctttctttctttccatttttttctcttcctgtcttagctgcgtgttttcccagaattcttatgggaacggggtattttcctgcctcctcccccttccccttgtctgtcaggtttcctgttttacaaacttgctttgaatccaggcccggggctggtgggaagcagagcctcagaggtccctgcagcttccaaggcccttggtcactctgagccccctcccactcaccttccttatgcctggccctgggatggtgggtaggtgaatgagtgcaggtgcctagtcttgcagggacaaccctcaaaggaaggagacagaagtctcctgacaaggcttgtgcccttgaccttttccaagcttgctgagctggcctttgtctcaactcacttgggacacccttccctgtgcctcaccagggcccaccccaagtcccagtttctctagggggtctctcgggaccccttgaatcccttttctgatttgtgctgcctttagcagccggaatgggctggcagaccaccctacatcctcctgtgtgtgggacactgccaggctgtcctccctgcattagcctctgctgagttcctaccatgtgccaagcatggcgtccatagtcggagcataaaggactgagaatggcccagtcctcctgcttttctttagtgcccgctgtgccctgcttcactctggagaggtttgtgtaccctcgtgctcctctgggaaccagagaccaaggctgcatgcctctgtatgtccacagagcctggcatgctgtaggagctcaataattgtgtgccagtttgaaaagagcatccagatggcaaggccctctcatggacttctgaaagtaggagttgtggacctgtcaagcacatgggcctcagcaggcacatgagtcagtggctagttcaggttcagccaggaagcctatctgtgaccttacctgggagtcctcatgggatgccttggggccctggccacagattggcccccagaacctcagctctcttcctctgacccttggcctgagatggagtgagtgtgtcccagtgtttcctcccctgtgctctgggagggcagtgaccaggctggccttgactttgggcccttagcacagggcccgccccaggctaacgctctgtgaacctctgtgagaaaggaagaagggagccaggaaaacagtggatcaaaggtgaggctgagtcatgcagtgctggtgggcccttggatcaagggctggggctgctggggctcaggatggcaaagtttgcttttccaagaccttgtccatcccaggccctccccacatcagcctgggtttacttgctgagctttgggccttcctgcttggcccacaacccagtgctcaagttgtctgggctgagatagggacactgaggggctggctagctcctttgtgcctccagttcccttggagaggagggtggctcttggcaggggtgggctgtgggcttcctgaccttggggtagaggcaagagcctccagcttctggcagtgaccgggcagggctgtgtcctagatcaccatcccgaggggaaa

SEQ ID NO: 42586 - DNA, 2300 bp, Homo sapien
accaaagtccaaagatgctcaagtccttgacacaaaatggggtagtatttaatataacctatacacatccttccatgtactttaaatcatctttagattacttataatatctaatacaatgtaagttctgtataaatagttgttaaactgtattgtttagggaataatggcaggaaaagaaatctgtacatatgtagtacagatgaattttttttttttttttttttgagacaaggtctgccctgtcgcccaggctggagtgcagtggcacaatcattgcttactgtagcctcaagctcctgggcttcagcaatcctcccaccttatcctcccaagtagctgggactacaagcgcacaccaccacacccaattaatttttttttaaaacttttggtagagactgggtctcactgtgtttcccaggcttgtctggaactcctgggcgcaaatgatcctcctgccttggcctcccaaaatgctggtttacagatgggagccactgtgaccagcctaaaatattttttcaaatattttccatcctctgttggtggactccatggttgtagaaaccatggatagggagggctgtatattatttctttaattgtttatttgtataaataacaaatattattgtctttgcccctaacctgagagcatgggcttagtctgtctcatttacctctttatttccaatgcctaggactgtctctgacacagagcaggtgctcaataaatagttattttattttgtttttttttcgaggctgagtcttgctttgtcacccaggctgagtctggctttgtcacccaggctggggtacagtggtgcgatcctggctcactgcaacctctgcctgccaggttcaagtgattctcctgcctcggcctcctgagcagctgggattacaggcacatgccaccacgctggctaatttttgtatttttagtagagatggggtttcagcatgttggccaggctgttctcgaacacctgacctcatgatccacccgcctcggcctcccaaagtgctgggattataggcataagccactgcgcccagtcaataaatagttattaaacaaatgaattactgaatagtaatactagtgactgtttgttgaggcctgattgttgtcctccttgcttgccctcctagtagctctgaaagccaggtgatgccattatatccccatttcacaggcagcttggtactttcctgaggttgacagctgggaagtggcacagctgggattcaaaccaggcctgtccaactgcaaaatgagaaagggctggatagaaacactgtcttttttttttctgttccaagggatcagctgatgctcttagctccctggctgagttcatctaatcgcagccctttggggttataatcaaattctagtggaggcagacagagcttgtactcccctgatgagagtacccggttgtgggtggcaaccctgggcatgtaccaccatccctaccccgcccctagcacactctgctttaggggtggctctctgggtccttgaagctccctggtgcttgtgccaaagctgacctggatttgaccttatcccagaagtccttcctggcaaccagagcttaccaaggccattgcttgctaagcactatatgaggcctagatgaaaaaggcctttctaggaggggtttgtagtttagttggggagacgagactgtagtacttaacaaggttgaatagcgaagcgggacctaaatgtcagcagtgcctgggatgttgctgccctcgagtgagctgaacagtcacagattagaccaagatcatgtgctgggcagtggggctgcagagggccacatgactctgcccgtcaaagactttccaaaggaccctgagttgctgtttgggttctgttggtatgcccgtccaaccacccgttcagccttggccttgggatcagagaagagcgctgtgaggaagatgggttctgtgagccaggggaggtggggagggttcctggctccacagagaatcagcctgaggccctggccctctgggcttcccacgtgctccctcagctgctgctttgtgctgcctgcccctgggggtgacctcatcggctctgtcctgctctccacaggcctctgctgtgttgggagccactgccttcctcccctcccccaacctgtgggcccacagctcgccagctggcccttgaacccacttccctgcgcctctggctgcctcaatgtcactggggattagtgtgcatttgcggcttttggcggacactcccctcctggctgcagcctcac

SEQ ID NO: 42587 - DNA, 2300 bp, Homo sapien
gccctgttgatttgtgtctggagctatgggaggcagagggcagtggctgccccagggctcctccagccatgggatgctctcctatcctggcctggcaggctctgggccttggggcactgagctgctctaccctttcctcaccatgctatggtccagagcattgatgaatgtattctggactcgttctggactcagcacactgggttggcagagctgctttgcccatcacagcatagggcgtaattttggagtcattagtctcactccatggctaatgtctgcctccctcactggactgtcagctttgtgaatgcagggccctgcctattggttctctgccaatccccagggcctaacacagagcctggcacagagtctatgctctgtaactgtttgttgattgaaagaaggtgacaactcagctgaagctcgagggcacctctgacgtgaaggaatcctatattcaggctccccaccctaagaaatcttatcccacacaccagaaattccatcctagaaaccagccagcctcattggtgattgtttagctccatcagaattggccatctcttgagactcacctccttagcttcccaggccaagggtgaatcctgcttttcaggagccagcaggatgacagccttccagtctagaaggttcctaggccctgcaaggactgccttggttctgcccccagggacaagatgaaacactggttggagtttgtaagtgaccaactcagaggagggctattctgagtcgacccgataaagaatgttttcttgtagcagtgtgcatgtatatgcttgtgtatgtgagagagtcaggaatacagagtcagagatagacaggggcagggatacaggcagaaacatcccgagaccctggggggtctctaccatagggagagaaagagacagagacaccgtgcttcagcctaggtggccaaggtgggtggggtgggcatgggaaaatagaggctccttctgtccattttttctgtgccatcatcccaggatgcctgctgctctggtgggagccagccacaagttgggcattcccaacttgggcctcagggacagcccagggtgcatttgtcaacatcatgacaaactgcagcaccagagaacagctctgtgctggcacagcagcatcttgcagttgtctggctgtatggtggttaagagcgggcatggtgagtaggagcaactagttttcagtcctggctatacagacaactggctatgtgactgtgggcaacttcctttgccattctgtactttggactcttcatctgtaactggggtaatcatagtcctcccctcctcacaagctgctggtgaggattcagtgaattaatgcaggcagagctctgggaacagggcctggcacggagttcatgctcaagaaagggtagccaagagccagctcagagaatcctctattcatcccacaggtgggcaggttaaggttagcagcctccttttacagatgaagaaaccgaggctcagagaggggaaggaacttgctcagtgacacccaattaaccagtgctggagctggaactggagctggggaccctctcctcccagtccagggcttgttccactgcccccgcagttcctccttggggatgtctctgtcattcagggctgtaactctcattatagccaatattactgtaacaggatgttacagtccaaactgccctcccagctggctgtctccgggggaggaagccccaggttctctttccacataggattctgcagagtttagcattcaaagattcagctgtgtgctgggaagggactgaagctgccaccccccaccctgggggcagtcgcattctggaagtcagcgtgtgctggctgcaggagcctgggttcagttgcagcctcccactgggacaggaacagcgtcggggtgggggtgtgacagggaagcctcggtgcctcggtgattggcttggtcttgcagggagcggctgccagcaggccggctggaggcggctttgcgctgccccagcctgggagccctcaggatgtgtgtggggtggagcctgctagggatcccagtgccagggggtgccgttgtgagggatggacgcctctcccccggagcagcactttggggccagcttgggccctggggatgagccacaggggacccacagcctatgcgtgtgagcatgtaacccgggagccagctgggcccctcgcggggtgggcagaaggacgggctggcccaggaccctcttctttgagacatcccggactccatctcggatgaaagtgctt

SEQ ID NO: 42588 - DNA, 2300 bp, Homo sapien
ctgagctggtggcggaggaaggactgggggtgtcagcctctgggtggtcaagaggccagacctggaggagctgggctgacgctgagccaggagagctaagtgttagctgagccatcaaggttcctggaagctagcattgagtcagggacctgaggctagggatccagagcatgccaagcttgaaggaacagcccatcttgaaagcctgggggtccaaggcagggcaggaattctaacagcctctccctttctcaaaggactttacagttcacagagtgccttcctgccctttctcacttggtccccttaggtctctggcacaggaagcagcaggcatcctcacccactttcatggcagagaaaaccaagcttggagtggggtagcttgggatcacacagctagcaaatgatggagtgaagattccagtccaggtcttctggctgcatgtccagtgctctgtcagtaaaatcctggctgttaagggccaccctgagacagaggcaaaccccagtttacacccccccagtgcaggaagtggttttcgagggcagatgcagagcccggcatccgtggtggctgtgatgaatcatcggagtgagagctgcaggttgtccctgggtcagcaaacctggctgctcagtgagtagctgtgtgatgttggacaagtcactttcagcagcccaccactaccctcaacccaacatccggtgggcatctggggcccaggagccaaagctggtatgagtgtgaactctgggtgtcatagctgccatccctccttagcctattctgagctctggattggatttgggagaggatttgattaggtcctaaacagtgactccatttagagggcctggttcatttcctgtgtgcttacagcagatgagacatgggcagaattaacctggtccagccaagccaaagaagtgatggatgggaaagacacagacccccaccttgggagggtggggcagtggcttccagcactctagacccaaggccctgggtgagcaagctggtcttcctggggcgccctggctggattcttgttacttcagctgttgcaacagctgtctcactgggtccccagctgcctgtacttcctctatcagagcagtccccatgctccttcaaactagttgtctaacctctgttttttctacttaactgagggcagagattgtgtctgacttgttccctgccgtcctcctagtacctacctcagtgcttggagaatgcatgaatgtatgcgtgccccagtcctccctgccatccacacatcctgcccacattccccagagcagctttgacacagcacagctctgcctgtggcatttcgttgctcacagggcaaatcccatgcccaccatgtgttctgcaacctccccctcatctttgcctcccctcctgccctaattttctcctacacttgccaccctcccacccctgggtttctcgggtttcctataattgctccggagctcccgtcaaaccacttcccaccccagctctcccaagaacaggggccttaccaaacctgcacgcagtccctgttcatacagacctgcctgggagcacagaaagaaccatgagctctgggccctgttcgccagcatctgctgatgtgggatgcacccaggtgcggggcctcaggcagcactccaggctgttcctcctccttctacagccctctgaggtccccaaacacttgtgtgtaaggctccaaggaaacagggagagaccctgggcaggagatatgagttctaatcctgcatcagcctctcattcttaggtaattcctttaccctctgggaccccaggtttcttatctctaaaataagaccactgatagctcccattgtatcaaaagcttttccagggccaggcactgtgaggagactcaaatagtcctgtgagtccagtatgatatcactgggctcaattccagatgaggaaacggaggctctgaggtgttgagaggcttggccagagttgcacagctaaaaagtggccccattgggatcaaaatcagcctggctcgggtatctgagcacataaccactgggccctctgagaacccttccatcttggttagtttctcggctgatctctctgggtaggtgccctctgggggcagtacccctgcctgagtggcacttcccctcctggctttgtttggtttggcctcgatttagaacagggttggcagaggcaggctgacttgcatttctggttttgggtttgttgctgcactttccccaaggggtgggcgggctctgactgacagtcaccactg

SEQ ID NO: 42589 - DNA, 2300 bp, Homo sapien
aggcattgccaggagggggcgctgctggcccagctgccgaatcccgcactcgccaagcctttctggccacactcaggccttcttatactatagggtgtttgttagaggtgtcaatgaaaaagatgtgtgtgtgggttctcaggtcttcttctacccccaggcctaagaccctggagactcgggggaggtatagggaggaggcagtggggtgcatgcacagtgacacctccagaggaagcccctccccaccaggtcctgtagcacccaccactaggcaggaattgggctatagggaggagcctcctgcaaccctcttctctggccttgaccgtgggtggggtccactaccctagaaagccttcctcaccccagctgccttgacctctccagctttctgcagcaactgttggcttctcttactccacagccaattgcattttcttagcaaggtgaaatgcataaaccaaaacagtcccttgcaccaaccatcttcacttaaccttttgtaggatgagagaggatccagggggtgccaggactgttgaatgtggtgctggaagtgggaggtgtagggaagcagtgtgtggcgcagagggcaggcatcccgggtgctggagcagccctgtctagcctcctttcaatgtaggtgctgccttttgaattgcctgaagcccacactttttttttttggagacagagtctccttctgtcacccaggctggagtgcgatcttggcttgctgcaacctccgcctcccaagttcaagcagttcttgtccctcagcctcccaagtagctgcgattacaggtgtgtgccatcacacccagcaaattttttttgtacttttagtagagatgggggttttgccatgttggccaggctgttctcaaactcctggcctcaagtgatcttcccgcctcggcctcccaaagtgctgggattacagacatgagccaccatgcctggcctctgaaggtcatactcttaaaagcttagacgaagagtcttagaacatctacggtaataataagaataaccattaatgtttattatgccccgcactgttctgtgtgtatttcatatgtaatctaatttaatctttaccactacttttattttccgttctgttctttcttattgaccttacccttattttacacgtgaataaactactgtgcaaagaggctaagttacatggcaagaaagtggtggggttgggacctggagacctggcctgctggcttctgtttgaggaaacagcttgacagagaaaaaaccttgataggaaacttgagagatcaggaaacgtgtcaaagggcacacagctggtaactgctggagctgggatttgaacccaagactagctccagagcctgggatcagcctcccctgcaggactctccttcattagacagggtgtctaggtcttagtgccattttaagcttgaatagcatcagaagtataaatgcttcaaacttaccaaacccccttgaaagtttaattattaaatttcttttgcacgtctttagttatgtgatttttgaataatcaatttttcattttcatttttggtttgagtcagcattttccatctttgggaggatggagaccaaaacttaaagtgaaacatttattattcgaaaatcacaaaaccatgcacacaacattaaataattaaactttaaaatggtgtttttgtaagtttataggacttgtacttctgaagttattcaggcttaaaactactaagatgttggggtcctgctgtatattcatgactggatgtcgccaatgcaggtgactgaggctgagaggccggctggcaggagccattctctgggaggtgccctgtacagggggtctagggaaaagaggggcgaacatgagcaagaggcatttaactcctttcttgccagcagtttcacccagtgctgaattctgctgcctccttggggaccggcaaggctaaaaatggttcttggctaaaaatagccagtcctgccaccccggtggtgggcagtgcctcccctggctccctccttccctttcagcaatttgctgacttgtcccccaccccccaccactgtctccctgctgccatggtaacgaggaggccagtcacaaatagctgggactggcttcctgccggggcggccccagaggctgtcccttgcagacacatgcccctttcacggctccctctcagggttggccagaaggaatttttttttccgctccccctcctggtccctcccatttcctggctcctcctgtctgagtcccagccccggcttgtgcc

SEQ ID NO: 42590 - DNA, 2300 bp, Homo sapien
ctgctacagctgccaagggtggttggggacccctgaaaaattagaaggggccccgcaaggtcagaccagctaaaagtccttacgtggtaagcatatgtacattgcaggcctgctgcttcctggaccaactcttccatggccctgggtgtcacccagtgtttctggagcctctgagtggtgcccgctgcctggcagcagcccctggaggtaggcacttcctggcatcatggcagatctggcatcctcttgccctgggcttctcgcagtcttgcaacccacgttccccagccagcacggaattcccctttctctgcctctgagtgcacccctcctttctgccttgcttgctttcctgtcttaccttgcttttggtcctgataccctctctaccttcctctgtagtatctctgagacccacagcaacctgatgtcccagagaaataatactaataacaataacaacatcaccgacgatgttttcagtacattgtataagcgctgtcggtgccagcagctgtgcgaaatgctttgcactcactatctcctttaatcctcacaataagcctaagaagtagctaattatgcagattcctgacaaaaaacacatggcccagttgaaggatgcaattctgtgggtgtcattgtgtgttggaattccctggggcgtatcagatactcctgctgcctgtatcctactcccaggggttgtggtttaatggctctggggagtggcctgggattgggaatttttaagagatcccagaacattctaatatgcacacaggtttgggaaccaccagttttcctgaagagagtttaatgaagggactttaaaaaagttttattgaggtataattggcacacaataaactgcacatattcaaaacatacaatttgatgataagtttttaaaaaccatcttaaccattttaagtgtatcattccacagtatatttttaagtatattcatatataagtatattcatattgtttgaggatctccagacctttttcatcctgtaaaaccaagaccgtacccattaaacaactccccgtttcccctcccccagcccctggcaaccaccattctactttctgtctctgtgactttgatgactccaggtacctcgtagaagaggaatcacacaggccgggcacagtgaccacacccataatcccagcactttgggaggccgaggtaggtggatcacctgaggtcaggagttcgagaccagcctggccaacatggcgaaaccccatctctactaaaaagacaaaaaaaaatttagctggacatagtggcgcacgtctataatcccagctactcgggtggctgaggcatagaatcgcttgacctaggaggcggaggttgcagtgagctgagatcatgccactgcactccagcctgggtaatagagcaagactccatctcaaaaaacaaacaaaaaaaaaaggaagtggaattacacgaatgtctttttgtgactgactgatttcactagcataaggtccttgaggttcatccttgtcgcatatggcaggatttcctccctttttaaggctgaacaatattccgttgtatgtatgtaccacattttctttatccattcatctgtccatgagcattgaggtgacttccatctcttggctattgtgaataatgctgctatgaacacggggttccaggcatctctttgagaccttgctgttaattattttgaatatatatgcccagaattgggattgctgggtcatgtggtaattctatttttagttttttgaggaaccactctactgttttctatatcagccacaccattctacaatcccacccacagcgcacaagggttccaatttccccacatcctcgccaacacttgctattttgtttcttggatagtagccatcctcatgggtgtgaagtactagctcattatgaacttgatttgcatttctctaatgatgaatggtgctgagcatcttttcatgtgcttgtcggctgtttgtaaatcatctttggagaaataatgaaaggacctggtaggggatgatgatgcaccagagactagtgaaagcagcacgttgtaaccacctctagctctgtgggccagaggagagcactgggtaccagaatcacagatcaggagctgtggaaggcgctgcccgacaggatgggggaccctgggagagggatgcagccacatccaaactgtggcccagaagagggagtgggaaaagtcctcgacctctctgtcttcctgctgtcttccaatatcctacctgggtgaggtcagcctcct

SEQ ID NO: 42591 - DNA, 2300 bp, Homo sapien
tcaccttggtgcctgctgcacaccagcctgggcagaggctgccaaacctctggcagggacatacttaccaggttggtggggagaaaaatggccactttcaatttcaatttttaaggaatctccaacttttaggggtctgggaggaagtggttagaagactcctcttttttttttttttttgagacggagtcccactctgtcacccaggctggagtgcaatggcgtggtctcggctcactgcaacctccgcctcccgggttcaagcaattctcctgcctcagcctcctgagtacctgggactactggctggtgtgtgccaccacacctggctaatttttgtatatttagtggagaaggggttcactatgttggccaggctggtctccaattcctgacctcgtgatctacccgccttggcctcccaaaaggattatttgcgtgagccaccactcccggccagaagactccttttaacgtcttgtgttatgagtgtttgttaaggggggcaagagttgtgtttcttaatttcatgtctcccatatagggctaaactcccaatttaacttattagggaaaggaggtgtcttctacacagtgcctccgtttcctaaaattttaaaaataacttttttgaggattgtagggaaaacatttctgtaacctttcctgtctcatattgctccagttctttaaacattacaaaaaagaacatttgatttttgaaggtgggggcagagagaagatacctggttactcttaatttccaatgcttttatttttgaaaagtacccttgcagttttcttttggggaggggcaaagaaggatttctgttcaccttgcatctcatagaagagcaattcttaacatttttattccaaaaatcaaccagttgtgggagatgtaggatggatccagtaatccctccttgtctctataatagggcaggtccttcatactttcaatttttaaaaaatcggattttttaggagaatagggaagagaatagaaaaaaaaatcccttttaaactttcccaagtcacaaggaggcagttgctcaagttaaaaaaaaaaaaacaacaataacaacaacaaaaaaactggctattttggggtgttggaaagaaatatcctggttcacgttttatttcacatgcaagtttctcaaattttccttctctaaatcaacctaactgggggatatgggggtggggggcgctaatatcccttaacctttaacccctcttgtcttactgtaggaccagtttttcaaacttttatttagaaatacatatatatattttaatttggcaaggataggcagaaacagccgcttcactggcatttcacataaaagcggctcctcaagtatttattttaaaaatcagtctggctggggggctagagtccccttaaccactcttgtcggacatggggccagtccttcaaacttttattttattacattagtttttttgggaggagtggcagggcaatagaatattcccaataagccttccagtcttccagcaagccagctcttgaaaacttttatttcaaaaatcaatctggtttttttttggcgggggggtacagcggggtacagagttcccattaacctcttgcgttccgccgagagccggctccctgaactttttttccagcgtgaaaatgacatttccgaggggctgggggactgggggagggcagaagggagccggggagcgggcgcggggggcgcggggagggcagggcgcggcgcgggaaagtttgggggggcgggtgtgccgcggcactggggctggcggacgggagggcgggcgcgcccctggaccggccggctttgtgtgccacgcggaggccggcagcgcggaggccgaggccgaggccccgagctcgcgggccgcacggcgaggccggcccgggggcgggcagggcggcggggggcggcggcggccccgcgaggggcggctcggcggcagcggctgccgcggcgcggccggtgcgggccgggggtgggggcgagggccggcgccccccccgcgcgcccccagcgcccccgcccccccggcctgagcggggcgggcggaggagggagcggcggcggcggcggcggcggcggcggcggcattgtgcgcgcaccagcagcccggcccgggaggagcaggacgcgccggggccgcctcctcccgcacggacccatgaaccagccgggcggcgcggcggctccgcaggtacgacggggggccgggggcatgcaccgcgcgggggaccccggggggccggggcccggggcgctgcg

SEQ ID NO: 42592 - DNA, 2300 bp, Homo sapien
ttgggtgtcccggggcagccgccttagaaacacacctatctatctccccaaatcaggaaaggagacttaaagagtataaagctgacattttgctttttaatataagagaggagaaaaagacatttttcagagaagtatagatactgtctccactccctaataatttctctccctaacattttagcaatttttaccttgtttgggggttcattttgtttcttcagatttgatttagactctgctaggaggcactgaatgtctataacttatgttttggagttttgtttttttacttgccccttttgttcctcaagtcacactgtaaactagctcatctctgtggtgtactcagtatcctacagtctttcttggccttccctgtacagttcagttttcacatattcgaacggccaagaccaggttcttggctgtgctatttggagaccaggcgttggggaggattcacgggttccacagctgcggggtttggtggccgtaggggaagcagtggtttgggagttctgaatgtaagcgccagagctgccctcctggtccgctgtgcgtggtacccagtgtgcatcacactactcaccccctcccggaccctggcagtccacagcgactccgaagtcagcccatagtcacatccaccacacctcagacctgccacagcctctcctcacttcccaggaccctgaggcttccaggagctctgctgcccacagccctcggggtcctcactcacacctccgacttccaggacggcagtgagcatggtgccttgtggccccaacagttgatgttccgagggtgggatggtgtttggccatgttcgactcgatgctgtgaaagatgtcttcaggcttttctctcctgttcccccagctgtgagcaaattaggttctacacacacagttcggatgccaagggtgacaccccattcccttcacaagaggcggttctgtcacaaatcagcactccacccccaccacacctctcagtgaatgaagtgctggtggtctcactcccctggtgacccttagccgtgggatggggtggttacactaaggcttcaagctgagaatggccatcatggcgggaggctgtttgcaaaggcaccttctgtcatcctggggttggctaagtcaactccaccccttcccaataataaagcatcactcaactgtgagatacctcgactacaaaaagcactgtaccacagccctctccccctgggtccatgacaggagcagggagtaaagttgattgcaaacctcatgaaggcttaggatcatggacctggaacatagtgtttgggggccaagcctgcacactttgcctcatgagaactcacccagctctccccttgaaacttggacacactgaaatggatcaaagtgggccatttccacatttgctccagcaaactgtggtctcaggaactaccatgccatttcctctcctggagaagttctaggtattacctccacaacatttccaactgggggactgagcccacttatcagagaagagccgccatccacactggagcaggaacagggagaaatccagacaggaacctcatgtcacttcctagggaatatgggaagaaacatcagcagactttatgatgtcagttgggcctttggaggcattctggaaggtggcctcagcatcactgatgattgacagatgctacagcaaaaggtccctctagcgttgcttgactgctggggaagggacagtgaccggcactttgacccacacaaggataggagctgcctactttgtgtggtaggtgagagcagagcctgggagcccatcctccctctacttggagcaaagttgtgctggtgatgccccattattgggccagttgattagaaaataggcatttcactttcttggaaagccatcggactaagcccagatgtgcatttagagcactcagcattcttctctttgaagcatgggatgtctgtcctccaggaagagatttgatcttaggttgttacctccctttcacttcttttccacctcaattcaatacttaggggttggcttgcctctgcaggtttgatgtgaatgccactgggtactcagaaagctgtcctctggggctgccttgtccagttagataacaagatagcagatgattgtttcttgcaacctctggttccctccggaaactggtgtcaccaacaggaaaggctgtaccaaggtgccctcttctcagacaggctgttctcagagtgcaaatcctgctgcaactaacagcttaataaaacccaaagatctca

SEQ ID NO: 42593 - DNA, 2300 bp, Homo sapien
ggctaccacctcctcattaccatcattaactaaaacatcaaagattgagaaactttgtgaacacaaggaacacgaagataactgtcccagaaagctaaaccaagacagtaactgtgcttaaacttacatcatggctttgagcttcctagcagccaaagcaagaagggaatataatcactggccaaggttagggtgacggagcaaaggaaacacatttatgaatagaagcacacttgttctggataccagtgaaagagggatgtactgactgaatcttacagaagggacatgatacaccatttgtttctgcactgactacatgggggaatcctttgattctcacataagcaggggtcttaatcttgggactgcctgcccgaaggggtcattcccagctctaacagagaggtggctgagagtatggaatgttccatgccaagagcagggaggaagtaaggacagtagatttaaccactggagaagggaaattcatagagaggcctttggtattgctggcaagagtgtgagctcacagacaacggacctgggttttaaaaaattctcatttaaaatcttaaatttaggctgagcgcagtggcttacgcctgtaatcccagcactttgggaggctgaggtgagaggatcacctgaggtcaggagttagagaccagtctggccaatatggtgaaacgctgtctctactaaaaatacaaaaattagccaggcatggtggtgggcacctgtaatctcagctactcgggaggctgaggcacaagaatcacttcagcccagaatgtggaggttgcagtgagccgagatcgcaccactgcactccagcctgggcgacaagagtgaaactccgtctcaaaataataaataaataaataaaaccttaagtttaataactactgtattagtttcctagggctgctaggaaatgtgtcttctctcagcactggaggtcagacacctgagaccaaattttcagcagagccatgttccctttgaagattctggggaaaagtccttccttgccttttgctagcttttggtggctgccatcaatccttggtgatttttgacgtgtcactgcatccctcccatctctgccttcggcgtcacgccacatcttccccgtgcttctctctgtgtccctgtgtctgagtctccctcaccattctcttataaagataccggtcattggatttaaaacccctgtcatccagttcaacctcatctaactaatcacatctgcaaatcaggttcattctgcggttcggggtgcacatggattctggagggggcactgttcaacccaccacaaacactcagctcttactctatgctgggtactgtcctagcgcattgcaggtgctcactcaacaatgctaggagctaggaactattattatccccatttacagatgaggaaaccaaggcactgaaaggtaaagtgacttgcccaaggtcacacagcagtgagtgccactgtaggctgcctggctcccacgtccatggtctctaccacgcctttcccagctactccactcccggctgagggattctgggcaagtcacttcacttcttggagactcaactcctctgcctgtaaaggggacaaatagcacctacttcgtaagcttgttgtggggatttactggacacctgtggcacgtgtaaagtgcctggtacacagccagcacatagcaggtgctcagtgaacggaagctcgtaacagtcatcattgttaatgtctctattatttgcaaaggctagggcaagcctgggggctggagaaggaactctggagacaggatacctgggttctggtcttggctctgcccatagacttccctgaggtctctggcaagtcacttcctctccttgggcctcagttttttcctgtgagaaatgggcccaatcaggcttgacctgctggctcacagagctgtgaggtccagatggcatgactcagcagaaaggccaggtcgctccccatcctcgcatgccctctgtgggggacttttggggggcggagcccaatcctggtgctccagggccctattgtgcttggccaatgcctcttctgaagcagccatcccggcctcttggtactgctgaccccagccaggctacagggatcgattggagctgtccttggggctgtaattggccccagctgagcagggcaaacactgaggtcaactacaagccacaggccccttccccagcctcagttcacagctgccctgttgcagggaggcggtggcccttctgttgctagaccgagcctgtgggat

SEQ ID NO: 42594 - DNA, 2300 bp, Homo sapien
ggcaggagaatcacttggatccagaaggtggaggttgcagtgagccaggatcgcaacattgcattccagcctgggtgataagagagaaactgcatctccaaaacaaaacaaaacaaaacaaaaaaaacaaaaatcccttcagcgtggctcatctcagtccagcctgaggagggccagcaatctgactaaaccaatgcacactaagatgctagtgattgatagtctttaacactttcaacagcttttaaaggagcaccttgttcatttactgggtttactcctgacaaaagcaacttgccatagcaagcagcatcaggatgtacagctcatagttctgggtttaaactctcagttctgccatttgttgttttctccttagataactttccctgcctttcgctgtttagttcagttttttttcctctgaaaaacagggatagtaatttttgtcttatccacctcaaggactcaaaaaatagattaaggaacttcagagttgaaagggaacttagagatcatctaggaatttttatttttgtttttaggtaattatttacaactttcactttcaatgacacatctcattgaaatctcagaacaactatgtcaaataggagagaagtcattaatctctttttacaggaaggaaacaagagaagccaagactgtggcaagttagtggcagagctgggggcagtggttattagttctacagaactttccctgtggcccctgctagagggtcctataaccaaaaggtcaaatggctctttcttatacatctccattgcctggggagctcactgccatccaagacagcccattctccagcagggtggctttgatagttggctgtaatttgtggtggtatagaatgtgtcacattgagaaaaagtgatttttagggctttcaccctaatgtgtgtttgggggccggagagtttgcagaaatattcagagaacatacaaagacagccagaatgacaataataataacaatgccaacctgatggtgtcacatccctgtttataacccttcaatggcttcctggttccctgaagagtgagtccagactccttgatgtgcccaccataagctagatccagcctcaaactacctctccatgccacactcatctccccaccccaccctggccatcctgactcctgtttgctttgcctggaataccctcacctcctccccacccccactggctcctacaggcctctgtactccccctaaaggccctacacgctgctgggttgtacttatccatctccccagacacactgtgagctgggaagggtcaggggctgcatggggttcctctgccctggtgcccagcatggagactggtacagaataagtgattgccccatccctgcacattcacagacatctctgctgttctcataagccagaccaggagagggttaaacaatcatgctggcctaggattaactttggcattagagaggcaggtgccccagtgttttaccagatgcttggaaacctgttctcaggtcagctcagagattcaatccagccaggtcgtccctagagctgactgagacctgtgccactccttgggccctgagctgagctgctgggggtgggagtggggggtatgtggagagggtgggaaaagcttggtcctgtgcaggctagctctgtggccttggttgagtccttcctatctgcttaggtatccccaactgggcacaaaggaggccggtctgggtggtcccacgggttcctcttgtgaggactggccaagagcaagggatcctcagactccagaaccccctagctaggggtcccctagcttgggagagactttctccaccgcaggggtgaggaagggtaaatctttaacgagctagccctgggcagctggagtctttccggatggatggctgcctgggatgggggatggggtgggaatgcaagatgtgtgtagacagtcccagtgttgtggagaagggagggtattggtggggggtaaataaaggagacgcgggcggagctaactccgtgtgcagagcaggacatggaagaacgcgggtcacccgacgggtaagcagatcttcagacaggttcgaggagtcctgaacagccgctaggtgcaggtatgataagtcgcattgctgcccacagggatctcgcgcggagcctggagcaagggccagaggggccggaaacgcccatccaggtggtgctcaggtgggtataaattggctaggaggcacctgggcgagacaaggatcgaggaagacatcaggatgtaccatctgccctt

SEQ ID NO: 42595 - DNA, 2300 bp, Homo sapien
tcaaaataatattttaattttttacttttaaaatatttttaaaagtatcaaaattaatgcaaaaccccacaatgaacaaaatatctaaaatgtaaataaagacagggtctgcatggtaccaagtatgcaactaaaaaaacatcagttatgattgaagagggagttctcaaccttagggggccgtggacttctgaaaaccggaggaaagcccacggcccctctcccctgaagaatgcacaaacatgctcaatttgtgcacagtttgggggtgttcctgcactccctggggttcgtgcacatggaagttaagaactctggttcaacattgggggtgcgggggtggcgggggtggttccacgcgccggccagcagcctgccagttccccagtcccgcgactggcctccctcctggcagccatgggtgctctgccctctgcaggaagcagcgcacagctatgcagctcccccaacccccctacctcccctctctcggcttgggacttttcctaaagtttgttgaaaccagacaccttgctcgaccgagcccgcgtgcagccagggtttaaaaggccgccttcagcgccccctccccgcccccagcggagacttcaaaaggcccggcgggcgccgccgccccagcacctatgagccgcccccagctctcggagcccgcgccggagcccgtggacgcagagctgccgaagttcgagcgcaggcggaccgggtcggcggcgcagtcccgcgcgcccatgcccctcccggtgccgctgcgctccgcgcgcccgcgccccgtttagggaaggggacctcgccccccgcccccgcgcccacggctgcggggacccatgaatacaaatgccgttaggcgccggaggaaggaccgaccggccagcctcgcacgtagggacccagtaagtgcttgggggctcctggagcggtgcgaagtgttatatgcctgtgtgtgcgcgcgcctaaaggtgtgcgcgtatggggaggtgggtacacgcgtgaggagtgaatgcgtgtgtgcacatgtgcggtgggcactctcggagaactgtgtgcaagtgagggtgtgcgcgcgtgtgtccacccggggtgtgtacatgtgtgggggcgatatggccaggatagcgtgcatttgtgcctgtgtaagcatccgtgtgcatgcttctgcgagtgtagagtatcagcgtgcgcctgagcccagatatctgaggatgcgtttcgtgtgaacctaggaagggtgcgtggctgtcccagaatgggaccgtgtgtgagcgtgtgtctgagtttggggaaagggtggatacgtgtgggagtgtgtgtgtgcaccggtgaataagtgtaactttgctcgtgaacgagtggcaagaggtggtagaggcggagggagctgtggtcccagggctggactggagttttgggtgtgagaatttgcccgggggccaaggtgtgcagctcttagctcccggatgggatccgagggagtttttgtcgattctggggaggtgcgtggttagtggtggtggtggggtgcggttagattccaattgctgacagaagggagagagagggtggcaaacccttaacaagcccaccctatatgttctccagggcgctccgagtctgggagcgcaaacttttggtgggcggtggggatcacgatactggttgtcgtgggcgtctggacaccaagttctggtcctagctccgtccctgaaactgtgggtttcttccaggagtagaatttggcccttctcccctaccccaaccccccattggaggacccccagcctcaccagtcagaagttcctaatctcagaacggtgatcaaatcaccgtgaagccctgggcagccccttcctctctgtgaatctgtttccccatctatacaaggaggaggggggcgggtgtcccatcggggctgtagtgggccagctgaggctgtacccttggctccggccggcagggggcagcagggggcagcagagggcggccgggagcggggaggagggaaggtggagagccaccgcgggccgagactttaaatcgccttcatttcccccaaatccttccttttcctctcctcccccaggccggcggggaggcagcttccaccgccctccgcgcgccctcacccggccttgctctgcctccggggaccgccagcagcccgcctccaaaagtttgatcatctctctctctctttttcttgcttcttcttcctttttggtggaagcagaaaaggaccgaggcaggggcgagcgcggcgcccggactcctgggaccatgggcct

SEQ ID NO: 42596 - DNA, 2300 bp, Homo sapien
gcctattcatctactatccatttatccatccatttatccatccatccatccatccatccatccatccatctaccctttcatccacccatccatccattcatccatttatctattcattcgtccattatacatccatccatctaccaattcatctacctatccatccatccattcatccacctacccatccatccagccagccaggcattatttatccatccatccatccatccatccatccatccatccatcaatccatccaccaattcatctacctatctatccatcaattcatccatccacccatacagccagccagccatcatccatccatctatccatccatccatccatccatcccttcatctattcatccatccattcatccatccatttatccatccatccaccaattcatctacctgtccatccattcattcatccacccaccatccatccagccagtcattatccatccattcatctatctatccatccatcccttcatctattcatccatttatccatccatccgtccatccatctacctgttcacctgcccatttatccatccatttatctattcatccatccatccatttttctatccatccatccattcatttatccatccatccatctgtccatccatccatccacccatccatccatccatctattcatctattcatccatccatctatacatccatctactcatctatcctttcatgcatccatgtatccatccatcaatccatccatccatccatccatccatccacccacccacctatccatttatccattcatccatccatccattcatctatccatccatccatccatccatccatccatccatccatctcccagttgtcagctgagggccaaatgccaagtgttgcattcagcccccagcacaacctttgcagggggtgatagggagagagcattcagtactcagggcctatcttgctgagcttaggggaagggccctgaggacctgacccagactcagattccagaggcagcttttccttccctgctgagtcagagctcaggagcctgctttgccaacactggcagctcagctgactgaaggggtctaatgacctgggaggggaaaggtcaggaagcctttccataaacactctggaagccctccttttcttttgctctggcaagccctgctgacataattattgggcggatgtgacctggccagaccacagtcagatatccatacgctttgccaggggacagaggttgcagggatgctttgattgcttcctctcctctccccagagtcctgtggggagaaggaggagtcagcggaaatgccatcacccttctgatagcagatggcagccccgtagcctgctagagacacctcgggagtgggaaggggaatgggtgggtccctgaggagatggtgaaacctgtcagacccctaggacatctttaccaagctctggtgacaggtctattcttgtcatcctggtccctcacttatggggctgcttcctggaggagatggctttccaggtggagaaaaaggagtataacgtgtcattgttgggcagcctctaacactctcagcaacagcatttggttattatcattatttttagtattagttattatttgaaagggcttcttttgtaccaggcacttaaaaataaatgtattcatcatgtaattgttacatccttctgaggttgggactgttactatcccatttaatagatgggaaaactgaggcactaaagtcacaagattagtaagtgttagaggtaggatttgaactcaggaagtttggctccagagtctgttttttaaccccaacatgcaagattatgcagccagataaggggtcacaatccctgccagatagttccaacgctgccctctcagccaccaccatggggcggtgtcatttttagatgaatgaacaaaggaccaggtagctgtgggtggacggtccacattgcctgtgccccttagggggtagggggtggggtgggctggagcaggccctgactgcgtcctctccccttttccctccctctcagatgtggacatcctccagcggctgggcctcagctggacgaaggccgggagccctgcacccccgggagtcattcctttccagtcgggcttcatctttacgcagcgggcccggctccaggctcccacgggcaccgtcattcctgccgccttgggcacagagctggcactggtgctgagcctctgctcccaccgggtgaaccatgccttcctcttcgctgtccgcagcca

SEQ ID NO: 42597 - DNA, 2300 bp, Homo sapien
ccaggattccaggggcaccaacagcctgggtcagctctggttcacatctgggtcactggagaccacacccccagctcacagcatcacctcagctgagaaccttaatctgctttggcctcaatttccctacttggaaataggaattctctgttacttggctgcttgctgcctgtaatctgagaactggaaagagccatgaacttgaagcccaaatgcactgtgttagaagccctgcctcctcccagaggactgcgcggccttgggcaggtcccagtcatccctgaaccacaccccagggagtcggtgccagggctgggcccttccagctctaagctttagggtcttccctccggactcactgcatgaggccagccttggcagtcctggccaggggctgtgagtaaagctgtgcatggtggcctgccttgcagggccatcccagcaggcttgaaagtacatttggagaagacaggtagaaggactcactgcagcatcttcctagcctgctcgtagagacccttggctgggaaacatggctcagtctctcactgtgagtgatactgagccatgcccaacaagccaggacaggccaggagaaagccattcagctccagccaagttggtaacattttccacctggacccctcgccagaaaaccacaacacgttctcttagcaggaggtatgaggagggatgagagctgtggaccaagctttcctctggaggttgaagatgggagcagagagaagagggagccatgtggagagtaccttgccctggaaagcaagtgttctggattcaagtcttgactttgccaacaacttgctgtgagatcttaggcaagtgtcttgccctccctgggctatgtctgcttatctgtctgaaaaagagtttgggccaggccatcacgaaggttcctatagctctgatgtgctttgacctccactgtctcttcctcagctcccgttagtaaaagactctgacacatcacccttccaaactggatactgaggaggccgcatgcacgggcccaaggttttgcctgctggggaaagactgactacagcaaaatcatcaccagccctgccagaaatgacgccagctgcaatctggcatgaaggaattcagctcattcccctgtcacttccttttcttaataagtgcctagaaactgtctggcctaaagcttggataaggaggaaaaaccattcacgacaggagcccccaaccctaccagacagatcaaggggttgggagcaacagcaacagagggatggccctaaagactgtccagggtctttaggctgagaggcatggcagactcagaggcccagcggagacagagaccaagctgtagggactcagccgatgtgaagtcccattacgtacacattaaatcatatctgatgcagatctcgccgatttgctggccatggtggctggaacagagttgagggtattttcatggctctcaagggtattgcacaggtctagggctgaaaagatgtttccctccacccacatctgacaccccagtgccagggaacaacacgcctgtcatgaagatcagagcctagtcttagaaagttaaaggcaagaagcaaggaagcagacagaagttctcagtctggcaaggctcagagtgtctatggacaaatggctttgacagtctaagcctcagttttctcatctggaaaatggggataatcgatcttgccttaaaggttcactgggagaatcgcatgtggttcaaatactatgcacaccgagggcctcaatactcgttgcttcctttcacttgcaggggacttagggtggcaaccatgccttcttctggttattcatcgtgtttattgattgtctctacccttaaaatttgagcttcatgacaacagagatttttgtctgttttggctacagtgttatccttagtgcctggcatagagtaatatattcaacaaataatctttggttgaatgaggaatgaatgagtggccttatctcacacaggcaggataatgggacctcaaacctgggactgccttctcagccaggccatgaacagggtaactttgtgctccaagaagaacacaggtacatggcagggagaaggtggatgaaggggccgccaggaggggagatgaggaggatgcagaggatggagtagaagggggaaactgaggcatggccctgctgacattccttgctgtgtccggttggagaagaggccataacatgtccaggctttcatgggtcttacctcttccatgctcaggagactccgtaccccaagctctaaa

SEQ ID NO: 42598 - DNA, 2300 bp, Homo sapien
ccattccctgtcctggcccagggagatggtcatgtaccgtgtagttcagagaagggtggacgccctggcagagagggtagatccatcctggtggcataggttgaggagctggctcctagtccaggggcattgggtgggacacagaggtaccaggacccttgtgggggttggcattgcctctttgggcatcactggaagcatggatgcttcccaaccttgaccttgctgggactttgccccagcagaggtttgactgtccatccagcccccaagggtcatgcagcaaggaacttggaaggagcctcgcacacccctgccttatccagagggaaaaaccaagccccagggtttatgcaagggctgcagccatgcccacggtgataactcagggctgcttcccacccgcctcacgctggctaagctgtagagagaagggttagaatcacttggccctaaacacagcatccaatggcttcctcccccgtctttttgtgaatcatgaaattttcttccctctgcttgccaaagggctcctagtgtggtaaaccacacttgtggggcgggagaaggctctagaagcctctgggtagtcccaaagctcagccagcctgggcccacccccagccccctagttccagctccaagctccaagaagctacaagctgctcccacctctgcatctcttgcactgtgtgaccctgggtgttctcttgccctcttggagcctcagttacccccttgcttacaaccagggggcagctcttgctctaggagggaccaatggcgttttctttcaggggccgcctggtgcagtgggagaaccgggccttcctggggaagccgggatgaaggtgaggtgggatgaaagaagagaaaaatgacttgttgaaaccagctcccagatggtggccacatcctctccatggaagagaaatgggcctttcttgtggctgggataatgggttctctgtgctcctggctggggagtggggcctggttagggccagagtggaatgtggagcccccaccagtgccctctgcgaggtaatgttttttcgggcacctgcccctgcctctatgctggggtggctgtacctcctggcctcatgcgataccatctgcagctcggtgccagtgcccttcattacctgctgagaaacaggtgcccattgatacatggactctggggagagccccctccccattctgctgttggaagaggacgctgttcccccttggaggccccagagctgatgagtgatgctggctagcccgtggacattgttgaggcagggcccaggggagcccgcagaggggctgtgagacttgagtccagtcacccccttccatgcctaagtctccctgtcattcaaagagggagttggaccaggccgggggctgccagacttggcctagtcccaaaatcccttgctcaaacaccaatgaagaaaaccaccccacgtagaaaactgatagaagtgggattgtttccactggagcagggctgggggctcagagctctgccctcctcctgtgcccctagacaccagcagggagcatagcttgaaaattcaccaatgaagaaaccaccccacgtagaaaactgatagaagtgggattgtttccactggagcagggctgggggctcagagctctgccctcctcctgtgcccctagacaccagcagggagcatagcttgaaaattctccaatgagaaagacccttttagggcctttatgcagggggcaggtgacatttattccggctcatttagggcttcctcctcgtttgggtttctcttcaagtctctcaaggaagaataaagtcacataattgccattgctgcatccaaggctcctggaaccagactgcccaggttcggatcatgaatctgtcactgaatagtctcacgagagcttgggctccttaccgaactcccccaatgcctctgatgcttcacctctaaaataatgcctttccttgcagggctgtcttgaaagtcagatatgttaatataaaaactgatgtcctcagcctgggcaacgtagtgagaccccatctctacaaaaaatttaaaaatctgccgggcatggtggcgcatgcctgtggtcccagctacttgagaggctaaggtgggaggatcacttgagcctgggagatcaaggctgcagtgagctgtgattaccccactgcactccagtctgggcgacagaatgagaccctgtttcaaaaaacaaacaaaaaaagtccttagaacagtacagaacagtacagttagttattaataggatgatggtgt

SEQ ID NO: 42599 - DNA, 2300 bp, Homo sapien
tggaggacagcatggatgagccccttaccatctgtccggggaggtcagtggaaagagaggggaacactcaggatccagtgcggctggagaagggaagcgtttccttccatccctagaagccagtgatgccgcacaggagagcgctgacctgcaacatccttaacatgatgaaggaaagtggctccgtttatcaagcacctcctacccactctgcattggcggtagaatagaggcttatttctcgtgcacgtaaaagttaattggcttgttgatgagagaccttggctacctgccaggggctctgccctcttcctctcccacacgtggctcccaaggtcactccacaccagggggaggcaccaccggggaaagagagtgtagagaattgtgcaggagggtctctgggccaggcctctatggggctagcatcgctccacttccatcccgttggctagagcacaaataaggctgaagatgtagtctgtccaggcagaagaaatggattgggtgagcggctgctggtctctgacacacgttcacacatgcgtgcacacacacacgtgacctccgccacccccagtggaaggagggtttatttagctctgatttgtagctctggaagctgaggcttaagggagaattctggccagggtaaccctgaatggccggctgtttagcatctgtggtcccctcctgccccctagtggagatctgctccttctctgagctgaagtcctcctcccagcacttgtgcctgctggccccagtcccgtctcctggtgcctcacagagaccctggctcccaccctaggggagcccagtgggggctgtgtgacccccaagtcagctccccccagcacctccccttcctccacaggctctttgcagatagagattgggccgctgccgagtgtcccacgcaccctcgcctacctcattcacggggctctgcctgtcccatatcagagaacatggtctgaccctgagctcttttcaagcctctgagccattgtgatagcctctcctcctgcactttgtccctggcccgttttcttgtctgcaaaataaagagaaacccaacccgtgctctagccatgaccgtggaaccgagatacctcccaggttgtgagaactgggggctgtggaggcttgaaccccaggctggaccaggaccctaaggtcccaatgaccaccctctcctcgtgacagagttacagctatccagaccggctggtgctggaccagggaggagagatctttaaaaccttacactacctcagcaacctcatccagagcattaagacgcccctgggcaccaaagagaaccccgcccgggtctgcagggacctcatggactgtgagcagaagatggtggatggtgagaaggcttcctgccgggggtgggtgcgcctggcggtggggagctggggcaggtggagtatttgatttccgccgcattttggctgagtttttgtcctcagcaagacagatacactggcagtcatttattcactcagcagtcacagagcctcacaatataccaagatccgcatgctggggatgaccatttcagtgcaaagagacaagagctctggcagaaaaagctcctgaggctgtaagagtccccacccctggggcccatcctgtcacaggctcccgggtgagccaggattttccccctttctgagcatgaggactctgctctctcatctgtgagctgatgtggtgctgtgaaggacaagctgcggagccagacagacctgagttccaatgtcagttctgcctcagacttggtctgtgagctggggcaagccacggccccatcccgagctgcccttgcctcctctgcacaagcggctgggactagatggctggttgttccactcttgagctgcaaaggttttggcttcctgagaagcccagtggggaagctagatgtaagcagcagcgctggctgatggggtgggagacctgactcctaccctcccccggcaggccctaggaggagccctaggcctcgaagaatccattcaactaggtgatcccccaaacccttgtgcaagtgacccagcctctctcaatgtcagttgtcttctctgtaaaatggatacatcccagtagcaacataggcaagtacttagccatgtgacccctcctctgggggctctgccagttgtgagctctgcccagaaggtttccttccatctcggttggaggaatcccttttctgctcacccaccctgacttcatgctcacctggggctcggcaggtcacaagatgcagggtccatctacagaac

SEQ ID NO: 42600 - DNA, 2300 bp, Homo sapien
tctgggaggccgaggtgggcagattgcttaagctcaggagttcgagaccaacctgggcaacatgatgagacccccatctctacaaaagtacaaaaagttagccaggtgtggtggcacgcacctgtggtcctagctactcgggaggctgagctgggaggatctcttgagcctgggtggcagaggttgcagtgagccaagatcccaccactacactccagcctgggcgacagagtgagatgccatttcagaacaaaaacaaaaacaaaaaaagaatagagtaagtgaatgaaaagttgtgcatccattacacttttatttatttatttatttatttatttttgagacagggtctcttgctccatcatacaggctggagtgtagtggcaaaatcacagcttactgcagctttgaactcctgggctcaagcaatcttccagcctcagagtccagagtagctaggctttcaggtacatggcaccagacctggctaatttttttgtttgtttgtttgttttccttgagacggagtctcactctgtcacccaggctggagtgcagtggcgccatctcagctcactgcaagctctgcctcccaggttcacgccattctcccatctcagcctcccaagtagctgggactacaggcgcctgccaccacgcccagctaattttgtttttgtatttttagtagagatggggtttcaccatgttagccaggatggtctccatctcttgacctcatgatccgcccgcctcagcctcccaaagtgctgggattacaggcgtgagccaccgcgcctggccgacctggctaatttttaaatatttttgtgtaaagatagggtctcactatgttgcccaggctagtcttgaactccaggactcaggtgactctcccatcttgggtccattaagcttttaactacaaactacactgaaatatgaaagttattcagaatgaaatgaataagaatgcaaaattataatcataccgtaagaatactttctgagtaatcccagcactttgggaggccgagacgggtgagtcacctgaggtcgggagttccagaccagcctggccaacatggagaaaccccatctctactgaaaataacaacaacaaaaaaaattagctgggcgttgtggagggcaccagtaatcccagcgactcaggaggctgaggcaggagaatcgcttgaacccaggaggcacaggttgcagtgagccgagattgagccattgcactccagcctgggggacgggagtgaaactccgtatcaaaaaaaaaaaaaaatgaatactttctgaaagtatttattcatacaaataaagacttgacccgtgaggtaggaacacaaatgggccacggaatcactcattccacagaatataccgagtgcccttgaagtgctgggcactgctccaggattgggggcgtattggtgaaagagaagcaagctgcctgctcagatggcagggaatgggggaaaacagggagacagtttcctgtttgagatgttgggagatgcttcgagtagtatatttactggaaatagacattcaacttggatgtccctttttggaaatgtgcctgcgtccagggctgggttggggccccaatgaactttggctctgacacagctgttgccacactcagtggaactgaatctatgtttgtcttccccggcatccttcaccccaactctccccgccacaacatacatcccatgccagcctggggaccctcaaaggtggcttcatcattaggtttgtggctgggtcccactgaagtaagtcttggcactcagagggataggaattgaatgaagacatgagattcctctgcgggaggcctctctaggaaatctgtggactcacacgtttactaatgttgctgcagccccgcacccaccttggccttgggcagccatactctagggcttttgtaacctctccatgtgaggaactcaaattagacctgggtttggaggcggtgctccgagctggcctttgggggaggttttgtgcgaggcatttcccaagtgctggcaggattgtgtcacagacacagagtaaacttttgctgggctccaagtgaccgcccatagtttattataaaggtgactgcaccctgcagccaccagcactgcctggctccacgtgcctcctggtctcagtatggcgctgtcctgggttcttacagtcctgagcctcctacctctgctggaagcccagatcccattgtgtgccaacctagtaccggtgcccatcaccaacgccaccctggaccgggtgagtgc

SEQ ID NO: 42601 - DNA, 2300 bp, Homo sapien
ctcagggtgctcacctgggagacccagaagaaggagacaacacgtaagggtgaggctggtccctggaaatcagttgacatcttgcaaatgtggagccctgaggtggagccaagcccgaggcacagcccactcagtggcacaagccacgaagggccggcctcacccagacctgggggctcatgattgacagcctcttgttacgtgagggaagcagcactcctcccgtggcagaaaagttgggcctgagttgttccatctattccgtatgtgcagctgcgtacaccatacagggtgataagaccatgagcctgaggctctgacaccccagggtccagtcctgtgtcctcaggcaccactcccctttgtacctcctgtcccaacagccaagctccacagggccaagactacagcatcctttgctcagcacccaaaccactgctgtgcccacagcacggaggctggggacaccgagctgatgtcctcagaaggcaagtggacaggacagcctctggggtcccacagtggcctggaactgaaggctcagaacctaaaagaagtttccccatttcaatgttactttcagtaagacaccattttcaaccatactgaggaggatccgctgaaaaatgaaacagaaatgagtcgtgatgggcagggcagggagaagcaagggagacgagaagtggggaacatggaaggaaaagccacgtgaggaagaaaccagaggtcaagagaaaaagaatcatggaggtagaggaagcaaaaaacacacataacaaagaatgtggactttggagtcaaactaatgtgagtccaaacccaggctctctcccaaaccagtttgggcagatggcccagtggaacctcactctcctcatcagtaaaaagggggcagagtgagggtcctgagagctagtacagggactgtgtgaagtagacaatgcccagtgtttagcgtaagaatcagggtccagctggtgctccctaaacagcagctgctgttcactgttgaaaggcgctctggaaggccaggcgcggtggctcatgcttgtaatcccagcactgtgggaggccgaggtgggcggatcacctgaggtagggagttcgagaccagcctgaccaacgtggagaaaccccatctctcctaaaaatacaaaattagccaggcgtggtagcacatacctgtaatcccagcgactcgggaggctgaggcaagagaattgcttgaaaccagcaggggaggttgtggtgagccaagatcgagccattgcactccagcctgggcaacaagagcaaaatggcgaaactccatctccgagaaaaaaaaaaaaaagaatactttctgaaagtatttattcatacaaataaagacttgacccataaggtaggaacgcaaatgggccacggaatcactcattccacagtatacaccgagtgcccttgaagtgctgggcactgctccaggattgggggcatattggtgaaagagaagcaagctgcctgctcagatggcagggaatggggaaaaacagggagacagtttcctgtttgagatgttgggagatgcttcgagtagtatatttactggaaatagacattcaacttggatgtccctttttggaaatgtgcctgcgtccagggctgggttggggccccaatgaactttggctctgacatagctgttgccacactcagtggaactgaatccatgtttgccttcacccggcatccttcaccccaactctccccgccacaacatacatcccatgccagcctggggaccctcaaaggtgcttcatcattaggtttgtggctgggtcctactgaagtaagtcttggcactcagagggataggaattgaatgaagacatgagattcctctgcgggaggcctctctaggaaatctgtggactcacacgtttactaatgttgctgcagccccgcacccaccttggccttgggcagccatactctagggcttttgtaacctctccatgtgaggaactcaaattagacctgggtttggaggcggtgctccgagctggcctttgggggaggttttgtgcgaggcatttcccaagtgctggcaggattgtgtcacagacacagagtaaacttttgctgggctccaagtgaccgcccatagtttattataaaggtgactgcaccctgcagccaccagcactgcctggctccacgtgcctcctggtctcagtatggcgctgtcctgggttcttacagtcctgagcctcctacctctgctggaagcccagatcccattgtgtgccaacctagtaccg

SEQ ID NO: 42602 - DNA, 2300 bp, Homo sapien
tcattccacctgcacaagtgtgagcttggaagttctctctgcttaaactcactttgggttctctctctgcctccctagcggttcctggctcagagtttgaggggcacaaacggatttctgaacagccccttcccaacaagacaatcagcccacccccagcccccgcccctgccgctgcgcctctaccctgtggaccaacagagaccatccccagcttcctgctcaccagggcagggcgagagtaagttagacacttggatcctggggattcaagctcatcatacagacgggagcgtgatgcgacgtgttagcaggtggaggtggagacctgcccagctcacacagatggtggtggtaggagcagacggacccaggtgtcctgcctcccagttcccagcgtttctgtgggacctcattgatctagacatcgaggacacacttctccagccagtggaatatgacctaaagattcacctttctggtgctgacacttatgccctctctctccatcatctcttttccgagaaaagcctgtcctttctagggctatcttttctgcaatttgaccattgattgtatggaccaagaagctactgccttctgagtttttcttttctttttttggttcgtgtgcattttttctactaagaaagttccacttccttggttgaacagaaatggtaaaatcgcttggtcagttctctcacacctcctcttagttgcttttggccagtgatcacttacacacccttgctggagtgggtgtctgtcccgggatgcgctggggagactgctcggtggtggcccagccaaggtttctttggctcgaacaggcatgaggctgtcatgttgcctacgtgcaaagttgtgtccagctgctggtgtttggcttccttgtctgagtttagtaagtctacccctgcagcctcccctgacatcagtggaggaattagaggcttgtttgtctagggtatgccaggccttgggaatacaatagtggacaagactctatcctaggcctcttaaagcttaccatcttgtaggatgaacagacaaagaaacaggcagtagtgccctccattgtgataaataccatgatggcagaggactaaaggactgtgggagcacagcgaaggagcatctggtccggttagaggcttcagggagggcttcctggaggaagtggtatctcagcagacatcagaaggaagagagatagaagagtatcttcagtggagggaatggcatgtgcaaagtcctaaaggtgagagagtgcccatcaccttggaggagctaaacggtcagccagatcctctagtgtgagggggtggagtgttgagcagtaaaggaagagaggggtagagaggagagacctatgggagatcctacagggcctgaaggccatgggtaaggggagacattcactgcatattccatgagtgcacaaaggctgagaggacagggaaggggattttaagcagggacgtagcgtaggcaggtttatgttttagagttctctggccaccggcagggtgagaacggagaccaagagactgctgagaaggctgccacatccaggagagagatgatggggactgggttctcggggagggcccctacagaggggaagaagggattcatttgggaagaggtattttggaagttgggcccatgagacttggtaactaattaacttcagggatgttcagggaaggaggggatctagagtgactcagagttctgtctggctagtcaggtagatgctgctgccatgtgcagagacagggaagtaagtttgcagagaaagatgaatgttaagtgcctgctggcactcagtaagaaactaaagagttacatcagagagactgagatacccaagtggctgactcacgcccccggcctggtaagtctttttttttagtgccttctgactaggaggcggagctctccatttcaggagttaactgggggtggggagatgtcactctccagtagccaccgcccacacttgccctcgtggctttgcctcagaaacaccagcaagcgtctccctggggattaccaagggaacccactgccctcagacacacacactcagcgctggggcacagccaggaagaggcctccactccttctgacacagtcatctgagcgctcatgtctgctggaggcggcaccaggggatactcacccaggagtccaggggccaccaggcaagaacggccccagtgggaattcccaccccagaagccagaccaagtagatgtggagcctgcatccgcctggagggtggctttgct

SEQ ID NO: 42603 - DNA, 2300 bp, Homo sapien
gcaacttacgtaacctccctgggcttcaagtatgctgctgtaagcaagagtaacttgctgaaggacatgttaagtggttaagagacgtagaggcatcaagggtaggggaaagagcatggaggaacagagagtgcgacaaaggtgcatctgcctgaacagagagtctatgcctggtggtacccaaactatgtctcatgaaactttggacttatccctgaggtcaacacggggtctagagcagagtgggtgctccataaacaatgactgcatggatggtggttagatgcatggatgaatggacaggtgggtgatgaatgggtgcatgggtgggtagatggatggatgttgggaggaaggatggcgggatagatgggtgggtagatggataaatatttcttgagtacccactatgtaataattacaataactatctatttcctgggggctttatataccttatcttcctctctccctccttccttccctctcttcctcactcacctcccttttctccttccttctgtttagtcaacaaatagtgtcaggtaccggcactgcaaatataatcatgaacaaaacagagagcatccttggcttcatagaacttgcagtgtagtgggcgagacaaatgtcaatgaaacaactgcacaaataaatggaaaactgctgctatgataagtgttacaaagtagagggagccagtcctatgagggcctgtaaaagggagaacttgacctagtcagggagagctaagtcttccttgaggaggcagaggttgagcgaacgcctgaaggacagataggagttaactaggccaaggaggggagagaatccctcggcagagggatgcgcacatgcgtagcccccatggtgggaggagcgttgtgtgcacatagcaggagcagggggagcttgaggggccatggagagagatggatcaggagagctaatggggccggggtggcagcgaccttaggaccatagtgaaggttctgcttttcttccacaggaagacatggatgagttttcagatgtgggatgtgggtgaggatagaggagatggttaggtggctactgactgcagttagccagatgagaggatgggacgcgagctaaggtagtggtggtagacttcagagcagtagatgagtttgcgatctttataggaggtcccattggacaggaccaagtgacagaatggattcagggggttagagggagagagatggcaaagatgcctcccagccttctggcctgtatgcatagaggggatggtgttgccgtctgctgagatgggagacactggagggaccatccaccgggtttgggtttgagtttgagtttgaaggacctctgagataatcagatcaggtatcagacaagcacttggctaagtctaccaccaccttgggattctttccatccccacgtgatgaggaaatggaagccagagagttgaagtgacttagggtaagttacaaggtgggtgcagagctggtatatgctaagaagtgaatggcctgtctttccagaggctgaagcagaggatgtggacagcccagcaagttcccatgagcctcttgcctggctcccccagcagggccgtcagctggacatgactgaagaggagccagatgggaccctcggaagtctggaggttgaggaggctggagagagctcctcaaggttggggtatgaggctggtctcagcttggaaggccatggaaacaccagccccatggctcttgggcatggtcaggccaggggctgggtggcttctggcgaacaagccagtggggacaaactttctgaacattccgaggtcaacccatccgttgaactcagcccggcaaggtcctggagcagtgggacagtgagcctcgaccaccctagtgacagccttgattctacctgggaaggagagaccgatggcccccagcccactgccctggcagaaaccttgccagagggccccagccaccacctcctaagcccagatggcagaactggaggcagtgttgctcgggcaacccccatggaattccaggactcctcagctcccccagcccagagtccgcagcatgccacagatagatggaggagagaaacgaccagattcttctgccctcagcccaaggaacacatctggaagcagacaaagacgtcacctaagccactcccttcccgattcattggctccatcagccccctgaatccccagcccaggccaacgcggcagggcaggccgctgcccagacagggagccactctggctggccgctcctcttctaatgccccca

SEQ ID NO: 42604 - DNA, 2300 bp, Homo sapien
gttctccttggtgttaggtggctgcccctgagatgggtttggggttatccaggggccacaggctatgcccagcaatggcagccacctgggttaatgctgcctgggttaatgaccagggagggagggtgagtgagtgacagggtgtcaggggagcccgccccttgcacaatggcacacatggcctccagagctgatagggaggggcctcattagggtttggctctgctccatgtggggctgggggctacagggagagccctgccacccagatgtgggtaaaaggcaggaaaggggatagaggggtgggcgattaccaggatgagggctcctggttctagccctggctacgccagatattcacaagctgaccttgggaacgtccactcattcattcattcattcattcacagaacacattcatcagccataaacagtgtgccaggcttcaggaaagatattaagatctagcctttagaggagaccagagacttatacctaagtagcagcaatagttgtagtagcaataataaaatagctcaatacatgactgtgttctggctcccccgctctacccttggtaggcatcatgtcattgaatctttatagcagcccctgtggggtggctactcttcttatccctgttttacagatgaagaaactgaggcttagagacgtgaagcctcaaaggtcagggccagcaggagatggggctgggatttgaacccaggtccacagtgactctgagatttttttctctcctacatgggtggttcccaaatctggctgcttatcagaattacctggagggctttttggacaatacagaggcctgttttttttcctctttctttttgtttcctgactcagagtctctgggtcctgggtggggccagtgttgggagcctcttgtgctcctgtgcccgcttttctgtgaagctcctgcttctcccgcttgactcgctctgccccgggtacacaggccttgctgttctcagggaaagcccgctggctcccccaccttggcctttccacttgccctcccagaacactctgccccaaaccttcttgtggcttgcttttgacccctcttccttccagtgccttatttgaatgtcacctcctcatagagaccttcctgaccgtcctataacccttctcctccaacccattactcttggccccatgtgttctctaccagggccagtcacctgggacacttaaaatgtctgatgcccagagactgactctgttggcctggggtgagccccaggcttcagtgccacctggcctgggacacggatcgtcacccagtctcattgttcacagctctctccttgaaattatacatgtgcttgcttattgtccatgtctctgctagagtggagagcaggggactggcctgtcttcggccctgccatattcccaggtgatttaaaagcacccgccacacagtaggagctcagtgagtacctacgaatgaaggaatgggatggtggggcttgaggaaagatagctcgactgaccatcaggatcgatctgttcccaacatctggtgaacccttggagggttcttacaacaagggaaagtttacctgatccgccaggttcacacctccatgctgccccgaacatcccactctggctgcaggaccacctcggggtgaggacggtgggttgagatggcaggaatcaccacggtctccctgagattcaggttgcacattggcagagtcagagctggaagggcaggagtggtgttgagtctgagctctcaccgtgcacatgggccctgaggcctagtgagggaaggagcctcggctaaggtcaggccgtggttgaagagggcctagagggtaggagctacagcatgctgtgtgaccttggccaagcctctgaccttctctgtgctttagtctccccatctgtacctgcagggcctgggctgagatgatcccaagcccaggacgtcaggagtttgttccctgagtcctttcctgggcagcgctgactgcggagggcttgcaaggggttaagctcctccagctcttgctctgcacgcagacaaaccccctccttctgacaaacacttgtaggaaatcaggctgggcgcttcctgccgaggcgaggcggcctcaaccacggcaggggcggggagaggtggggagcgatgctggtctgtgagcagcagcttgggctggcagaacggcctggaggtgggccagggcgcaatggagacagggggctccctgggtttggaacaaagaattcacaggcaggtcccctgaaactgggtcggcagg

SEQ ID NO: 42605 - DNA, 2300 bp, Homo sapien
ggtttcaccatgttggccgggatggtctcgatttcctgacctcatgatcctcccacctcggcctcctgaagtgctgggattacaggcgtgagccaccgcgcccatctactttaccaccattttaaggcttgagtgaggtggcatcataagaaacttttgctcagtccacattctaaataaatgaggaaactgaggctcaaagaaaggaaggaataatgacaacaataataccattggtattattagctaatatcataggtaatatttattgagtgcgacattctagccgctgtgccagggcttttactgcaagaagtgaggtttgggagggcaggagctcttatctgttttgtcaccattgttattccctagtgtctacctagtacagagccctacacagagtaggtgctcaaaacattgttgttgatcatctagattatatcagttacgtgatgttgtcgaagtgggtgttattgttgtccctcttgtacagatagaaagcctgaggttcagagaggtaaagccacttgacgagagtcacacagcttctcactggtgttagcgcatccttactttggggtgtgcagggtgtgctggtgtcagctcgggagagtggattgtgcccatctcttcccagtgcagcattcagtgatatcaatagcttgaaattggcatggccaatttcagtaagggtatttaacaccatcaaaattagtaaccaccacaaatcagggctttttcttacttttttttttttttttttttttttaaagacagctgcaggtgaagggtgttgggggatggaagaccagccttgcttctgcttggcagcctggagttgggggctttttggcagagccaagtggagccaggccagaaggcctgcgccccactgcagctcccctaaagtatgcgatttgggaagaaaccctttatgagatggcttttgtagtgtacggtgtgagttatgcagtgcagcagcccctgacttgggaacaggttggtatgagcctgaattccaggccaaaatgtctggcctttaacctgaaagtgacaggagccacggatggtcgttaagcaggggaaaaacctgacaggatggtgccctaagatttgtcattgtgccaagggattggggggtaagtcagggtgggtgatagggaagaggtgcggcagttggccaggggagccaggaggctaacagaagctcctcattttctgagtgtgtcctgcgtacaaacacattatcttgttactttacacatgcatgcctgagggaaggagaagcctctgtctgtagatgaggatatcagagaagttctgaaacaaaacagcaaagggctgatctacccaggcttcctgcccccaaagtctcacattctcactcctccctccctcctgcaccccagcttgctgttccatcttggctctgggcttccttgccaaatgtcaggcgaactccagctccattgccgagtgagaccttctgcgcccagtgccgctcccacaccagcccctaggtccttgccagcattctccccccagcccccccactgccagctcagctttttctggggaaggagcctgggatcagggccagagtgggatgtccagctgtcagtctcctcggggtcttgggaccacagccaaggaccaggactgaggaggggaggtctcagggtctaagaggcacactcagtcccccactaaggattcatctggaggataatgctttatttgtgggtacagacccaactgtgccttaacatgctgtgtgactttgggcaagttgtgtaacctctctgaacctttcttcatctgttaaatgcctaattatttatgaggatccaatccagcaacacatgccatgcctccaaatgcaaaaagtggctgaggctgggcgctgattgcttcctttccttttagtgattttcatgtgttcccacatgttgcataatggctgtattgcagaaaacaacatattgtattagagtttaaacagaggaggagaaggtgtgggggttacagaatgttataggatgtcagagctgtaaagggcctcaaagaacccaacgatacatttcgcctttcacaggaggggcaactgaagacggaggtgcccaaggtcagaaggaagcaccacacagaggtgaggtggtattcgtttgttttgtttttaagaatagtacatgttcatttcattcttatttttaaagcaactgttatatttgaaaaatacccaaaaggaaaaatggtaaacttccctatcaaaaaaacttgcctataattctactacctag

SEQ ID NO: 42606 - DNA, 2300 bp, Homo sapien
cagagactcatttcagacttctgccctctgtaagagaaggtatttgtgccgttttaatttgttacagtagccataggaaactaacaatggagctgccacccccagcagctgttagtcacagccccatgtctgtacttggaaggagtaggacaggaatgagtttctggacttgttgcttctggaattcctgggcctgactctgaggctgtagcccattgagtgtatgggttcccctcccagtagaacttttaacctaaaaacattcctttgcaagtggtcttagaaaggtccagttagttgtccaaagtcacacagctaaggaggacaagtttggacccacagctgccttaagcctgggtctgctctttcctgcacctgtcctggtgtcttttgaagggcccagtgtggtaggctaaggcagcttcaagtactgggagagtggggggagggttgtcagaggtccatcctggccacatgtacctgtgaccctgacatttttactcatgatgccaatgtgggggttggggggaatggagtctcagggtctgcttctcccttgctggagaatgctgggcaggttacacaatgcaccaagcctcggtttccccattctgttcaagagtcaggaccgccatgctgctcaaacccagaaaaacacttcacttccatgacctgtgtggaaaaacaccttgggcccttcctacactgacattccagggccagagcccagaaggattagctaaaatgtttgcccctttcacagagcaggcccttagtgggtagaagctgctgctaaacttactactaaatatgtgtctagggagtagcaggcaacctggggaactggcaagtgctttctacctggaggaaaaattccaaagcattcaactttggatgcagctggatgagggaccttgggcaagtctcttcttgcatcaggacttattaaccctcttgtgttaatagggtcggtcaaggtgctctttaaattagtaccactgatttatttctgacgggcctgccattatgtttatttatttactctcaacaaccgcataagatgtgggtatgaatcccatttgcctgaggctcactggcagcaagtggcagagctggggcaaagagcccaggtgagttggacaccgtgcatccttcaaggtgtgtgtgtggtggacaaggtatgatgtctgtgctgcactcacagcgggaccttggaaaagttcttgtccgtcttcgggctgggtttccatgcttgcctgatggggagttggacaagaatatacttgggggcggtggtgataatacctacctacctcataggagacgactgaacagcagaagagcttccaacaggtctgacccataatttgtgatcaagaaaagtttattattactgttactaagcaggccgtttcagccatggaagtttgtgatttcctcctcactgtggctctgtgcgatcttttttttttcttttttcttttttctttctttttttttttttgatggagccttgctctgtcgcccaggctggagtgcagtgacgcaatcttggctcaccgcaacctccgcctcccaagttcaagcgattctcgtgcctcagcctcccaagtagctgggattacagatatgcgccaccacgcccagctaatttttgtagttttagtagagactggtgggggtggggggacggtcaccatgttggccaggctagtctcgaactcctgacctcaggtgatctgcccggcctcccaaagtgctgggattacaggcgtgagccactctgtgcgatcttgcgtaaatgccttaccctccgcagaccgggcctcgatctccgggtctgcggtggggctgattgcagtaggcacacacagcctcccaggtctgagattttcatcctgcagcagggtttgcgctccctatgtccgagttcctgggggcgggccgtggcggcggcctttcggtgattggtgcgctcccagaggccccgccccccccgggccgccccctgctgtcgcgggcgggcctcagggattatgcaaaggagccaccgccccgccccgcgcccggattggaggcctttgtttgccgctcaactccaggaaaccacccgcgctcggcggccgccagcaggtgagactcggggaggggctcgcggggcgtccggggtggtccctgtccctcgttgggactcagtttctccgtcgggagaatggggagggagagtggacagcgccagtgggctccgttccactgggacggcgctgctttcggtcttttccacgtggaaaccccacgcg

SEQ ID NO: 42607 - DNA, 2300 bp, Homo sapien
tgtgactgtggacaagctgccgtctacaccttgctttccccatcataaaatggagataacagtgacagtcctgccaggttgctgcgagcgtcggggtgccttctccagctccccctaccctggccaccctgtgttcaccaggaggactgaactcgtggagggcaggggtggcttcccttcctgtccgccatggcctggcctggagtagatgctggaaactgaagtggcagtctctggacccctggcaggtctagggtcagggtgcaggaagaatcttggggaggccagctgacgctgtgccccggtttgctagaggacatgggctgtggggtagagggaagggcagagcctgcctccccaccctgaaagctgtggagctcccgcctgtgagtgagttgggagcattttgttggattctgctgccatcttgcggctacagtgatacataggccccgtaggacattccctgagcgcctgcacagaccaagatgcaaaatgcagggctctggcgctcgcagcctagtgaggggaggcagctgagggagagcaggcagacgtggtgagaagacccagggctgtcacagatggatcactgctgtctctagagctggcactgagctggacatgcagggataataagagctaacagccgtactaacaataagcactttgtgccagtgttcaaagggccttgcctatagtattaactcatttaatcctcccagtagccctatgaggttggtactattattatctccattttacaaatgaacaaactgagacatacaaagtagtaatttctggctaggtgcagtggctcatgcctgtaatccaagcactttgggaggcggagacgggcaggtcatttgaggtcaggatttcgacctcaggagcctgggcaacttgctgaaagccccatttctactaaagatacgataattagccaggtgtggtgggcacctgtagtcccagctactcagaaggctgaggtgggaggaccacttgaacccaggaggcagaggttgcagtgagccaagattgcaccactgcactccagcctagatgacagagtgagaatctgtctcaaaaaaaaaaaaaaaaaaaaaagagagagagagagaaagtagtaatttctagcttaccaagagaaaaagagaaattccaccacacctggtctgaacctctgcatggcccctgcctgagctgagtggtgggcacatgccctccagcccaccagtcaacccacgctgcttcactatgtgtataacagccgggcccctgagtttgaaaccctaggttaagaacccacaccctggagccaggcagtctagcacaagtctattccctggactgctccattctatacatcagatctgtgagtttttacaatcaccccagtggttaggcaccatcatttctgtattagaaggagaacataggaggcttagagaggctctgttacttgcccaggcttgcacagctggtcagtgggaattcaaacctgacctgccagactccagagtgtgtgttcttaagttagggtctcaaactcaggggccaggctgttacacacatagtgaagttgactggtggctggagggcatgtgcccaccactcggctcaggcaggggccatgcaggggttcaggctaggtgtggtggaatttctcttttattcttgggaaactagaaattacttatatgaaatcttctaatttgaatgtgttggttcatcattaaaaattggtagcattatgtgagttttaaaacaaagaaaacacccacatctgtgggctaggtttgcctcctgacctctgttttatcattatgccagtggctgggaactgggagatccaggcagatgtcctggaagtcacagccttcaagaccaggtctggttgaaaggacaggtcttgagtaggtggagagggtggcagggagtggacctgccctctggccccacgatctcttcattccttcccccatctttgcctggggaattcccccagccttccagcctccatctccgtcactgcctccaggcagccctccctgaccccagctatataagctgcttctctcttccttttcccctctccagcagcctctacgctctcccacctctcggacagcgggcagactctaagcgaggacagtggtgtggatgctggcgaggcagaggccagcgccccaggccgaggaaggcagtcggtgtccaccaagagcaggagtagcaaggagctgcctcggaacgagaggcccacagatggggccaacaaaccggtgagccaggaggaggag

SEQ ID NO: 42608 - DNA, 2300 bp, Homo sapien
ccttttgatgacaagagcatggactctgggtcaggatcagaaggccagcactgctattgacttgctgtgtgaccctcaggcatcctcacatcctctctgatcctggatgacctccttgacaggctggcccagaggagaattgggatctgggctgtgaagtccctagtgtgaatcctgcaaacagcccaggtgactgtattgtgtggtgatcttggcaggttggggaccagattctagaagtgaatgggcggagctttctcaacatcctacacgacgaggctgtcaggctgcttaagtcatctcggcacctcatcctgacagtgaaggacgtcgggaggctgccccgtgcccgcaccactgtggacgagaccaagtggatcgccagttcccggatcagggagaccatggcgaactcggcagggtctggccactctgctcgctccaatctccagaccccagggccatttctgaaagccagtgatagctgcctcccatccctccaccgccctggctctcctctcagcctgcagtccccacaccagggccctccattggcaggacatgacctgggcacatccctctcctctcttggcctcagtttccccatggaaagctgaaatacaccatccaactgtctcattctttatttgtccccaaattacttaactcattctatagaccttagttgcttcatccaaaaagtggggaccataaccctgccctcatcccagatctgtgcagatgaaagagagggagggagagggaaagagagagatgctttggggtgtatttggccagaggccaccaggctggatcccatgaagaaatctgggtgagagggtcttaaagtcataaactgagatccagttgccaggtggctgcatagttgccaacagtgtaatgtgtcaccttttgatcttcatcagaaatctcaggctggtggccacctggccaaatacactgcagagcatgtctgtctgtctgtctgtctgtgtctctctgtgtgtgtgtgtgtgtgtgtgtgtgtgtgtgtgtgtgtgtgtgtctcccccttcccttcctttcacctgcatagtattaaacattttcaaagttacttgccaacatctagaaagataccaggttttctataaaaaaaaaaactggatttctggatgcttcttaaaaatcaggaagtctggcagcctgagcccacatcggctggagctgagccgcacctgcgagttgcatctgggatctccagttcaccggcccctaagctcctgagggttggcctgaccctgaggttgcctgtcaatcaccatttcttccctccactccttgtgttacctgcctggtcctgcggggttggcaacaactcaggagcccacctcgggtggttttggaggtgccgtgcacactgctgattgggaggctggacgctgccagtctgtccggagtttcctttacccctgagtagcccccagactgaactggcagcgagtggaggccacgatgcatggttctcttgaagctttgctcttcctgccccaagtcaccctgtcccttgcccacgcccatttgatctgctcaaatgcacaactggagatgtgtgtctttccccacaggtttcttggcgatctcacaacagaaggaataaacaaggtaggacatcctctaaggggtattctctgcttcctcacagctccctgagtgaggaggtctggccagccagagggtgccgagtgacttacactacctcattccaactgggcagccccttatctgcccaccccccagcccacttatctgtgactgactgctaggttctgggcactacctctggcaccagggttgatggcaatgaacagagcagaccaggtccctgccctcatgcgggttttactcagtgaaggagatgtaaagacaaaacaaattctaattaagaaagatagtactatcaaggcaaggtgctgggggttatgagggagaataacagatgaaacaccacacttagacaggatggaagggcagagggggagtggcatggccactcagctctagagcagctaagaattcctgggcttctatctttctgtcttgcagccaggattttacaagggcccagccggctcccaggtgaccctgagcagcctggggaaccagacacgagtgctgctggaggagcaggctcggcacctgctgaacgagcaggaacacgccaccatggcctactacctggatgagtaccgtggtggcagcgtctctgtggaggccctcgtcatggccctgttcaagctgctcaacacccacgccaaggt

SEQ ID NO: 42609 - DNA, 2300 bp, Homo sapien
tctcagcctggtaatcccatcttcttttctcccaagctcccatttgtcttaccttttccaaatctttgaaaaatgctggataaacctacaggagttgatcatgtgctctcagcaggctgggaaactggggaaaaggaaaaacagccaagaataaccagcattgtgaggctgcccttcaaggcctcagtggcacatgaccctgggcagccctttcccgtccttggacctcagttgacccatttgtgaaaggaaccccgagtttaaaggtgcggtcccatcataccctgcagcatcttccctttcaaccccttctatttctgtcacatatttgtttttattggaaggctagttttattttttgcctctgtttttacattccttcattaaaagtatttttgtaaaaagagaggatcttgctcagttgtccaggctggagtatggtggtgcaatcacagttcacagcagcctcgaactcttgggctcaagcaatcctcctgcctcggactcccaagtagctaaggactataggcacacacgactgtgcccggctattattatttttagaaatggaatctcactattgcccaggctggtctgcaactactgggcttaagtagtcctcccaccttattcctccaaagctctgggattacaggcatgagccactgtacctgccagaaatatttttttaattacaaaataaagctgcctccttgtaagaatctaagccatatgtactgctttaacggaaaactaattttctcatttattgctgtttcttttagtagattaaagttttgtttacattttaaggtaatataagaatgcatggttgaggtaaaaacctcaacaaagtacaagtgtaggaggaaaattacggatgtccaccttcatggcttgcctcatcctaccccagcttcacgcccaccttggccctgagatgactgttgtttctagataaggggacccttggaatgtcatcgtagacccacccctcaaagccattgctgagtcatggggacatgcccccttttgatgacaagagcatggactctgggtcaggatcagaaggccagcactgctattgacttgctgtgtgaccctcaggcatcctcacatcctctctgatcctggatgacctccttgacaggctggcccagaggagaattgggatctgggctgtgaagtccctagtgtgaatcctgcaaacagcccaggtgactgtattgtgtggtgatcttggcaggttggggaccagattctagaagtgaatgggcggagctttctcaacatcctacacgacgaggctgtcaggctgcttaagtcatctcggcacctcatcctgacagtgaaggacgtcgggaggctgccccgtgcccgcaccactgtggacgagaccaagtggatcgccagttcccggatcagggagaccatggcgaactcggcagggtctggccactctgctcgctccaatctccagaccccagggccatttctgaaagccagtgatagctgcctcccatccctccaccgccctggctctcctctcagcctgcagtccccacaccagggccctccattggcaggacatgacctgggcacatccctctcctctcttggcctcagtttccccatggaaagctgaaatacaccatccaactgtctcattctttatttgtccccaaattacttaactcattctatagaccttagttgcttcatccaaaaagtggggaccataaccctgccctcatcccagatctgtgcagatgaaagagagggagggagagggaaagagagagatgctttggggtgtatttggccagaggccaccaggctggatcccatgaagaaatctgggtgagagggtcttaaagtcataaactgagatccagttgccaggtggctgcatagttgccaacagtgtaatgtgtcaccttttgatcttcatcagaaatctcaggctggtggccacctggccaaatacactgcagagcatgtctgtctgtctgtctgtctgtgtctctctgtgtgtgtgtgtgtgtgtgtgtgtgtgtgtgtgtgtgtgtgtgtctcccccttcccttcctttcacctgcatagtattaaacattttcaaagttacttgccaacatctagaaagataccaggttttctataaaaaaaaaaactggatttctggatgcttcttaaaaatcaggaagtctggcagcctgagcccacatcggctggagctgagccgcacctgcgagttgcatctgggatctccagttcaccggcccctaagctcctgagggttg

SEQ ID NO: 42610 - DNA, 2300 bp, Homo sapien
tgactttggggtcccccagccctagaggaacgggcgcccggctgggggagccccgggcatggtgtgacggggcagtcaggtcagctttgcggcgcccccaaactccagccacccgtcgtctccgtgccctccagaatgtagctgctgaccccgcgccccccggactccagcagcagtctccgccacctccgggctccagcagccaactcttgtgtctctcaggaacccgccgacgtctccgcgtcccccggattccaggttcgcgacccccgccgtcttcgcgcctccgggactctagcagcggtctccgcgaccccctaggatccagccactgtacccgtgctccccaaacccaggctccagccgtcgtctccgcgctcccggggatccagctgtcgcgccagtacccgcgaggacagcggcaccgcccacaccccgcgcgctcagagcccggccgggcctcggcgtggagatgaacgcgccgctggacggcctgtcggtgagctcgtcctccaccggctcgctgggctcggcggccggggcgggcggcggcgggggcgcggggctgcggttactgtctgccaacgtgcgccagctgcaccaagcgctgaccgcgctgctgagcgaggcggagcgggagcagttcacccactgcctgaacgcttaccacgcgcgccgcaacgtcttcgacctggtgcgcaccctgcgcgtgctgctggacagtccggtcaagcggcgcctgctgcccatgcttcgtctggtcatcccgcgctccgaccagctgctcttcgaccaatacacggccgagggcctctacctgcccgccaccaccccctacaggcagcccgcctggggcggccccgacagcgcggggccaggggaggtgcgcctggtgagtttgcggcgtgccaaggcccacgagggcttgggcttcagcatccgtgggggctcggagcacggcgtgggcatctacgtgtctctggtggaaccaggctctctagctgagaaggaaggactgcgggtcggggaccagattctgcgcgtcaacgacaaatccctggcccgggtgacccacgcggaggccgtcaaggtaaggctgtggtttggagagagtctggggcagagtatggacagagtggcacagctttttcagtaactccatgctgtgtgtccttagatgaatcacttggcctttctgggctttttttttttttttaatactttaaaacaggaatgtatagcttacagagcaaatagctctcaggcactgggaacgtagttctgcacagacatggcccttgcctttgtgaggcttaaaagctagtgcaggtgatagtaacaaatacttgagcaaatgtgtggttacaatgtgtgaatagggctgtggattcttatgagcattaaaagagataaaatctctgcttggcataattaggtggcctttgctactgccattctgtggttttttgttttttgtttttccctgaaacagttttgttagctcttaagtggcctgaggaggccgtttgtgtgatccacagtgcactggcttgacgctgctgtttttggaccaggttgtgtatcctgaagcaagtcacttgccctctcaggacctcttgttctccacttggaaaatggggccactggaccaaataagcggtccctaacctttttggaaatgagactcctgcctgaatgtaaaaaataaattccctagcccctgagagtgtttgtcctttctgccatttgttaattgagaaatataacctcatgacaacaggcttccagggatttaatcatgctttttaaaggagtgtgtgtgcttactgatctacagcccagggctactgaaaaccagttggagtatgatggatagtgttgggtccagggtggattcatggatcctttgcaggcatttttcccccttcccccctcccccgacctcctttgcgtacaagaagtgaagagtttgggggaaaagggacacatgctctgcttctgcagagaaatgcttctcagggggttggactgttctgtaaacccccactccccgccagcgcaggtgttttgaactccagctgagggcctgctggctgctgggaaactcctaggcagcagaggcccacgactacttcctcctgagtgccgttcagtggcctgtgtccaggtgagtcttgagccgtctccctggctgtgcacctgatgttggcttccctcatttgcttcccagcccatcaacccctttggaggaagcccttgaggctttcagaaacttctttgtagcttctggaaaaaggccg

SEQ ID NO: 42611 - DNA, 2300 bp, Homo sapien
actaagactgcatgcagcctggtttctgctgcctaaagcaaaacaccttcttgaaaacatcctttgcacagaaataaaatgttgggactggggatcttagctcctgggatgcatttatcaaaccaatcacagtaattataattaaaacaaactaagtgagagctgagcatgaaacacattagcaggaaacctgaactgcatacaattaagccctgcttggtggcattttgaggtatgtcattaatacatttttggggtggagaagattgattttttttccttaaacatcttggtctagttgcatgaaaggcttcaacaacagttacaaaggaggaataaggatagacaccattaactgctaagattagagctttaagacagatggccaaaggtagcctaattggctattttttaaaaaatcttcctcagacacactgttaaatatgtttattgggcattaatttaacctatgtctgttttagggaagtaaagaattgaagatctttagggaaaacacagcttccattcctagcctcaatgcattaagtcagcagtgttgaaaacctttccactcttccccattgtctagaggagaaagtccgttttccttacaggttcttcattcaggtgtcgcctcttcagtaaagtccttaccatattctcctctcctaaacctgggctccctcgccattacaacaggtatcacactggtttttaactctatttatttgatctttctcccctgggtctccagcacccagcacatgacccagcacagagcagatgcttcaaaaacgttgaatgaaaagcgaccaaataaataaataaataaataaataaataaataaataaataaatgaatgatctatccttctgggtccaccacaaaccaaatcctccaggtaatcctccatcttgccctaccctggatagatgtcagctggctctgcaatggaaattctggaagacttttacgaaaaatacatagaagagtagcttaggagaggcagctcaggttggaagggatgtgtgtgaggtagggtgtgtgtgtgtatgtgtgtgtgtgtgtgtgtagcactatgaagctccccattagaataaaagcacaggattttacttaaatcttatttgggggattgggtgggtgacgaccgactccagggcacacctgggtgtatcttcccattttgcctagggatgggagagcatagaagagatttttctccaagccacttcaaatatgtatatttttaatttctattttgagattgtagatccaaatgcagttctaagaaataatacatagacatgccatgtacccttcacccagtttcccccgatgttgacacgatggcaaccaggacattgacattgataaaatccacccaccttactcagatttcaccagttttatatgcgctcatttgtacgtgtgtgcgcgagcgtggggtgtacactttatataatatttctgaaagtggcttttcccttgcaatggagactgggaaggggtccagcctgatccatccctgccacggagttgactccggcagacagcagtctatgcttgtattcgtctctcgcacacagtaggtggccaacgaccgtccacataaaccctggaatttgtcatgtcagggcgcgtgcaggaggggagcgccacattgtaaggaagaaaaccgagactgaagtgcccagtattttggaagcaaaaatcaaacaaacaaaaaacttgacgatttccccccgaattgtgaattagctagccggctaattactccaaagcgatcctggtgtcggcactcgctgcgaccgccgaagagcgctgtttctgagccccgctcccggctctgccggcggggtaggggacgcgggggctcctcccacccctaccgccgcgttcacccctttcttccctggggctggactgtttcaccccgtctccaggcaacggccaggcgcaccgggcgggacgtcatttcctgaggagcccgtggggagggggcgggcaggaggagggacgagggggcggggcccgggccgggctggcaacgagacggcgtcggaactcgctggaagactcggcccgggtggctcaacagttcgcaaagtccgggcttgcggccgggcggcgcagaggcgcggaggctccccgggcggctgcatcccggggctgccccggacatgccccgcaccccttgtcggacgcccgcgccgcttcaccggctgccactccccggagtgctctgggactagagcgccctccgccccaacttctgactttggggtcccccagccct

SEQ ID NO: 42612 - DNA, 2300 bp, Homo sapien
atttatcctttaaggaatatagtaactcaggcaggagacatgtgggcccatgtgctctattctgttttatcttcaaaactctttccagtcctgtttctcacatcagaaaaggatagaaattctgttctttccaaccccaccacgtcaatcaaatgaaaatgtcctgagccatgaatccagctcctggagtgaagaatctttgtatcaagaaaaattctggcattattttatgttctcagcactcagtggactctaagaggtcacctggtcctttcctcagcccagaggattccggcagaaaagcagtagctcagaggttttactctgcagccctgactggattcaaataccctgtctgtgtgttaataggggcatgacttttggctcagagactttgcgactctctgagcttcagtttggtcaatataaaatggaattagtaacagtatcaaagttaatgtgaggagtgagtgaagcgatgacaagggcccgtcatactgtaaactcaaaccatggcttcctatttccctattcacggtggatggggagatgtctccgtgccaagttgaccccctccccaactccgcacacgctggtccttttcccctaatcatctcccaccgcctccatcccccactatcctttcctgggtaacttcttattcttcagatcttattttattttttgagaatttttattatttatttacttatttatttttgagatggagtctgctctgtcacccaggctggagtgtagtgacacgatctcggctcactgcaacctcagctcccaggttcaggcgattctcctacctcagcctcctgagtagctgggattacaggcgcgcgccaccatgcccggatttttgtatttttagtagagaccaggtttcaccacattggtcaggctggtctcaaattcctgatctcgtgatccgccggcctcagcctcccaaagtgctgggattataggcgtgagccaccgcgattggcctattttaattttttaattttaatttttttgagacagtcttgctctgtcgccctggctgcagtgcagcgtcacgatctcggctcactgcagcctccgcctcccgggttcaagcgattctcgtgcctcagcctactgagtagctgcgattacaggcgcgcgccaccacgcccggctaatttttgtatttttagtaaagacggggtttcaccacgtcggccaggctggtctcgaactcctcacctgaagtgatccacccgcctcggcctctcaaagtgctgggattacaggctcgtgagccactgcgcctggccttcagatcttaaacaccacttccttggtacagcattcagagacacctccatattcctctccccttactaaaggttccttcttacggcaccctgcatttttccttcatgactttatcacagtttgtaattgtctatttattttaattaatctgtctgtgtccataaactgtgagctccgccgggaccttgtttgccctgctctctgctatgtcctcaatatcaacagtggactaggatcacagcaggctttcatcaaatatttatgggaaacagtccagtccattcctgaactcgggttcagaaaaggatagcgacctgtccaaaatcacacaggttagcggcagacttgatcccgagtctcctaactggcaacccaagactctatccccggaactggcaagaatcttcctgaactaccccgataaaattttgagtgccaaagaaagtcccagaaagggagtgagtagagcagtgtggagagtaggaggaaagtgatttgacttggcccctcctctcttgacgttgagcatactgcaaacagacactatacgtggcagggcggctacagagtgaaccagcgacagggtagccattaaaagaggccagggagcggacagaggagtagagggcagtactgcgcagtagactgcacaggcgcagtcgaggagctccgctcctttctcctcagccccgccccgccccatttctgccgaatcacagaagttcaagagcggtcagctgatgctacgctgtgcggtcacgtgacaacgggggcgaagcgcaggcgcaaggagcaagcgcagattgtgggcggctgtgtcagctgacccaaggggccttcgaggtgccttaggccgcttgccttgctctcagaatcgctgccgccatggctagtcagtctcaggggattcagcagctgctgcaggccgagaagcgggcagccgagaaggtgtccgaggcccgcaaaagtgagtttcagggtggggctgcccg

SEQ ID NO: 42613 - DNA, 2300 bp, Homo sapien
aagatcacaccactgcactccagcctgggtgacagagcgagaccccatctcaaaaacaaacaaacaaacaaacaaacaaacaaacaagcatgtacattctgactcagcacatctacttatagaaatgggccaggcatggtggcttgcacgtgtaatcccagcactttgggaggctgaagtgggaggatcacttgagtgtaggagtttgagactagctggggaaacatagtaagaccctgcatctacaaaacaaaaacaaaaacaaaaacaaaaacattagccgggagtggtggcatgcacttttagacccatctaccagagaggctgaggtgggaggatcccttgagcctgagaggagaggccgaggctgcagtgagctgtgactgcaccactgcactccagcctgggcaagagagtgaccctgtctcagaaaaagaaaaagaaaaagaaaaagaaaaagaaaaagaaaaagaaggaaggaaggaaagaaagaaagaaagaaagaaggaaagaaaaagaaacaaagagagaaagaaatgaaagaaggaaagaaaaagaaacaaagaaagaaagagagaaagaaagaaagaaagaaagagaaagagaaagaaagaaatgcaggctgtggcatgtttgcgtgtatgcaacaatgctgctatgtgtatcagggcaaggcctgtcagcaaggctggaaatcaccttcatgtccactaagaaagaagggttaagaaaacaaagaccctttctattaggttggtgcaaaaataatcgcggtttttgcaattttttttttttttgagatggagttttgctcttgttgcccaggctggagtgcaatggcgcaatctcggctcaccgcaacctccacctcccgggttcaagcgattctcctgcctcagtctcccgagtagctgggattacaggcatgcgccaccaggcccggctaattttgtatttttagtagagacggggtttccccatgttgatcaggctggtctcgaactcccgacctcaggtaatcctcccgcctcggcctcccaaagtgctgggattacaggcgtgagccaccgcgcccagcctgtaatgtttttaatggcaaaaaaacgcaataacttttgcgcaaacctaatattaatatagggacgtttatgtgccccttaaaaggaaatgaggcagtgtggcgcgttctggccgatgagcgccaaggtactttgtcgaatgaaaaagcagagtgcccaacagaatagaaaaggccttcctttgtgtaaacgcacacacgcacaggtacatatgtgctctaaggaaaaatacaaggaaagcacaaggttagtgttttcctcaggggaaaggttacttacttttaaccgtagaccctttgaaattacgaaggatggcgatgggagtgagcccttgtgagtatagcaattgggaacacgagtgagtatgtgtctggtagctgtgaacatttcacacacactatctcattaaatcttcacacgacctcatgaagtagctataattatctgctttttacagaaaacgaaggcacaaagaggttaaataatttaccaaagacgataataagaagtggagagacccgaatcacagcctagtctgaccccaaaccaatgctcttaacaatacagcacatacacaattttccattagaaacaagtccccggccaggtgcggtggctcacgcctgtaatcccaacactttgggaggccaagcaagaggatcgcttgaggtcaggagtccgatagcagcctgggcaacacagcgaaacccccgactctaaaaacaacgacaaaaccaaccaaacaaaaaccaaacccaagtccccaataaacttctggtctcaaatactgcctcatccacgggttccgtgattgtgtgtgagggggctggacctctggagtaagccgctcctttacagtggggagacggcgggaacccgtgccccaagatgccgtgcacgtggtcggctccgcgcggaggctccttccggcgtcccgggggggcgctcggctgatgaaacgcggcctccagctccgctccgccgcgggcccgggaggcgcgttccctcttggccccaaagcgagtccggcgggcggctcctcggggttgggcgaccgagcggggccggccgggcggggggcgggcccgtgaaggcggcgcagcgcggcgcgggaggcgtgctgggcgcggggctgcggtgcccagaggctgcggcattaggggctcggcgcccccgaccttccgcgtcccggggtggcggcggcggcggcggcggcggcgc

SEQ ID NO: 42614 - DNA, 2300 bp, Homo sapien
cctggcattcttttttatttttataaaaagagacagggtcttgctatgttgcccagcctggtcttgaactcctaggctcaagcagtccacctgccttggtctcccaaagtgctgggattacaggtgtgagacactgcacctggcctaaatatcattttaatggttaagttctgttttcttagttctactctcacggggcctttatattctatagacgcttttgtttgggcaggaagatgtgagtgttcagtcttttggacagcattaatagatattgatattgcagtattgatagtggcaactctatattgagtgctcactgagggactggccctttgctcagcactgtacatgtattatttaatatgtaccttagttctacaaagtgggtacttttattatccttattttacagaggaaaaaacaggctcagaggagtggggttacttgctccaggtcacacagcacatgagtggcagggccagagtttgggcccagggctgtctgactccagggcctatgccttaaccatcaggctgccctgtgtctgctgcaaggtactgagtctgaggctgtgtggatccttctccagatgtcatgatgcctgttcttccctgagctgagagctgcaccatgtgacttccacccagtgctccaagctcctcattctgcctttgggacagcccagaatgtgcctaatcccccttccacatgatagtcacatgcactggaaactggctgtcctgcggctgattgatctctttccctgggttccaagcaggtcccggctgaccagtacaggagcttggctgagagtgccctcttggagccccaagtgagaagatatatcatctacaactcgaggcctatgcggctggcctttgctgtggtaagggggaggtggcccgcacactgaccctgccctgacagcttatggcaccaccaaattcagcaccgtgtcttggagcctgttggtgtgggtcaggggcttgggggctgttggcccaggtgcctggaaacgagcagtacatatggacattgatttgggatcagaggaaatttatgggagagagttgtaaccaggtcgttgcataaaggatgggagtcagggtttactgtgggcagagcttgggattgggagtctgcagatccacccaggctctgggctcaatatctggccttggccaagactttcctcctctccggaacttggtttccccatctgctcaacagatgggttatttcagctctattcatatatacatgtacatatatatgtgtgtatacacatatgtatatatatataaaatatatgtatacatcttcatattgatacatataaacacttacatacataaatgacagagccaggatttgaacccaggcagtctggtttcagcgtctgtgcttggaaccactgtgatttgctgctgttttgtatgtataaatggtcaaatagcacacctgactcccaggtcccacttctagggagaagggaaaagggtgggaaccagcattgattcattccctggtgagtgctgggctgttacttatgttgccttgttaacccttattacaatgccgtgaaataggtgttattatccccattttacagatgaggaaactgagacttaggggagttataaattgtccaaagccatatagtgcttgaaggatcattatggtctttgaactgatatttgtctcacttcagatccacctgcctttttctgttttatttaaaattaaggtaaacaaggattaggagtagctactaaccctttttgtctacttttgcttataaacaaggaacattagctcattctcacagatccaggtgactgcatcaatctcttactggtgctgtgagctgtctgaatccaaggagggtatcagtagtgtctgaaaggtgtccctttgaatggagctgctttatgcaaggactgaagttcctgaccatgctctctgtctggcatcttgcaggttttctatgtggtggtgtgggccaatatctactctaccagtcagatgtttgccttggggaaccactgggctggcatgctgctcgtgaccctggccgcggtgagcctgaccttgactcttgtgctggtctttgaaagacaccagaagaaggtgagatgtctggagatccctgccacactctctccagaagagcggtgcaggcgtgagaatcagatttttcccttttgcctccctcaaagaatttccctggccatgaaaattcacactagcccgtaagcccagtgactaaaagaaatcaaattgtgtatgtgattgtt

SEQ ID NO: 42615 - DNA, 2300 bp, Homo sapien
tgtgacattgtagactgggagctcctggaatgtgggggtcctttttagcctcgtttatctttgaatctcctttatccgttggcacgtaggagtggcttgacatgtgttagatgaatgcacggatggatagatgactaaagaatgggctgggcgtggtggctcacatctgtaatcccagcactttgggaggctgaggcggatggattgcctgagctcaggagttcgaaaccagcctgggcaacgtggtgaaaccccgtctctactaaaaatataaaaaaattagcagggcgtggcagtgtgcgcctgtagtcccagctacttgggaggctgaggcaggagaatcacttgaacccgggaggcagaggttgcagtgagctgagattgtgccattgcactccacactccagcctgggcaacagagcgagactccatctcaaaaaaaaaaaataaaaacaaaacaaaacaaaaaagagacacatcaggtgggctcagtggctcacccctataatcctagcactttgggaggctgaggcaggtggattgcttgaatctaagagttcaacaccagcagcctgggcaacatggcaaactctgtttctacaaagagtacaaaaactagctgggcatggtgtcgcatgcctgtagtcccagctacttggaaggctgaggtgggaggatcacctgagcgcgggatgtcaaggctgcagtgagctgtgatcgcgccactgcgctccagcctgggtgccagagtgagaccctgtctcaaaaaaaaaagaatggacacatctttttagacaacttgagtctttcagtttctaaatagtatcttgggatgaggtgatacactatctggcatgtccttcagattcactggggggtgcagtggaggttggggtgttggggacgggtaccgagtgaggatggagatgaaccaagagtggccatgaggtgacctaacagttgcagcgggaggatgggttgctgtcatctacttctgaatatgctaggaaattttcatagtaaaaagctttaaaggaaccatttgagaaatcctcccttgtgggtatgacattgggagactagttggcaagaaggctgtgactttgggtctcatgggtcagtcagtgggaggaaggaggtctgggaaccagaggaggtggccagtggatgggagtttggggcaagggccaccagtttctccaagaacttcaattaggatgtgtggcagctgtggtcttgacaggttgtcgtaatgtgaatgtggaagatttcagcctggttaaatttagcttggccggcccctggggtggaaggggaggcacaggtggggtacggacttctcaccctgcttctgtccccacaggcaaccaggttgattacctcagacctggttgtgggccacaggtgtcagctctgaagggtttcactcatttgcatgttcacgccccgcccattgaggatgaaggtagcctcaggtggacaggtgatgtccaggagggttcggagtctgtctgggatgctcagcagcttgtgggaaatggggccgcagccattttgaacagggtttaactttttcttttcttttcttttctttcttttcttttcagacagagtctttctctgtcacccaggctggagtgcagtggtgtgatcttggcttactgcaaccttcacctcccaggttcaagtgattcttgtgcctcaggctcctgagtagctgggattacaggtgtccaccaccacacccagctaattttttgtattttttgtagagatgggtttcaccatgttggccaggctggtcttgaactcctggcctcaagtgatctgcctgcctcggcctcccacagtgctgggattacaggtgtgagccactgcatctggcctagggtttgaccttttctaaacgtgcacacaaagccatttttctaccaaccatacaaatgagacattgtcatggtgccaaatggcaccttcctgccagacagcaggctaaataggactgtctcagggaggaagagttcagggttgggctgcccttgagccacggtggtcactgctgcttctccccacagctttggtttgtctacttcgacctggagaactgtgtgcagtttttgtctgatcatgttcaagaaatgaagactagccaagaggtaagatatcttcagtgaaaaaacaaaacaaaaaccaggaggccaagttgtatcgatttcattatcttaagggtgggaaaatgtctgagaaaaagttacttggaagaatacctacgagcaatcagtggttgttttgcctaggga

SEQ ID NO: 42616 - DNA, 2300 bp, Homo sapien
acaacagcattattcataataactcaaaactggaaataacccaaatgtccttcagtgggcgaatgattaaacaaactgttgtatatccgtaccatagaatgctactcagtcatcaaaagaaaggttaagttacaatagcaaagatttaggttaatctcaaagatgtttcttaatagatttgttcaatccagaatgagtaaccatgggacatcaaaatcatcctttgctagaattctttgaaaatacgttagatgcttattttagtagatggtaatgagtctattgaataacagttaggagcaatagtcatggggaagggttatgacttagtacctgctctcccagacctgatggtctaattggggagacagaaggaatggtcaaacatagtctagtaggaggtattcaatgatagggaagaaagggaagctataggaacatagaatatgatcatcttacccaatcttggaggcaggcggatacaaaaatggtttctacacacaattaaggaacaggagcatagaaaagaaaggttaagttacaatagcagagatttaggttagtctcaaagacattttttaatagatttgttaaaccaagaatgagtagccatgggacatgaaaatcatcctttgctagaatgagcataggagcatagtgatatgaaggaagaggactggacacttccattttgcaacagtacagctagtcaatagtgtatccagggaactgcagcttgggaaagtagtaaaagttgaggctggacactggggacgggtgacagtgagcagggaccaagccatgaaaggcctttccaagtagcctgaagagtccaggctgtgacataaccagaagtagcaactggatggaggcgctagtaaaactggtttctgccgtacatcacaggccattccttaaactttcctattatttctagaacccatcttttcccagggtcctttactttcctctgagatcaaccctccctgagctctaaggccgagttccaacaccacctctttctccaggaagccccctcaaccccctcactgcagggtcttacccactcctgggtaaagacagtgcaggtatttatgaacatgcatgatccagcagtacctatggtgaagtgtgatggtgaagaagccagcagccagcctgcctgagtcccaatcctggctctaccacttgccgtctgtgctttattttcttatgtgtaaaatgagaatgatagctttattgtcacaaaatttatctcaggattgaataattttattgatgtatttaacttagagcagtgattggcacaaagtaagcacttaataaatataatcttttattacatgttgtggcccccacacccaactgcaggcaaagcacatcacatgatcaattaactttagactaatcagggagtagtggttaatgttctaccctcacagacagtcacctcgatctgtggcctcatactctgattaaacaatggtcaatgcagactggaaatactttcctttcatgggcagtcatgtgctagaggttacaactccaagccgtgatttagaactaggtcatcttcctagctcctctgtcttcatccttggatgacctaggacaagtgccttcaccttttagaactttgctattcccatctgtacactgagaatgaatttctatgaggttcaaaatgacagagggctaggcagcactttgcaaagagctgatgcaaatgtgatttccgtttcccaatctgcaaaccacacacctctcatccctcactttcacttccagaagcacactccccagactggcacagctggtaagcctccagtgcagggaacaggtatattttaatttgccccacccactgacttgatgaattctttctctcctccttcagggactttcctaacttccttctgtaaacgaaggaaggagcacatgagcatactgtatataaatatgcttgggaaagctttcttcttctccttcttcttcttttttttttttttttttttttcctcaaaccaaacttggtttctgttgtaggcggtgcattctctagcagggtagggccacagtgtgctcttgaagaggggaggggagaggaaaagggaaggaggagactgagtgattaagtcacccactgtgagagctggtcttctatttaatgggggctctctctgcccaggagtcagaggtgcctccaggagcagcaggagcatggccgaggatctgggactgagctttggggaaacagccagtgtggaaatgctgccagagcacggcagctgcaggcccaa

SEQ ID NO: 42617 - DNA, 2300 bp, Homo sapien
ttccattcaacaatcagaagttttccactttgatcaaagaggctgaacaagagggccaagggagcagctggttctcagcaactctgggcagaccacagagcccttgctacccactcactgtccgtgcccaccagaggacacagccttctccccaaatcagccaggtacatgccccagaaaacactggcttgcctcgttcccaccttaattaccggaccaaacgaacgtgaacacactgttttcaaaaccaaactcaattgggatcacgggggcctcggtttccttgattgtaaaatgggtatatcgccccccactctatttagcccaagaaaacaatttatctcttgatgtctctttcgtctccaggatctatgcttttacagactcactgggaggaaatatccagaccaaatcctaaagcctgatctaatttgggagatgctcagaagttttggttctatgcaagaacagcagtggtaataatccaagcttggctttagacacaggacgtttccttaggggcatctgggatctctgctggctcaaagtgatgcgctgcagacaaaaagtgagcagaaaggaaaggaggtgctatgcagaatgagcttcttccacggtgataccaaatggagctttcaaaggcccacatctggaggcagcagctatgcagtgattaacattttaaacggtattttgaaatggagatcattagtaaccacagatgtgatctgactctgtcccccaggtaatctgtctattgtatctaaattccagacttagcccagtagacagcttgggatgtttaacaggaattgtccaacaccatccccaaatctatttttattcatggagtactctgacatcatctcgcttggtcttcctgatgactgtaatgcagattgggaacagagaaagccataaagacttgtatgatggcccaaggctaagaagggaaagggctgagaccacacttcaggttttagctttcaggtgcagtgaagattgaatgacttagcacgagctttcagccaggcaggctgcaaagtgcacccaagttctttcagtgatcgacacttgcgacttaggttgagatagttttcatcctccctgagcctcagttttcccatctgtaaaaaataaacattgcctgcctcggagggtggaggtggaagtggaatgaagccacatgtaactcctagcgctgtgcctgagacagtagaggttcaattatagtagtcacatacacacacaacacatacatacacaagacacaacacaccacacacaacacatacatacacaccacacacaacacttacatacgcaccacactcggcatgcattgcagatcacaaatgcacaccacacacacactgcatacatataccatagagaacacacaacacctacacatacccccataccacaaatacacacacactacatagtacaccacgcagaacacacacagcccccatattccacaccacaccatctcactgccaattccttcccctcttcatgagttttacggcaggtccaggttcatctgccagtttaacagatcccaaaacttctgcaggagtgtttgttcaaaagattgatatttccagattcctgctttctgacagtatctttgaaccccaaatttcatactgccatgagccagtccccctttggagaaatatctccatttgtgtgccctttttcccccagggaacctgcagcatgtccctttttcagcagtagcctatcaaaccgaaccctttggagttattacactgcagtccgagggatccggcctccctgagacccagcaaggactcattatctggggaggtcttctgagccacaggcctcgctgaaagaaggtgcagcttcttgaacaggaaggcgttttgtggcagagtctaaacgaaacagaagttgctttgtgtgtgcgcacgcatgcacacacacacacacacacacacacatacacacacacagtcggggaaccgtcattttcctacgcgccctctgacatcagccaccttctctgtagctagtttctctgcacacaacttaatccctggcaatgaaaaatgaacctctcccccacccttgctgccgcctctcgcctcacgcccccagagaagagtttctccaccaggcagcaggtgaaggtttttttccaagtcacatgattcaggattcagggggagaatccttcttggaacagagatgggcccagaactgaatcagatgaagagagataaggtgtgatgtggggaagactatataaagaatggacccagggc

SEQ ID NO: 42618 - DNA, 2300 bp, Homo sapien
ctggtcatatttggcttagtttccctgtgattgaccataccacttgtggtagacactaatcaacgattgtagaatcctaaagaactggggagaggagttcgagtttgagacattccccgaaaaagccatatctatctagttttctagcatgcgctcttgtcttatttaaaaactcacatagaattataaatatattgattatatgttctatacaaatatagtttatataccatatgacatatattgtacactattctaatattttaatccctaacccaagagattaactcagtaggaaccactcactgctggttgagacacagcttcatgctactgaaatatcctttggctaaagcacagaatttaaaacttcccaaacaaccaacatttgaatcagccaaaatggatcaaaagttcaaatgagcggttttatgacatgactatttatgggctttcttgctgtctgggagggtcactttagcagagaatcctaaaatactacagccaaagcaaccgtaggatgacctaatcgtgtcttgctttttttttcagatggggaaactgaggcccacagcaacaataataactgtggggatgatatcatttaatattgaaaataagtggataattgagacctccattattagtagttaatttttaaaaatcaaagatctctcctaattagctttatggagcaaataaatatattttccatattcaaatatggctgtgatttctacacaaatggtgttaacaatctaatacagcataaaacattgtttaaatatcatcataccctattcctaaacagtaacgtgtaatagatctctggagcccagtgttgtaatataaacacttcccaggtgtattcccttggtaaagtttcattacttctctaaacgtcagttttcttgtgtaaaaaagagacacttgtgtctatcctacttactggttacaaggatataataaaaatagtgaacaaaaatagtgttcataaagtaccctgcacagcacctgattatagacttaataagggagggctcaatggtagttgcgttttgaattacatttaatgcttcattttacttcactgtcacaaactactatgctctgcggcaggctcagaagtctctaggcacgggtgaagtgctacttctccactcccttaaatgcccctgtatgccctgaggatactcaatgcatgctaaccaccaaacgaacggatgactcagagcttggaggaaatccacggcaggctggaaagcaaaggcgcagcttatggctcaaggattaggttgttacctttttaaattattgcttttctttaaagaaagggctgtgggggacgcctttcagcactaagagaaaacctcagaaatccttccccctggagacccagctgagaagaccacaccaggcacagggcatgaacaatgtcaaaaagctactgccctgcaggacactggggctggaacaaagatgcctcccagcagctgggcaaggctggctcccacacaagaaaagcagggctgatgtgagcgtcccgcacgatccccacctgctgagacctaatcctgggttatctctccgctggcccagagaaacctgaaaccccccaggcttttgaagggctttatctcctctttccaggaactgggctcagtccctgtactcgctccgaggtgccactgagcagctgctgcccagagcccaggcgagccctggtcccatttccagcttgaccaagtacaagaggggagccagggctgcggatcctactccctcttgctccccaggcatccgtctcacaattagaaaacccgtgtggggagcaaagcaaaaatcacatttcactaacagctactcggggtcgggggcgggcaggcgggaattcctactttcgccataaattgtatgcaaatgggttccttccctggccgagagccaggagtgagtgcgtctttcatgagctaaccctgttccgctgggagggctgttcctttaattcgccaactgaaaaagtgggaaaggatgtctggaggcgaggcgtcccattacagaggaaggagctcgctatataagccagccaaagttggctgcaccggccacagcctgcctactgtcacccgcctctcccgcgcgcagatacacgcccccgcctccgtgggcacaaaggcagcgctgctggggaactcgggggaacgcgcacgtgggaaccgccgcagctccacactccaggtacttcttccaaggacctaggtctctcgcccatcggaaaggtaagtctgttttgccctcat

SEQ ID NO: 42619 - DNA, 2300 bp, Homo sapien
gtaagaagttataacactgctataagaaaagtttttcttttcccatctacttatttttgtgaataggtttctcagtgcttacaaccaaaaaatgaaaagtaaataaaatttatgaaataccatctcacgttagcaataatgaatattcctcagcagacatatggcctaattttttaaaaagttcacctcattcagagaagcatttctaataaaaccttatgtttcacatcacatttagcaaaattttaataagtgtatggtagattgatcagttgtatacatctaataattgttatgataatttaatccagaagaaattgggttttgttagcatcttatatttacagaacattaaagaaattttaatatgaatttatatacatgttttgtttcagaataatataacaacatgatcagtgaaagaatttccagtataaaaaaatatactacattaggaaacatttctatagagcaaatgaaatggaaataaacatttaaggaaaacaaaagaactatgtaagttttcaactgttagggaagattctacttgtatatttttaaatggatgaatggtggtatcaaattaaagtggaatttcaatccattaaatctatttataatagttagttttattttaaatgactatatattcaatatactttacattatatccctcacaactatttaaacttttataataaaagcacttgtcaacttaaaaacgttcatatttttccaagaatattttagagagcattaaagcgaactactaaggactgtattttatcagagtgaattcacttcaataattataataggggaatcaaatggtagttgtttaagaaaatccaatgtactgatggacaaatctgtataaaggacgtgagaatgacacattttctaagtataaatgttacacgtcaagtttgggctgcaattggactaagtctacacttccttatttatcctcagccagccaatccaggtcttatagccctaccctttgacctatgctaccctgtgtaactggttccctaatttggattagaaaactgaaagattttcaaactctaggtctttgttgatagatttaaaaaaaaatctctttaattatagtatataattctagtgcctaggaatcaatgccttatctaggaaacacaagccaagcaatatgtagctgcatcatttcttaggatattccttccttttttggtcagttctgatgctctcttttctgagcagattgctgagctggggtgaaggcaaggcaaagcaagaaggtggtgggaggaaaaaaggtatgtcatctacctactgttgtttcagttttaacttgaatctgcttatccactgattcattcagtaaagttttcctaaacacttactctgcgccacgttctgggttaggattgggggctaccaaggccaagaaggtacaggtttttcccttgaagagtcacagtttactaagggaaagatgaactcaacaaataattgagatgctctgcaataagctctatattagaaaaaactcaaggttccagggatcagaggatagaatgatcaattctataagaggtggtaatatttgagcaaagccttaattaaggagtaagaactgaggacagtcccagcagaaggtacagcacacattttagcatggggccatatgtggtcatgacattttgataaatagaaaatatatcatatctaaagcagagggtagagtcagcacctagcaggtggaggcaggagataaggctaaagaagcaagttggggataggtcacaaagggccatgaaagttgtcttagtcttttcaggtggctgtaacggaataccatacagtgggtggcttataaacaacagaaatgtattgctcacagttctagaggctgggaagtccaagattaaggcagcagtagattcagtgtctagtgagggccccttcctggtgtcttcttgctgtgcccttatatagtggaagaagaaaggcggctatctggggtctcttttatgaaggcattagtcccattcatgaggactccacctcatgacttaatcacctttcaaaggccccacctccaaataccatcacattgaggatttggtttcaacatgaacttggagaggacacaaacattcagactctagaaagccttactcaacatttgaaaattgaacttgatcctttgggcaacaggaaggaacatgatgagataaagactttagaatgataatccgaggttagaggacatgagaaaaatgcctaatgcagcacaggatacagattctcca

SEQ ID NO: 42620 - DNA, 2300 bp, Homo sapien
ctctgataaaatacagtccttagtagttcgctttaatgctctctaaaatattcttggaaaaatatgaacgtttttaagttgacaagtgcttttattataaaagtttaaatagttgtgagggatataatgtaaagtatattgaatatatagtcatttaaaataaaactaactattataaatagatttaatggattgaaattccactttaatttgataccaccattcatccatttaaaaatatacaagtagaatcttccctaacagttgaaaacttacatagttcttttgttttccttaaatgtttatttccatttcatttgctctatagaaatgtttcctaatgtagtatatttttttatactggaaattctttcactgatcatgttgttatattattctgaaacaaaacatgtatataaattcatattaaaatttctttaatgttctgtaaatataagatgctaacaaaacccaatttcttctggattaaattatcataacaattattagatgtatacaactgatcaatctaccatacacttattaaaattttgctaaatgtgatgtgaaacataaggttttattagaaatgcttctctgaatgaggtgaactttttaaaaaattaggccatatgtctgctgaggaatattcattattgctaacgtgagatggtatttcataaattttatttacttttcattttttggttgtaagcactgagaaacctattcacaaaaataagtagatgggaaaagaaaaacttttcttatagcagtgttataacttcttaccaggttgtatgccaaaaatcacataaagatcaatcatcaaataggatttttaatactttctcaggtgacattttaattaggttccccttcagttttgttgtaactaaagcattgaaagtcatctgacttgcagaatgatttgctgcaaggtcattagtcattcactttctcaacactttttctcgaaagaattttgagttgtacctttgtttggtcccccagaaatttttataccccaaagcaactcgagatgagtgagaggtatgaattccatttgtaaagtgagagaaaagcatttacgaaaaagggactctcttcagattcctgagaaagagtgcaaatgaaagctgagaatctgaaaatttccttatctctgccaactagagcccatggaaaatctttgagtaactctgggggtactatgcatcacagtctgaaaattattatatgggatgtactttctatacttaaattaaatttccccatggaggcagcattgttatacaggtgacaatgagataacaatgcaaagaaaccagaagtcaagttcatatcgacttatatagctctgtctccataagtcagaaacaggaaaaattaacttgttcttcagcaatctaggttgacttcatgaacgagctggcgttcaaatgaatccttgaattgtggaaacagaatgttaaatctggaatgaacttcagatatcatctagtatggagaggacaattaaatgttgacttttacatcaatttggattaaatatttgtgattgcttacaattctgtgtcaagaagtagtcagaggaatcatctgagatctgtaggaaagcatgttgtgattgattagctatgcctgtcagaggaagcagggagagaggggcacaggtgatctgctcttgcccccctaggtacatagtccttatcacatgaaccacagggaaaactgaggctgactgagagcaggaagcttgaccaaaactccacagtgaattattgccaggatgggtagaattacatatgttttattcaacatttggtggtcattgtaaatttggtaacatttgcaactggaaaatttggggatgttttagagctggaagggagcaaattcttaattgagcaatacacgctgtcctttctttcaggctccttcacatttgatctctgtgcaatttgataagaggagggaatgggccgtcaattatgaagagactgaaaacctgaaaatactgagtatggtcttagttccctctccaaagggagctcaggaaaaatgccaagccatacaagccactgattactcatctagctattgtttctacctcaccctggcccaggaagacagatctactgaggaaaggtaatagaggctggcaaggttcctacttttacatctatctgtaatatccactcattcttagcatcttgcacatccacagggccgtacaggagtcttcttgccttgtattattgaatcttgggataggggtaggaacagacagaggtatt

SEQ ID NO: 42621 - DNA, 2300 bp, Homo sapien
caaccgccgggcgcggtgggattacgcctgtaatcccagctctttgggaggccgagacaggtggatcatgaggtcaggagatcgagaccatcctggctaacacggtgaaacccgatctctactaaaaatacaaaaaaaaaatagccgggcgtggtggcgggcgcctgtagtcccagctactcaggagactgaggcaggagaatggcgtgaacccaggaggtggagcttgcagtgagccgagatggcgccgctgcactccagcctgggcgacagagcaagactccacatattaaaaaaaaaaaaaaaatcatacaaccaatctctacgtattttaagtcacattatttcaaggaaagaaaaattactttgtgagtatgtacactaaagaatctaattttatttttgtgacaaaattagtgtgagatggttgtgatactctgaggctagcagaaatggagactctctactgtgagaatcacattaagtttgtatttaaagcacaattattaaaccttctgaattatctgcagttaaaattatttacattatacaatgtatatgactatcaaccatatgagaataacatgtggaatctgcatgaatttatataatagaaatgtaatgatttatgatcattttgctccattagaagatataagaagaaaaaaaatcaatagatctcattcattcatcagctcacagtgattaaggatactattgcataacagatcaggtgctaagtgctgggacacaaagataaattagacgtgttcctctacattgtaaaggaccctaaagttcatctaatagtcagtgatggaacagactcagagagtggtctatttgctcaagatcccagaactagttcatagcagaactaggtaaaaattcaagtctcttgactcttaactttagcctgatattgaggccaaatgacagctttaattacgacagagaagtattaagaatgtcattttggaaaattcaaagtccactagaggaaaactcatttcagttagaggctgtttcttgcaatctatttctaattcttggtcttaggcctcccatgtgtactgacagctggtaatatatttgggtctttgaagaaagcaacaggacctgtttctttctacgcactaactgtggctaagcaacaagacctactctctactggcaacagaattggaacccttaacttcctgtcagccacagcccacactggatttccctagaattttctagaagcaaatggctaccacaggaagaaaaccatagaattcagctggaaaccatccaaatttcctcatcctaagcttcatctccagcaagcctcagtcaaggagacccacaccacaaggctatgacataattcttggttgcctgccaaaatagagaaaaaaggatgaaaaggaagagtttttattgcaaaaagacagcttagggaattttttcttaacttagtgagatggaatcctgagacaaagatttgttagagataacttgtgtaggggtattaaactcaacagagataaagggagatgggtgagtaataagaaaaataaattaacccttggtgttttcttcaggcaatgctgaaaacacacacacacacacacacacacacacacacacacacacacacacacaaaaaaaaaaaaaaaaaaaaaaaaaaaaaaaaaaaaccttatgcccaccacatcatcatttgtatcttaagtaaatgcttggggaaaggggttgagccaggaaggaagaacaggtgttgtacatcgaaccaagcctaaatatttggtatggaacagttgaagatttaagattgtaactccagaacttctgatcactttttttgtattgttaagggtagcaactgagattagataactcacttgctgaaggaagcacattcttggctctgtgcgacattcactgtgccatgagctgctagtgcttactgatacccatgtgctctttggcatttcccagtctcccttgcacttgagctgaccatgtgactatttctgaccaatggactgagagtagaagtaatgtggtcacttctgagggaggtagttaagtatcaagtgtgactcccctcaactcttcgactccttcctgcacccctgcagctggaagaggaggcttggagatggtagaaacataagatggaaggggtctagatggctggatgactgcttgaggagagttattcaagactgctacttagctgatgtcagactctgagtaagtaagaaacttttgtaagatacataaaagtttaactgtaggaagaaaagtcattt

SEQ ID NO: 42622 - DNA, 2300 bp, Homo sapien
ggtcttaggcctcccatgtgtactgacagctggtaatatatttgggtctttgaagaaagcaacaggacctgtttctttctacgcactaactgtggctaagcaacaagacctactctctactggcaacagaattggaacccttaacttcctgtcagccacagcccacactggatttccctagaattttctagaagcaaatggctaccacaggaagaaaaccatagaattcagctggaaaccatccaaatttcctcatcctaagcttcatctccagcaagcctcagtcaaggagacccacaccacaaggctatgacataattcttggttgcctgccaaaatagagaaaaaaggatgaaaaggaagagtttttattgcaaaaagacagcttagggaattttttcttaacttagtgagatggaatcctgagacaaagatttgttagagataacttgtgtaggggtattaaactcaacagagataaagggagatgggtgagtaataagaaaaataaattaacccttggtgttttcttcaggcaatgctgaaaacacacacacacacacacacacacacacacacacacacacacacacacaaaaaaaaaaaaaaaaaaaaaaaaaaaaaaaaaaaaccttatgcccaccacatcatcatttgtatcttaagtaaatgcttggggaaaggggttgagccaggaaggaagaacaggtgttgtacatcgaaccaagcctaaatatttggtatggaacagttgaagatttaagattgtaactccagaacttctgatcactttttttgtattgttaagggtagcaactgagattagataactcacttgctgaaggaagcacattcttggctctgtgcgacattcactgtgccatgagctgctagtgcttactgatacccatgtgctctttggcatttcccagtctcccttgcacttgagctgaccatgtgactatttctgaccaatggactgagagtagaagtaatgtggtcacttctgagggaggtagttaagtatcaagtgtgactcccctcaactcttcgactccttcctgcacccctgcagctggaagaggaggcttggagatggtagaaacataagatggaaggggtctagatggctggatgactgcttgaggagagttattcaagactgctacttagctgatgtcagactctgagtaagtaagaaacttttgtaagatacataaaagtttaactgtaggaagaaaagtcatttttatccatgaaaataaaagatgcctaagatgtatgttttcaaattatattgggatttatatatttcactttatataaactcaaaatcatcaacatatgcctttgttcacttgcttctctgaacttagaaagtctgtaaataaatgtaatgtcaaaagctgaaaacacccaaagctactgtgatttgtggattgttacaacagttaacgagaaatatacatacactaaatgtgttctcctcattttcttgtgtgtactgctccaatctttttcagatgtaactgcttccccaggttaaggggagagtaactctgctccctgttctgggataaaatcctctttggtctcttggccattccctttgccagtgactggtttaggagtagagatgggactcaatagttacactttctgggggcctctgaaaaagattttcttgttcttacagaaaagtcacagattgaaattgctcatttctgaatagaaatggagatttggagggagaggtaatgcggcaaaaaactctaaagtggttgcttaataaagtgaggtaattttcattgtctagtcaaaatgccaacataccaaatatggttgattggggccctgaaactgaggacgagaagcaaggggaaagagaaggtcccaagaacactgtggtaagcagggattgacagagaaatatctccctaaggagggcaatggcccctgacctattagaataataatacctgccccctaattttaaattgtttcatgtgtcataatgtccttttgttattgcagatccttgtgcatacaactgacttgtgtgggtgaggcttgcagaaaaaatcagctagaacagccttgggggtagtggcaaggtggccagagcaattgactgggagctgggaacaggaatgaagaggaagagctgataagaaacatgcccagagcaggtaagcacctctatccctccaatcttcaaaagcatgccgggcgggcggatcacacattaagttggaatgtaaacagaagtaaaggagtatgaagaacactatagcaaggag

SEQ ID NO: 42623 - DNA, 2300 bp, Homo sapien
gattatggggactacaattaaagatgagatttgagtggggacacaaagcctaatcatatcaactgttttcaccattttctcccagatgtcacaaggcccctaacccagcatcctgtctccctttttatcccttgccatccatcttccctgatggctgtcagagtgacctcaatgaagcacagatctgaccaacccacaacctagattaaacgtggcaatggcttcctaccacccttaaggcatcttcatctccttgtttttacctgctaagctcttttccttgagtagatctcatactcttgctacagcctctgcctgaagaccactttctgcatttagcaatggtttaatccattctgtaggcttatgtttagatgccatctgtctttgagatattctttgtataactacatccctaaggaaatcaattgctccctcctctgtgctcttaaagcacaaagctgttaaaatactgataattttacgctaactaggctgcgctagattgtaagctcactgtgagcaggcaatgtttcattcatttttccgtcctatgggtacagcacacagtataataaattgctataaggaactaataataacagttattgaataaacaaagaaatatattaataaacacttaattgttcttttcaaatgtaactgtctgattttttttctctctttaattcaagtaggatagtttcatatctaaaagagatttctaaaatggtaccccatggttggcaaccagagagataaaggtctggctcctggcctcttatataaattgttgcactgattttgagaaagtgagttagccttttgacacaacagttttctaatctgtaaaatggacacaataattttatgaacttatttcacagagtcattaagagggtttaatgagataatagctctaagacacttagcatagtatctggcacgcagtaagtactcaaaaattatttttattttcttctccacaaagccctccttgcttatgccaagcctcagtgatgcctctctttttctttcttgtgtggatttatttacttaatcaatattaattgaaggtcccatactcatgacatatgcttctctaaagtgctgtgagatatatgtctcacaattattcgctgtcaattaatatttattatttatgtattattagattagttacatatatatcagtggagaggaccagtgttgcccgtaggagcttactttctagtatgggaaatgagataaaatatacaaaataaataagatatatagaatacatgatggaggtaagtgctatggagaaaaagaaaacacgagagggaaacagaaaataaacgttgggataggattttaattttaagaaaaggggtcaggtacgtctttgctgagaaagtctcatctgagtgaagacctgaaggagatgtggaaatcagccgtgtaggtttctgggggacagaatttcagacagaggggacagcaggcaggctagtgtggccagagcagagtggcagggatgggggtggggtataagtggtgagttcagggagggaacagggagtatggtcctgtcagttgttttaaggtctttggattttactctgaataaaacgagaggcctttggagagctgtcagttccggaaccacaagtctaacaggtttattaggatcacactggtgactgagttaagaccaggctgtatggggcaaatacaaaggaagagcctccaagaagtaatctgggtgagagaagactgagagttgcagcaggctggtcacagggcagatgatgagaaattgctggatccaggatgtatttgggaggtaacacaaaccagtttgccatcagattgggtgtggggtgtaatcaaaagaggctttttgttccgagcaacgggaaagatgaagttgccatgaactgaaattggggagtccatcagaggagtaggtttaatggagaaaaatggggacttcaattttgaaaatgataagtttgagacacccaaggagagatagcaagtatgctgttgtatatatcaagctgaagtttaaagaagtggtacagaatagaggaaatttgagctattggtatgcaggtgggatatgaagcatgagacggaatgaggtcaccaagagagtgaatgtatataaagcaaagagggtgtccaagggctgagttctgagatacttcaatagcagaagatgatgctgagaagcagaagccagctaaagagactgagaaagtgctggtggtgaagcaccaggaaaatcaacagatcatgtaagatgtctcaga

SEQ ID NO: 42624 - DNA, 2300 bp, Homo sapien
aaatgagaagtaaaaatcttgtgctcccactgctggtctgagaattgaataattcccagttgtctaggaatattcaaaattattgtatacaatgacttaaaatccccctggaagacatgcagtttctaaatgcctaattgccacaactgaagtaaatcagtagtcatggtccaacctctattggagaggaagggggattttgaatgatacaatttatgttgttcaacatagctctctttttatccaatggcaaccttttacagatgacttggagttgcaaaaagtcaaagatttgcttaggcaaattctttattcatgacattgtgcacccaagattttctttcctccagccagtctctggaaacacatttagggtattgtgctattttcattttatgactacagaaacagagttcaaacgttcttagtctaagactattcagcaacttctttctaaactaggaaggtatgaatctgagatctcccattttcagaaagcttccataatctttgcatatatcgcattccagctttcatagaggggatgtctgagtcatttgctcatccgacaaatcgtcatacttttgccaacaaacattcttccttggttttctctcttcctgaagcgtgtagcaatgttcctagctctcaagaaagatctggagcagctcggaagataagagcaattgaagaagaaagttacaatttagtggagttaattttatcgcagactttcagcacgctattcacatgcaaacttcacacagaatatttttatcactaccttattggaatagattggtaattaatagcttgtaatccaccattgctaacatgttttgacttattaaacacttggacaaaataaaagaagatctgttttgccataagggggagcttttgagttctataaagagggggaaaaaagaagaaaaaaatatattacatgtatgtcccagttcaaaaacagacctacaaagcagcaaatggtcagatccttacctgtgactttaacaatttcagaggacctgaattgcttaagttgaaaacattaggcaaattaatatttttctctcattttcttcttataaaattaaaataatttctaatgaccaacagagtattttaaagagtattcggggaaattcagagacccagttgtactaggactacagcttctgaaaggcagatgtcctggacagtgcctttcttctattttcttctgatgattccataagaactttggaaacatttgggttagctgaagccagccttatctgggggctcagaaaagaggggaatggttcatcatcgtacaactttaaggaaattctgagagggaaaaggacagggaaaagaagagggaaagaggtaaagggagaggaagcgggaagaagagtaagggagagagtgagaaaaagagaaagagagggagagggagggagggagagacagagagagagaattaaaaaaaaaaatctaagaatcaagtttcaagactctttatgtgctacagaaaaggatgaggtttaccagcaaagtgcaaaggggatcctaagagaagagacagatttttctcctgccatcagaaataataataataagtggggggagtgagggagggaaaaaaagcaagcaaaacaaaacaaaaacaggaatgtgtgttttgagcaggaatgagagctgggaggaccgtaagggggtgtgtacagaatttcattaaattgttactttaagattgtctccttaaaaaaaaaaaaaaaaaaagagagagagagagagagagaaaaggagggggtggtggagaagcgggagcgaaggaaaggaggcaaaaggcaaagtgaaggaaagctggatagctcggcctctccaaactgattgattagtcatgatccccgcagttttaacagggactcattcaattgggaaggtggagcgctggggagcagattagcatacgcttgtttactcatcttctgagggattttttccccctctttcctttcattttgagaagaaggagggaggggaggggggacttggggggggagaagggggctgtggcttgtgttataaaggacgcaaaaaataaataaattagagcatcttttggggggagggaattcagcggatcagtcttaagaggagcttttttttggagcgagaaatcatataaaataaaatgaaataaaacaaggaggaaggcaaccagctgttaggggaaaaataaggcagataaaggagcggggagagaaattaattgccaaccaggaggagttgggctgtatttttcaaaggtg

SEQ ID NO: 42625 - DNA, 2300 bp, Homo sapien
aatttggcctggataatataagctaataaatggaaaaaaaaatccaaaacatggatatgcagagagtgtgcaaaaagtggcaaagaaagagggtaataaaagatggcaaactacaaagggagtttcagcagttttagtgtgattgtatctccatattaaaaaaaagagagagagaaaggaaggaagaaagaaagagagagagagaaagaaaagagagaaaatatgagacactttctcaaactctgcagcctgctacagtaatggtcagggagtcaagggaactggagattagaatagatgccctgatcaaccctatgactttggacaagtcactttccctctctgggctgcagtttccccttgtatagaataagagttaaatcaagtagctttgtgatcccttttagctgtgtcactctaagatatatttggttcttgacattttgccctttgatcactaaatcagttattcagttaagaggggaaacatgaaaaaaaaaaaaagatggagaaacatgatcagcaaaatgaagatcgagaagcgtgtagatgatgaacccattctgaaaaacatgcatagaactataacgaaaagcagatggaataaggggccagaaggtaaagtgtgtgcctcaactctgttgctaacttactttcatggtaccagtaacatacatcatcattctgcatctgattctttttgcttattaaaaaaaatgacagcattattttcctacccattttcaaaagtgggtgtaaagataaagtaaaataatgctgtgaaaactaaaaactactcaaacataaaaactataagctgtgttgttttcacattttacttttgcagatacaatccagacctcatctccccaattatcaaatggcttttctaattttttgtttaggtcttagctcaaccattaccttctcagtgaggacttttctaaacacactatcaacaaatagttttcaccttcactagagtgtctataccactagtctattttattcccttcatagcatgatctcacttcttcaaatgtttgcttgataattgtattctctctaaaacagaatggcaactccttgagagcagaaacataggctgttgtgtgcattgttgcagtcagatactagtacatagaagataatcagaaatatttgctgaacgaatgaacgttttaacactgcaaggttctctagacattctatatgattctaattcctgtgcttctctgtataaagtggcaactgaaacttagaaagattaagtaactcactgaatgctgcataaatgttagaggtcaagggttctgactggctgattaaggcttattatacaaatattgggaatattcaatgtcaaataaaaattgctctgtgagaaatgcatgtttgtaagcattaagtaaaacaatgcatgcaaatgaaagtctatatatatatatgctatatatatgctatatatatatagctatatatacatatgctatatatatgccatatatatgccatatatatgccatatatatgctatatatatgccatatatatgccatatatatgctatatatatgctatttatatgctatatatatgctatatatatatgctacatatatgctatatatatatgctatatatatatgctacatatatgctatatatatatgctatatatatgctacatatatgctatatatatatgctatatatatatatatatatatatatatatatatatatatgtatatgcatatctattctgcaatccagtaaaacaagcagcccgtcattctgatagggcatgcataagagtccagcaaagaaagaagcttggacaagtggatgctatgtctaccagtgggccaaggactcgaggatgagtcaggcaccacatgaaaaccaagccagttaccccaatctggcatagctggttgtgactaaggtgaccgcagcatgctatgttcttggcagggctcccatgcagaaaccagagtgttaaaatggatccctcccaccctgaactctgactggtttggttcacctcaaagaccatcctcctgctatatggtttcgataagtctaaaaagatgagccattcaagccacagtgtcttctatctccaagctggtgagacacactgcagtcctctacagaacagaagagagacagtgcacaagattgctcttgggtaagttttctttttcttatgtaatgaatgggttactcttcagcccttagaataaaaatactataataacttaaatctatatgttctgatttgtattgcttagctg

SEQ ID NO: 42626 - DNA, 2300 bp, Homo sapien
aaacttagttatgaactagctctgatccacagcttagcacttgggaaccactgcactggtttgtgtctttggaccataccagtgtttacatctggaagtatattattaaaggctgtgtgcaaaaggcaatatataaccaagagtgacatatgctttagctccccagaactttcttataacatgtaagaaagtttttcagtttttgcatatgcaaaattagatactttcaggaattaattttgtagaggaatcgatatatattggataaaatcttgttctatcattgattgtctaattccaggccccagggctctctccatgttagcgtgtatatatgacagccctttatcattccgcaacacacaaaaaccacacaacaacacactgaagcgtacaagctattatatattttcataatatagaactttaaagtatagtaatcaacagtggcaaaatatttctgtctctgacattattatttgtgagatccaacctgtaattgagatcagagaaaacagtatgggaaaacaaatccatgagaacaggataaaaatatcatgaacagcaaaatatgtctgagtatttaaaactgtatagaaaaaataaattagatgaacaattgtgtaaatataaattaaaaaagatgacattcttaataaataaagtttactatttacatttttatatattgccaaaagatttaacttagatccataaaaacacataaacagaaaaaaaaataggagcagcaaatttatgcgcgtgaggtacagaaaaaggattggaattgtgtttagtttttggtgtttagattattttctttgtgtctttcttctttttctttttttttttcttttttacaataggccagaagaattcttatgagaacagcttttaagcacttcaatggagtgtcatttttttggtagcttccagaaggtgccaaacaggtttcaacatcatattaattagaaatacccataataattataacaataataaaaaggtataatatggtacataaatatggaagagcagtttgtaatatgaatacattttctctagacgagatcacagttttattttgtaaatattacatttaagtatatatatacacacatatatgtacaactatatatacatgtgcatatatatgtaaatttatatttatatataatatctttatatagatagatatctgcagacaggttattgattatagagacccaagaaagcaactcaataattgttcaaagttttcctcactgactgctggtgtgtagtttaagaagcccccatttgtttgcactcagaatgccttatcttcttttaatggaacacttgatgtggaattttaagtctgagaagtgaggtgccttctgaagaagagattttagagactcccttcctctataagttggaaatgaccagaagtcttaagtagacgacagttagctgactttgacattgtaggacataatcagcttttaaccaaattatagaactggtaaagggtaagatcaaatttgccaaaaaaataaaatattctccaatacaggtctctcttttaaggtggactacaattcaggagctccggctttattccttgaaatatcaaacaagcactccctgtcttgtctttctaaaaggccgatgggcctgtgcattcttgaataataacccatggactttgtgtcaagcgttggccctcacagcccacctaaaacctcagggcctcaaaatctcctgccctcccactgtgaggtaggtatatagtattatccccattttgcagctagagaaactgatgcaaatgtagaggcaattggataacttgttcaagatcactgagcaaactgctgcctggagtcaaaaattctaacttctgtacaacagggacataatttctcttttggctattatacatttcttttaaaaagcaagtgattggtaggaatttggcaaaagttgaataagttacaagaacaggcttttattcatttgctatttggtttttatgtttcttgtttacttcgtttgatttgtttctcaaaactcactcagtgggattacctgtctgtcatgtagcagctttttaaaaaactggactgtgcagtgtggttctgagtgcagtctttataaagcccagtgctgtactggtaaatataaacattttataacgtgaaaagcacaacgacacaatatgtccccttaatagctggaaaaaccaatataagccctcccactccctactaccactgattgccaccaaacaaataaacaaaatgcccaccccaccc

SEQ ID NO: 42627 - DNA, 2300 bp, Homo sapien
gagagagagacagagagacagggacagagaggcagagagacatagagacacacagagagagacagagagagacacacacaaaaaacaaacacagagaggagacacacaacacacagacacaaagacacacactcacacacagagagaggagagagagagagaaatagagaaagagaccaagagagaactacagccagaaaatactcagaaagactgaagcagaaactgagagccacagtgagagacagaggagaaatggagagagaaagagagagacatagataagaacacatagggccaaagacagagaaccagaaataaaaatgcagaaaaaagacaatcagagagaagtggatagaaggtcagagacctagaaagacagatagaaatagagagacatagacaggagttggtgaggagagagagagagaaacagagaaaatcggggtcagaaagaccaagaccaaggcaaacaagaaaaacagaaggaagaaaggaaagaaggaaggaaggaaggaaggaaggaaggaaggaaggaaggaaggaaggaatgaatgaatgaatgagggaaggaaggagagaaggaaggaaggaagatggaaggaaagaaaaaaggaaggaggtagaaaagaagaagagaatgaaggagggagggagagagggaaggaaggaagatgaaaggaaagaaaaaagagaggaaggaaagaagaagggaaggaaggaggaaaggagggagggagggaagaaagatggaaggaaagaaaaaaaggaaggaggaagaaaagaagggaaggaaggagagagggagggagagagggaaggaaggaagatgaaaggaaagaaaaaaggaggaaggaaagaagaagggaaggaagaaaggaaggaaggaaggagggaggaagggaaggaagatggaagaaaagaaaaaaggaaggagaaaggaaagaagggaaggaagtaaggaaagaagaaaggagaaaggaaggaagaaggaagaaggagggaggaaggaaggaaggaagggcacggcaggaccagctagaagggcatcttctggagatggatgcccttgagtgaccagggaagctttacttctggtctcaccgctactcggggcagatgatctgggaggaggagggggggagagtgagagggtgactggcatttccattcagctcccctcatctatccctcccacccacatatagaggttttcactctattaaaatgactcccttgcttcctcatttatgttaaaattttccttgaaataaagaaaaggaaacaaggtcacccttcaatccacaatgaaaactataaaagcgtttttaggcttggaaaatttagctggtcagtttttcctactgtttaataactgccttgggttacactgaatgagtaaacatgttttacaagcttctaattcatacctaaccctatgagttcacagctttacataatatatacacacacatatactatatatacacacatgcacacatacatactgcaatgtaaaatataaacacacatacatacttaatatatatatgagtgtgttcgtgtggtgtaagtaatctttccaatttgtgcagctcattagggcttacaaagcacgctctttcctcatttaatcctcacgataatcctgtgaggtaggcagtttaggattatcatccccagtttacaggtacctgtggttaaggtagagagaccaagaacccacaggtctctaaggcatcacagtccatatcacagttctgctctccatagtcccaaagctgacttcatgaacttgggtagtgcagtgcccacttctggacctgcaaggacccaaaaccatggggatcctgaggcatcatctgtttcagggcttcattgtacagacaggaaaactaaagctcagactattactgctagcctatagggtgcctctgtgcaaattggaaaaacaatagaaaaataaaaatcatctctttcttaagatacttccctcccttgttccaatattctgatttgttagaacaagacacttgatcaatgattaatacatgtttatgatgtctacaattggaatggtgagctttggaatgtggtagcattgtgagcagcaaaacctgtgcgactgcatctgacatcgccaggatgggggcccaaccaaggtgagggcaaagaggacggtaagggagaaagaaagaaagaagggaaggtaagatgggagagacagcacctactttctgaggtctaagaagaaaacccattttacttaaaggacattgagataataataataactagtg

SEQ ID NO: 42628 - DNA, 2300 bp, Homo sapien
cactctcctacgcaatggaacccacaggcatctttcaaatcccacaaacacacaaaaatcccacatgaaatgtccctgctttaattccatctttccaaatggctttctcttatcactacagtcaaaatcattctctctcttctacaactccacatcaagtgttcagtctgtcccctgtaatacttagcactctgactcttttatctcagaccacaaaattggaagttctacgtgaccagatttacatccatataacgtctctgggcataaactgtgaactgtgacagatctgggtttcaatctagcttccaccacctgctatctgtctgcttcaaagcacagtatcttcatctgcaatataaacctgtcaattttaccctgtattatagttttaagtattactagcaataatacaggaggagtatctggaacatagtgccagctttaaaaaacagttactttgctgttgtcatgagtcacctatgggattccctatgggatcctgtgctgggtctggcctggagtggtcttcagaaaatgtagcttacattactcaactgaagctcagttgctctctgaaaacagtgtgggcaaggtggggattgggagaggaaaagggagagaaaataagaatgcgtccaacagtgctgcaatataaggatgttgttctgctcttttactcgtgaaagaaatgaaggctggcagatctacagcaactttaacactcaaaaactcattccctcctcctaatatccctgagagataggcaggaattcctgtccctgacaaatgcagaaagatccaacctgatgcaggtgggttgggacaaggtaaagttagggcttaaactctcctgccctttagaggccttgctgtaagactctgctgcctgctaggagaggaagcagtcttggctcccgttatgaatagatgtcagccttttggcacaatgcaacccaactgtcagcctaaaggaagccgcatgtactcagggaaaccctgtctgctctgcctttcacaggaagccaggatgtggagccaggagagaaggggcattcaaagggcctgggagacccttggtgaaaacaatcagttggtttcaacatcccagagagattctcaatcagggtgagtctcaaatattagtagacataaaaatcacctggggagagtgtaaaaaaataaaaattcccagaaattctggttcagtcattttggggccaacctagtcatttgcattaatcagcatgcactccctgatgattctgatataaatgaatcacatgttgcaaaatgctttagcctgttccctaatctaaatcttatctctctcctctcagcctggtctacccctccttcagaattaccttttactgagaacactgagaaaatcaatgtgcatatcccattccctttattctgccatcacccataatttcttcctgtcctgtttcatctgggccgtatagactaggagagggatgtttgagagagtaacagcaaccttcaacctctataaaaccagctcctgcccttcctgactccttgggactcagttctatcagttactgtatttcctttcctctggaattgcttctcctccaatctttcccatttgggggactggccccaacattcagagtcagtggtcttggttaaaccctctgtgcctatatccgctctgcccactgtcttttcctccagcaccccctacaacacaaacacacatcactcataacccatggatcccacctctcagtacctccatcctcactgccatcattctagtttagtcttcatttctcccaaaaacactgtagttcaataaggctagaaaagacagtatgagagggtaagaaatcaagctggagagtgcgggagcaggaacttttagtctcagattctcaggaaataggaagaactgtgaagaattgtaggggaggtagagaaaaggaaaatgctatctagccaaatttgtagctctatccataatgatatgtccaaaagattctgaagtagcctgccacatatacatatacatatacatacacatatacatatacatacacatatacatatacttaattgcaataattttcagataaagcaaaggcatccatgaagactttgcttccttcttctagtagctcacagagaccaaagttggcacacagcactctcctaacactaaagactctacaactccttcttcatgggatgtgtgaaagcacagagaggtgagtaaggtgtttttttagttaacttccttcccatgcctcatatctgttacatagaaaggg

SEQ ID NO: 42629 - DNA, 2300 bp, Homo sapien
gactcactgcaaggagacagcttcgactccctatgatttcatccctgaccaacagcgctcctggctcactggcttcccccaacccaccaagttatccttaaaatctctgttccccaaatgctcagggagatgacttgagtaatcataaaactccagtctcccgcacagctgactctgcgtgaattactctttaactattgcaattcccctgtcttgatgaatcagctctgtctaggcagtgggcaaggtaaactcctcaggtggttccactgatataggtgatttaagtgttaaataaaaatctgttacattaaaatgctgaataaagagtgtttaaagcactccacaaagattattttttaaatgcctctgtgtaagaggaattctaatattgtgccaggatatgtcaagctataagataaaaattgagtgcatttcctagaatgcttattctactctaagattttgtgagaggtataataattcatttaactggtaataaacattaaagaagagtcaaacactgatttttgttttaagggagaagagagatttttttttttcaagacacttgcttgagctagatccccaggagtatttttaacactcctctgtaattagggaaacatcagtatgtctgtattgatacatatacacacatatataatatgtatatatgtaagactatgaacagtcctaaatttatactttgggctgataactgtggttttcaggaaaaaaaaaaattttaaacgggtgcaaagtctccccaactggtctaagtgagaaatcatttggcattacctctcccttatcccctacctgctaattacaatttttcaaatatagttatcattaagtgcaaactaccataatcttggcttatcttcatggcaaacttcaattagaaatttagaaaatggggagaaagagtaaacaaggttaagagagtgggttctcagatagaattgggtacaaatttgggctccaacacttaggtatatgtggccttgtgtaaccacctaggttacacaacaggtgtaggttaaccatcagctgccttatctcattaggtccttatgaggatttagtgagctatgcacctgaagtcctcagctgtagccagacagcaagtgttcaaagatgttagtcattgtttttgtttattgttttatcattgtgcagggtcacatagctaaggggaatttcaaatccaagtccatcctacttcaaactcctttgtgctcctaagctgtacagtatagtcaccttggagagtaggtgattggccccaaactacttcagggactgcaggtcgtggccagccagtcctgtatcagacctcgtccttgccagatgcctagtgccccagattccctcaaatctcaggccagatcacctcccacctggtaagattcctccaccttcacccgagcaaaactacacttggtttgggttcccgggtaccttcagtctgcagggacaggggctgcagagtgtactccccaagtctgcctctgctgtcggcctcccagctgagtaggcaaaacattcctttacagagcaatgtgttcatggataaacttgtctctagtgcagctctctgtcagagcacagaacatgaggccaaagcactgcccttcctagggagtcccggttctcgacttccccagaatggaagtttgatttttccgttggcccatttctcagatggaaaaacagattcagtaaggtgccaacgctttgctgaggactaccctggaggctaccgttttgtgaaggggtagacattgagactggagtcagatacgcattctggcttatctcctgacttactgagtgaacttgagcaggtccctttcgcccatgggcgtcggtttcttcatctgcaccaaggagacggaaaactggattacgtgtcgctaaggccccgggttctcagaggaaagctcacccctgcagggccgccttgccccgcgcgcttggggccagctgcacgacaagccccagcatgctggggaggcggggctcagtgacggacagggagctctgcgaattggcgcccggcaaggggtgctcaacggcgcgtgcgcagagggaggcaggcgggtgggctgccggcggtggactcgtcggagccgcgggcggtcaggtagggggcgggaaggagggttggggactggggaccgcggccggagtcgtgggccgtggctcagcggccaggcgggggaacgtgccggcgtgcagcggccgcgcccgaatggcagggtgtggggaccggatctggggggggcaggact

SEQ ID NO: 42630 - DNA, 2300 bp, Homo sapien
tcacaacaattctgtgacattggtcttgttatcataaccccattttacagatgaagagccaaggcactgggtggttaagtaactcattcaaggccacaaagtcaggaagagatagagctaggacttaaagtcaggaagagatagagctaggacttgaacccagggtatctgactctaggtcagagtgcctcaactttggcattactgacattttaggcaggataattccttactgcgggggggaagggcgtatcccacacattgtcaaatgtttaacataaaacattatgtttaatgtttaatctacccacttgaggccagtagtatcccccaccctgtgacaaccaaaaaacatctccagacattgcctaatgtctcctaggagacaaagccagacttggttaagaaccactgctttacagtctagcacaggactaaatgctcaatacctaagggttcccttttttttttctggtggttgttgttgttgttttgtctgtctccgagcccaaacacctcactcacagagccactgccccttcaagctgtaatggatcttatataggataaattattccactcattcccctggaggtctcactttctatctgctatcgtagcttgggggtacagggaaaaagggcttaggcagatgaccttgaatagttccacttcttcttccccaaagcctaccactttcagtgggccgggggaccggtggtcagaatggagttagtggcaataccatacctgcctcatgataacggatctttgtttaataaatgaagaagattctgcccttcacagggattaccacactccttcaggattatctgaactgaagatttatcactttgttcctcagcacctgaactctgctcatcttcatatactcatccagtttcatacattacttttaggtccttgggtcccctgaactccctctgtctcccatgcagcgatttaaggaaaatctctttagcagcccaagacaccaatccacaaatctactcagggtcctttgattttatagcccagttaggacatctccaccccacgattcaatcctctccaaaccctgtccccaaccctcttacaattccaaattccaatctttggggctgtatattgcaaccctcgtcaattcctcactcatatgccccaaatccctcggactcagatcgtttaatccctatttccaaatctctgccacactcagccccgcacctcagttcaacgccccaattcctcaccccagatttctgctctccctcaatctgagcccccatctcctgcattccatcgggcactgtgctgccctcataccctgctccttcctcttatgcactgaatgtcatgtgctgccttcacacctcagccagctcccttctttctgctaacaagatagagtccctcaagaactcaccccaccccctcaatctcaccctcagcccactccgaaaaccctttctcaatagcacttaggatcgccctagaccttgctcctatcatctcagaccctgtccttgccagatgcctagcgcccccagatttcctcaaatctcatcggggccccccagttccttcatatttctgaaattctgcacccaggtccctccagggccctgattccctcccatctcccacatgctacaccccgttcctcctcagggccccgacattacctcatacctcccgagatgctgcaaccgcaaatctcttcagagcccctcgctcccctcccccagctgcatctcctcggatctcctcagccccacgaatccctcccgagcctgcccctcgcagccccacccccaccctagtcctgccccccccagatccggtccccacaccctgccattcgggcgcggccgctgcacgccggcacgttcccccgcctggccgctgagccacggcccacgactccggccgcggtccccagtccccaaccctccttcccgccccctacctgaccgcccgcggctccgacgagtccaccgccggcagcccacccgcctgcctccctctgcgcacgcgccgttgagcaccccttgccgggcgccaattcgcagagctccctgtccgtcactgagccccgcctccccagcatgctggggcttgtcgtgcagctggccccaagcgcgcggggcaaggcggccctgcaggggtgagctttcctctgagaacccggggccttagcgacacgtaatccagttttccgtctccttggtgcagatgaagaaaccgacgcccatgggcgaaagggacctgctcaagttcactcagtaagtcaggagata

SEQ ID NO: 42631 - DNA, 2300 bp, Homo sapien
aggccaggggatgggggtgctcactatctatcattgagattaaagtcctggctccccacgccattcaaccgttgctcccatggggaggggtgtgttcattttaatttttttcattttctgtggtgtttggctggagtagagcacttattgtctagcatttttctgtcttgctaggttgtccttttcccggtattttggctagggagagcagttttgttttgttttgttttgttttgttttgttttgttttccttcacatgtacctactggcatttctgagctgcaggctcctttagctccaagaataggacacatgaggcaaagagagaatccagggaactgaccaccatgtctttccttgggtcccaaaggcttcagctggtctgcaatgctccacctttcagtcttatgcttgttttatataggacatccagggtttttggttgtatttagccagaaaaatagagaaaatgtgtctactcctccaaagcctgtttttgcacagccctagagctaagaatggcttttacattttttttttaaaagaacatgagacaaaaaaagaccacatgtgacctggaaagcctaaaatatttactatataatccttcatacaaaaaagttgaagacccgtgacttcagccatgttaaggcacctggagtttattctaagtgcaactggaaggcataggagggttgttggcagaggaataaagtgattttgtttgctactttgaagagattactgaagttagtgaatccagttatctctaagcaatttcctagagtccacaaaaggagtctggggaagcaggctctgtgcatctgggcaggggcttgagaaagggagtgagtcagcctaataaggactctagcatgtggaggcgtgcctctttgctgaggttttatagtaagtaggtgagaaagcggggagtctaacccaggtcagtgcagctccagagactcatatccctcattctgctctatttcaggggaggactcataggaagactctgagcccaagtctctgagccttgagattttgaagacctagcggggagggagaggaagatgcctggaggattcccataggttcctcccacaggctagccctgctgggctcccccgagcttcttcctccatactgtgaacctgctctttgctgcttcctagctcgacttttcatcatcaccaagccatttgtttctgtttgtaattatgcattttaatgttcattaattatggaatgcaaattgctctgagtacaaaatttgtaatgagctgttttaccaccccacccccaggtctagaaggtgggccagctgttctgagcagaaggaaaaacaaccaacttacaaaacagaacaatttgtcctagggcctgagtgaatcatatggtaaataagcctgggggacttcctgctgatgctggaggtggggccctgccccacctgggtcctgggtgacatcagtgtggcaatttcattctttgctacaaacttgggcctgaaaggcaggtggggtaaaggaacagcactagtcttagaaccagccttttactggctatgacaccttgagctagtcccttggcttgtctgagcctcagtttgtccttctggaaggtaaggattatgatgaaattatcctcaaagtaggggtggcaggcaaacactagcaggccctggataaatgcatgtgaatggctctccagattgctggattccagttctgcctggctgtgtttttttttgttttgttttgttttttgagacagagtcacgctctgtcacccaggctggagtgcagtggtgcaatctcggctcactacaagctctgcctcccaggttcacgcgattctcctgcccaagcctcctgagtagctgggattacaggcatgcaccaacacgcctggctaattctgtatttttagtagaggcgggggtttctccatgttggtcaggctggtctcgaattcctgacctcaggtgatccgcccgcctcagcactcccaaagtactgggattacagctgtgaggcaccgcacccagccaaaaatttccagttgctttcttttctttttgagatagagtttcactcttgttgcccagactggagtgcaatggcacgatctcgactcactgcaacctctgcctcctgggttcaagcaattctcctgtctcagcctcccaagtagctggaattacaggcgtgtgctaccatgcccagcaattttttttttttttttttcagtagagatggagtttcaccaggccaggctgatctcgaactcctgacctcag

SEQ ID NO: 42632 - DNA, 2300 bp, Homo sapien
atatgtagttgcaaatagcatgaggttgttggcatcttgactcatcctcagtatctttttagatgaaacaaagatgagaggagattttttttttccctgaagcctgcataaaataagtttatctggcaactgatactttcttcagtatcctaaattctggcatgtgatatctgagtgtttattcttgtttttatatttttaacaatttaaaaaataaaacttttaagaaaaattaaaatataaaatttgcatagtccctaaatctctgttaagtaatacatttccatggacatgatttgaaaacttttgggtcctgtctatcagaatcactgtaggatccaagggtgacaggtttatctctctgtgtgtgtgtgtgtgtgtgtgtgtgtgcgtgagagagagagagagagagagatacatacagagagagatacagagagagataatgagataatgtgattacaagaagatgagaaagaagacaagccaacatcattagcctggaaatttaccagagcaataacagatagttaattattcattcaactcacattgttaagcactgaccctattctaggcagtaagcaaagtcagggcggttcctactagcatttccctagaggtgttccatagaattataatcctgtgagtcattccaccaacaaggctcccaaagaaaaataagttggtgaaaattgtgtatgtatcaccctcatggagaatcacactacactggctttgaggaatggggtggtattacccaaacacatttttaaatagaatctgtttttggtacagcatctttaagcatctcacaaataaaccttggagaaaaaagcagtaactcattaaatcaaaaaatatttctaggccaggcgtggtggctcacacgtgtaatcccggcactttgggaggctgaggtgggcagatcacttgggttcaggagtttgagaccagcctggtcaatataacaaaaccccatctctatcaaaaatacaaaaattacctgggcatggtggtgcatgcctgtaatcccagctactcgggaggctgagacgggagaatcacttgaagctgggaggtggaggttgcagtgagccgagatcacgtcactgcactccagtctgggtgatggagtgagactctcagtctcaaaaaaaaaaaaaaaaagaaaaagaaattctataccttaagtatacagtagagcagatatgacaacagctgggagtaggacagagagattctgaaatcacttctaggattctggactctgaagatatgctaggaaattggacatatgctggccacttgaaatgaacttggccaatgagagaatatacttaaggcagtgtgtaatgctagcaagcattcatgcaaccaagcgtaaggcatggccagaaaaaaaaataatggatggttggatggatggattgattcatgaatgaatggatggaagggaaagaaatgaaaaagaatggcaagagagagggagaggagaaaagaggacaagagaagagatggcagtagaaggaaggggaggagaggaaaaataatttaaaaatgaaaagcaacacaaaataaaaccaggagactacagacaggtttttctgaaaggggaaatcaaaggtttcttggagatagcggcatttaacttgggatttatggatggtgaagacctattcattcagatggagataattcaattttctgattatacctctagagtaaatgcattttatcataattttaatatttgaaaagaagacctccatttgtagccacctgatcacttcctgtttccctgtcttaagttgtgagctcctttagcggctgggttgcaactttgacctctgtatctccagtgctgagctgagcacctgtacgagtgtggccaggatttgttgaaggaataaatgagtgaatgaacaaaggaataaactctgttaaccacagtggttgatggacaagattaccctctttccatgtgccttttctaaaactaagcagctcactttatgtcttaggaaaacaagcaaaccagagaaaagcctatttggggagactctacttaacaataatcttttttcttttcacttacaggagagtgcagctgtcatgaaggctatgcccctgaccctgttcacagacacctgtgtgtgcgcagtgactggggacagagtgaagggtgagtggcaaagggcatcaggtccaggacagtgcaggacccacttttacctcctctgttctgttaccagaggccccaagcatctccacaaagaggactctttctctgcaacagt

SEQ ID NO: 42633 - DNA, 2300 bp, Homo sapien
gttctgtagaggaaaaaaaagattcattgttgttttttaaggtgatatatacataatcacctctggtatacacatgcatttacacatatatttaatagattctacacacacacaaacacacacacacaaatacacacataaatacacgtacttatagctttgcttgatttgtgcatttgtttttatgttatgacatccagagaaactttcttggggaaaccaaagtagctcactgctgaactcaaggcagggcttgggcccctgctacagagctatcagccacacctgcatacctggccaccacctcttagtcctcttatccacccagtccccctacctctgtggaggtgctgaatttcagcatagtgagctgagggtcttgcaaatagaacatgccagttttctaatatcaaatacagtcagcaggatggctgacccatttcagcaaacagtgttcttcttggtctaaacaggtgtgtttaacagcagccacctttgcccctaagataatgtattcacagctaacatctgtcatctttgttagatgctgtacagatagttgtcagaatttgtccttgccttcaatgagatcatagccaaggagaagccatcaaccacacaggtggattgaaagaatataggctctagagttaaaaagcaaaaacaaacaaaataaacacacaaaaagtaaggctcagatattactctgccacttgctctctgagtttctgggtctcttgattttttgaagcctctctctaccctgtatacaacaagggtgattcctcctgactctagggattacacagcaggcattcagcaaagtgtcttccaatctcccaaacatgaagcagagtataaagtgaagaaaagcaagagaagtgatgagggcctacccatcagaggagaggtttctggcacagaacaattgaggggaggcctggagaatgcaaaccctcaacttcaagctcatgacaggtgttatggggattacagacgtgttttgaaaatacctctgccctgaaggatcttacagaccagagtatttcatgaatcatgtaagatatgtgcattaacacattagcttatttcaaattaatgtaggataatgcagactcaaatatttaggagctgagtgtatcaaagaaaaaaatgtatatatatacacattatatatatatatatcagttgaccttgaaattcttattaaaggagccctagaaaggtacattttcattcactcatttaccaaatatttgttaaggacctactttgtcccagttcccttatagaaattcagaaatttaaagactggtgtttctgaaaaatgaagaaaatacagactatgcagacattatgtttgatttaataatgctatcttatatttgcagcaagatgtaagacagcctactactgtctcatgatctttcagttaactcattctagagatgaggaagcaaggctgggggagcgtaggcaactgtccttgggatgctcagctggtgggagatggagtctagattcagacattcacctgtgtgaagccgcagcactgacccttcctgccactgagctatctgtattgctctgacatgaccgttatccatctgatttgcttcctatggcaaccttgtgaagaaggaagagcagggattcctactcaacctttataactatggaaagcaaggctcagagaagtgaagaagtttgcctagggtcacatagtttgttggtgaaaaagccaggtttgaaacaatgtctctctagcttaaaaaccacggctggtggttcctgaggctctatgagccaaacccagggatcctggcagagtgtagtggacaggaaaatcccctgcagccctcgattccaaagaacagtggcccatttgtgtgtccttccttcctgctccagggtggcctcatcgcgctgctgctgctgctgctggtgttcaccgtggcgctgtacgcccagcgacgttggcagaagcgtcgccgcatcccccagaagagcgcaagcacagaagccactcatgagatccactacatcccatctgtgctgctgggtccccaggcgcgggagagcttccgttcatcccggctgcaaacccacaattccgtcattggcgtgcccatccgggagactcccatcctggatgactatgactgtgaggaggatgaggagccacctaggcgggccaaccatgtctcccgcgaggacgagtttggcagccaggtgacccacactctggacagtctgggacatccaggggaagagaaggtggactttgagaagaaaggtga

SEQ ID NO: 42634 - DNA, 2300 bp, Homo sapien
caggcctttgtactagaggtccatgaaggacttgcacagactctgccttacataagggagcccttttttcctggtgtgctcttctgtaaatggactatgtcagcatatttgaagaaaggggcatagagaatcagaaagccccattgcggtggatagtggcggattgtaaggacacaaaggagagactgagggaggcagggtgacatattttggaggagtaaatgaactagagcaggcatcagagaggcaggagaccatttagaattagaggacttgaaaggccagattccaccccaacctccacacatcctttgggttcacagattagtaaactgagacaggagaagtataccttacaaacctcacagggaagtagatccaactgtgcttatgcagatttaccttttacagcatctttgatgggtggggttttccaaggtcactgaggacagtgtaatttaagggaaacagtcaaggcttgaagcctactgttcaaacctcagctcttcagctcatttgctatacgaccttggaaaatcccttcacctccctgaccacctgatctcagtttcctcacatggaaaatgggaatcataatatccatctttttggattatggtcatgtaaaaaagctaacatacgtacatgtctagcatttggagaatgctttaaacacattaagtccaaggtcgcaaaacagcttttgcttttttccttattttcagtgctctgcctttatccaacgttattaaaaaatatatgatgagagaggagaaaagcaatttatatgaagggttaaagatagaaaaggggaatgagacagaagagggaagagctaagagaaaagtgaatgcatagagacagcacaaaaggtgcagatgggtaagctagacagagatgagaagttgctcacaaattataggaaagaagcatttgtaagattaaagtcaagatgagaaggaaggaaatgaatggagagatgaaacagaaaacagagacagggaagatgaagaaaagtaggggagtggggaaggggctgcacggcacttgacccatgcagaggtgtccgctccctggagggtctcaggtatgtgggtcagagacagagtcagcccaagaccaaagggtgctgaatctgaggacctagctcaacttgagtctagaaagactgcaggtgaagaattggtgagcactcccgttctctgggacttgggcagaggatctaaaagacccgggagccaaggacagacagaatagtaggtctctacctcacacccttttcaggaatttcacacagagagcagaagcagccaagtagagctgctccaagctgggagcagggatccaaaataaaaaagcgtgagtgggctggcttgcagggcggcagctagggggccagaacagcccggcttcagtcagttgtggggtcggcgttagacggtggagttcgacgcccctctgtccattagcaattagtgctagcacaaggcctggatggaggggagaggaaggtttgcgggcagtgggagaatgaatgcaggagttgtggccaagtgggtgggaagggggctctgaggctacaggaagttatttcagagactagaaaagggtaggagattggagaaaggacttgttcttgggcctgaggggagacaaagttaagtcttggctatccagggggctccctatccccaagaaggcggggccttgagcaaggctgggccaaggcgcgcccccaggtgcagcctctgggttgagccgaaggtggggtgaagccaggagaactgggttgagtcaggggggcttgggggggcccgagggggccctaagtattaggaatttggggagtttagggaggggtgttgtggctaaagaatgctgtgagggcggaattgggggatcttgggaaaggggagggagccactgggacttgcacgaggccgggcggagcctccgaaacgctcggggtctgcggggggagccggagatcggggacgggcggctgggccccgggaggcggcgcgggggggcggtccagggccgatcgggaggcggagcccggagctgggggctgctggcgagcggctctctccgctccttagctcgggcgtcctggttcgcttcggcgtccgccgtctccgcagctgcctcctcttcctccttcgccaccgccgccaccgccgccgccgcccgcagcaccgcagcccctcccgccatggccgccgccggcgcccggctcagccccggccccggctcggggctccgggggcggccgaggctctgcttccacccggggccgc

SEQ ID NO: 42635 - DNA, 2300 bp, Homo sapien
taaagaccattttcaaatatacacaagtcagagaggcagcgtgggtgggatttgagaaagaatgtgttgtttttctctgttatcattattatttactaaccttttattcaagcactgtaatggaagatcgacaaaacaactctcatcccataatcaattatagctggaagacaataaatagctattcaacgtttctttcatgttctggaaaaaatggatatattgactgcctttaaagttggggcccttccatagacgctgggtgggctgttgtaattggctcttctaatcccataatctttatgagcttggcatagatgaacataacaaaaatcatgataaaaacaataatttactttggtgttagctgttagagtttgtaaaacaatggcataggcattatgaaattgaattatttcaactgccctgtgagatagtaattattttccccattttgtcaatgaggcaactgtgattcagccagactgaacttgggccagcattcccctcactacatccaagcagcagcagcctaacgcatcctctttctgcagatgtacagaccaagtctaaatgaggtggcacacattcaacgagggtaaggtaggatgggtacaaaatgcccacagatgccccaggaagcagaccaagagcagggaagtcatttggaaacagaccttctttcaagttctgacttcactcttactagatcaaaagctgtggacataagacatgactttttcaaactttagttttttcaactatacaatgaggataaatgtgcctgccttttgagaagattaaatgagatgaaattaaatgaaatgaaatgatgtaaagtgtttagtatggattccacacatgctggttgttattatgccacataccgtctacatgaaccatccattccgagacctcttattttatttttttatttttttatttcttttttgagacggagtctcactttgccttgtcacccagactggagtgcagtggtgcaatctcggttcactgcaccctccacctccccaggttcaagcgattctcctgcctcggcctcctgagtagctgggattacaggcacatgccaccatgcctggctaatttttgtattttctagtagagatggggttttgtcatgttggccagactggtctcaaattcctgacctcggtgatccacccaccttggccttgcaaagtgctgagattacaggcatgagacaccatgcccagcctcctagaccttctttcaaccaatatcagacacaagggagagagaaactgtattatttatctattgctgcataacaaattatctcaaaatgtagcaacttaaaaccatgataaactctgccacctttcatagttatgtgaatcagaatttaaggagaggcttatgggtgatcatggctcagcatctctcaggaggtggtagccaaaatgttggcctgggccatagtcatctaagggctcacctgtggttggggtatctgtctcccaggtggctcaactgtcaggtccatgatgactgctgtgaatggccccagttcctggtcatctggatttctccatagggctgtttgctgaattccttcacagtatggtggctggctccttacaaaaagagccatccaagagagcaagatggaacctgcagtgttgtttatggcttatcttaaaagtcaaaccaccatcttcacaacatcttacaggtgacattggtcagctctacccagtatggaagtagtctgcacaggggcacactatcaatcaagtagaataacaaagggcaatcttggaagctggctgctgcaaagcctcctcctgcaaagcctgcaaatcctgctcctactctagactcatagttttttactaagaatttgttttgggaatgcctcagtctttttagttaaatggtcatgatggggtaacattggcaacagaccctcagaaatcaaggtgtccacttcataaagcactacatggacacatcagaaaaagtgtgagatgggcaagcgctcctaactgaagcatcaaggaccaatgagtctacaggacccactgttctctcaacttccaatgcagcccttcttctgctaccttaccctgaggacttggacattccagcgtatcgcagaaccggaattcagctcccattgcccacaacagtgcttccctgcctcaggtgggtcctcagaatcattaagcgtgcttgttgagtttaaaaattccagggtacctcgtggagagacttactcgggaggcttgggaggaaggctgggaatctgtgttttg

SEQ ID NO: 42636 - DNA, 2300 bp, Homo sapien
ttattgagcacctactctgtgtcaggcactgctctaaaatctttacatgaataatctcaatactcagagcaaagctttgacatggaggttgtttttatcttaactctactggtgtgttgatggagtctacaagagtttgtgcccagtccaccacaaaatggtccctcacagcttggtttttgacacgttggattggaagtgcttggaggatattacagtagaactatctaggacttagcatgcataatattcctgttttaaatcaggttcttatttaacagaaacttacattgcacttgctactttccagacactgtcctaaaagctttacaaatgccagttcatttaatcccaatacaatactttgagatacatattatcatcttcattctatccacattttcaatcctcatcatagctctcatttatggaatgtaatgatgatgctctagactagacgttttacgtaagttagcttaattcagtaattcaaaacacatgcgattatcttcgttttaaagaccagaaaactaaaggttggtaggtttgtataatttgactaccattgcgtatctttattttaatacattttataaatgcaagcttctgctatgattaaaagtgattaccacattttacagaccagaaagtaataataagtgttggtgaagatgtgaaaaaatgagaactcctgtacaccatttgtgggaatgtaaaatggtacagatgctgtggagaatcatatggtgggtgctcaaaaaattaaaaatagatttaccacatgatccagcaatctcacttctgagtacgtatccaaaagaattgaaaacagagactttaagagatatttgtacaaccatgtttatggcagcattattcacaatagctaacgtgtggcaacaatgcaagtgtccatgaacagacaaatggataagcaaaatgtggtctatacatacaatggaatattgttcagctttaaaaaggaaggaggctttgatctatactacacagaaaagaaccttgaggacattatgcaaagtgaaataagccagtgacaaaaagatacatactgtatgattccacttctaagagctgcctagagtagtcaagattatagagacaaaagtagtgcatagattcaagggcctagggaaaggggaaatggggagttatttattaatgaatagtggtgatgattgtacaaaaatatgaacataattaatgccactaaattgtacacatacaaatggtcaagataataaattttatgttatgtcatgttatgttatgtgattttaccataatacagaaaatgaaaaaagaaaagaaagaaagtaaagcttagcggtttacatgacttgaccaatgcctcaaagccatgagtcacccagctgagatctgaacttcagtatattccattctgaaatcccagacttttcccaatcttcttgtacttttcaaactgtgtttcagttgaggtttattttcagttttgtatgtgagtttcttcacaagaaggggcgggccaaattgtgtcctgcaaaaacctacatatcgaagtcctaacccctctacctcagactatgactgtatatggagagagagccttgaaagaggtatgtaaggtagaatgaggtcattatggtgggccctaatccaacataactggtgtccttataagaaggggagattagaattcagacacacttgctgacaccttgagttcagactggaagcctctagaattgtgagaaaatgaatgtctgttgtttaagccacccagtctgtggtatttccttatggcagccccagcaaactaatacaaatagtgtttccacagctgaaacaaaattggaaaatcaccgtcatcctagagagttacaagggctattttaatagaacctgattgttttcctaaattcaccaagcccaggcagaggtcagatgactaattgggataaaagccaactagcttcctcttgctgtttctttagccactggtctgcaggcgttttcttcttctaacttcctctcctgtgacaaaagagataactattagagaaacaaaagtccagaatgctaaggttgccgctttcacttcctctcaccctttagcccagaactgctttgaatacaccaattgctgtggggcggctcgaggaagagaagacaccagtgcctcagaaactgctcggtcagacggtgatagcgagccacgcattcacagggccactgctgctcacagaagcagtgaggatgatgccaggatgatgtctgcctcgcgcctggctgggactctg

SEQ ID NO: 42637 - DNA, 2300 bp, Homo sapien
gaccacaacccatcttgggagattgattacaaggaaagggttaagaagaatcagtcagaactttggtcttcacctgaagttgcctgactacgttgtctcagattgatttcagaactgcattatcagcagggcagctgttgcctactaacagtcatggaagtagatctcagctgggggatgatggggaaacaaagagaaagatagggacgaataaaggaaggaatggggcacagacagaaagagagagagagaaaagaaagaaaggaggagaggcaagagatagtgacctggggtttcataccgcggtgggtgggagaaggagtgtgtgtggtgggcgtatttcttcgtggtcagaatcaaagtcagaactgacctggggaacctgtgttcaagacctgaacctggaccagaagccaagggaaagagaaagttgcccaagaaaaaagggagaaatttccaccaggcgaaaatagaaatcgctgactgggtttgtggctggagagctgtccgtggtgctgactcctcctcattgggattccagtgaaggctgagaagctctgcactggctgctcctcctctccctttcctctcccctcagtcctgaccttctgagacccaggatcattctggctagctcgatgtcttctcctctctttctccctttctctttgtcgattaaataatttttcccgagttcccagttcatcactcaaacatttctcttccattttgtttcaagactcctcttcctccaattagttcactggctcctagattgttctaggcctccctggtggtcacatctctctcttatcatcctttgaattaaaaaacaaacaaaaaacatacaatggcaatcataaaagcagacaacatgcactgagcactcactaggtgtcagggagcagtctaagtgcctttgcatacattaactcatgagcagtctaagtgcctttgcatatattaactcattacaattccacatcaaccctattagatgggtagatatattattattctattaaacagacaaggaattgaggcttaaggggtaagtgatttcaccaagaccagacagctacaggactccaacctctctggagcctgcacttctactgaatctggctcttttacatattccaacaccttttcctatgacttcctgcccctccatctggtagccttaatgctttctattcttgcctaatcttcaggggactagggatctgcattgctgatttggtttaaatcagaagggaagcaaagtaaacaaacataccaaatgtgcgctgtgtgggaattatcatacgagggctttattttctgcttcaggaagaggccctatgttagcagccccagcctgcattcaggctgattgcagagtattttgctttttattttcatgtcttagtccctgtaccctcgccccttccccgcctctggtggtctccagagaacttcgtgtcccctcagcttctccctcctacatcctgcctacgtagagaagctcttgcttcattctgggaggttacgtgggctctcgcctacacaccgagagaaacaaacagtgtcaaacactcacagagagacgcgcagacacaaacggacccacacgggcaactcccgagacaaaacccacactcgatggatccacgcggccgtggaaacacctgccgccccagaaacactcaggtactcgcgacacacacagtacagtcacgcttaagggcaccaggattccgggtttgcgcgtatgcgcggtccctttggatgctcgtgcgcatagacacaacaccctacacgccccagacccacgaaactccctacggctcagccccagcccacccgggccgcccttccctcgaggcggcctcccgtctctcctcctctcgcttctcctcctcctccgcctaaagatgtacaaaacactcctcggaagcaaccccggcgttcagctcctccctccccgccccccggccgccgctcccccattcattttcggccgtcgccggctaagtccctcccccggcgtagcccggcctccgccgctccccgcccggagaccgcggcgcacttggacttccctctccattcgccagccgcctcgctcccggaccccacggctgcaaactgatctggcgcgcggggaggaggagagcgcaggcgagcgaacccgcgagagagggagagagcgagcgagcaacagcgagagcgagagcgagagagccgggaggcagagggagtagtgaccgccttccggagccgggattcatgcctgtcctcgggaccagcgaagggga

SEQ ID NO: 42638 - DNA, 2300 bp, Homo sapien
attgcaatgaatgtcctgggcagagctaggaaagaagtgagcagatgggcagaggcacaggaagtcagtttcaaaactttccctcaaactcatgagatccagccagcaactgcctgagaacttggcacatcagggcaacactcaacagtcattttcattttgaaagcacagaaaaaaatacaagaaaagcaataacaacaaccaaagcaaagtaatatatgaatcatttgagaataattaagtagtagttttcttttgactaattacaaatgtatttagagtttagagaagaaaggtcaaatgagccggagagattaacaaaaccctccgggatgagactggatttgaagtgatcttgaagaataggaggggatattagaaaaagtggtaataagctttacaagtgtaagggataagatctgaatacatatatacactattacaacaggaaaataccaagagaatacatttcaggaaaggtaagaaaataagcaaaggcacagaactgggactcaacgtggcttgtttgggaatgagaagaataatcccaacaacactggtgagcagaggacatggggaggtgtctggagggatggggtgaagttaggttttggagacagtgaagtttggacttacctagaagccaacagtaagatttattgacagaaaataggaaacaggggagtgacaatataagagcaggattttaagaaaataattcttgtggctcatgaaagaggaattggcattgaggggctggcttggagattgctgcagaaatccagccagaggtattgaagacctacaacacatggttagaggctcaaaaatatccataagctgaatggttgaatcctggattgaagaatggctgcagaaatggagataaaatgtcaactcagagaggcaatttaaatgaataggtgtcacgtctcaatgacaaattggatacccaagtgaataattttatgaaatatctctctagatgtatatgtgtaccttaaatgacttcctatatacttttctcaaggaaatgatatataattccaatttggaactagatttcactttaggtctaattcaagcaacaaggattaaacgactgacttcctaatgcaaatttttgctccagccaatggcaggaactccaacataaccagtgaggaagttgttcatgatggttctcatccaatttggcaggctccatcacctcaaagtttcccaaggaactcaccaaatctgggttatgtgagaagagaatttggaaaggggatgcccttttcgagagccttcctagatattgtattgtcacattgaaacctcacatcaaccctattgatatgacacacagatcttcctgtttaacggcaaagaaacagttacagaaagaaagtgagaatgaggcagggccagccagccaggttgtggatgcacataagatccagtttgctcttctctaaacacatacttttccctatacaattcagggattatgctttcaaacccaggggcatatttattctttgattcaaagtggcatgctgtaaataactctctctttccaagtgcccagacactagtctttataaataaaaagaaaaaaaaagacatgactggggagttccctgtaggacaagagtcctttctctagcgtgacttgatccaaaataaagtctaaaaagaagcttttgttcaaaaggatgctgttagaaatgtgcacctcttttcttccaagctgcatatgcacctgttcctcagtcacctttgtgcattcctcttctcaatggatgtgtgttctgaactttgccttgattgattccagaggattttatgtttagacttagctcatggctggatccaggggaccttgtcttacttctcttctagggcatcatctattgaattgacctgtatcatctgaaaggcagcaaatgtggtgatgttttgaatgcagcaagaccatctctgctgtctccataatttgcttcagcttcctatttcctcttccaaagaatcctaggatgtaatcgccatgatgtagaggaaggaagcaggcaaagtgggcacagaaacgcgggctacagcacatagccagtgcaccgacaaagagtggagctgaataagaaagcatatctaaagttcctcaggtcttatgaatgctgagcttctatcagaacatgtgtcagctgcagcctgccagggagcataccaggctgaggggcaaaaatgcaatggctactccctaaatgtaggatggaaaggaaaatgtacatacctttgctggtgagtgtgtgtggtgt

SEQ ID NO: 42639 - DNA, 2300 bp, Homo sapien
aatacactgtattacatttcctcatgatcccattcccagtgaaatgcaggagcagcttcaaataaagccacagcatttacgcaagagaaccacccatagcccttcccatattccctggtgggcacgcctggggctcacaggctggaatgagttccagttggtgtcatattatttactagatctttcgcgcagctctcaacctcaggtctgctagtgataataaactccattccgacacagcaacagctcagaaatttcttgtcacaattttcaggacaaaatgagagctcctacatgcgtgggaactctgagactgttcagagaggcctatttcaaggagtttatcaatagcagaggaaagatgcaaagggaacaggggaatttttacaccctgcagaggaccaaccaggccaatacacactcaatgggctcagtaatcagagagaccagatggaatctgaatccgagagacaaattttcactcggtccctactcagtagccaacccttgctggccactgaggttgcaaaaatgactcagacagtctctgaagaagactctcacatttgctaaccatgtgaccttgggaaaggtactttacttctgtctctgcctacaagttcctgagctgtaaaatgggaataagaattgtatttgtctctagggattcttgtggagcgcaaatacgaaaattcatgttaagtgctagcccagggcctggcacatatggttgatgctcaataaaagccaactaccattaagattattttgtagaaaaacatttagaacatggaggagggtggtatgagaagggcagggagacagggaagcttttctgaaagaggacatacacctgagctaaattcggggaaaagagaaaaaggcaacctggtagatatggaggaagggtattacaggtagatggtgtaagcaaagtcaaggaggcatgaaagattttcacgtgtaaagaaggaaaaactggtatatgtatttgaatgataaagttcaaagtaggggcaaagtggcaagaagtaatgcaaaaaaggcaaacagagtccagaatgtgaaaaatcttgcatttcacattaaggagcttgggattgttcctttaggtacatgggagccatagaaggattttgagctgagagatagcatcatagatagacattcatactaacatgagagtgactcatatgtcttcaaatatgacctgccactttcttaggaatatttgctactttatgaaggctaattcctttgatgataacaacaataagtgacatttagaaaatacttaccatgtgaaaaggacactttgtttttattaactcctttagactcacaacaaccctctgtggtagattgatatcttaccaccatcctactcttttttcccaatttacagataggaaaactgtggtactgcaaagattaactaagcagtggatctggatttttaagcccagaaaatctggctcccaagcccatgcacctcagcattgcaccacagtgcccttgataaaagaagtcagtctagatccctaaggaatcgccacactgacttccacaatggttgaactagtttacagtcccaccaacaatgtaaaagtgttcctatttctccacatcctctccagcacctgttgtttcctgactttttaatgatcactgttctaactggtgtgagatggtatctcattgtggttttgatttgcatttctctgatggccagtgatgatgagcattttttcatgtgtcttttggctgcgtaaatgtcttcttttgagaagtgtctgttcatatccttcacccacttgttaatggggttgtttgttttttcttgtaaatgtgtttgagttcattgtagattctggatattagccctttgaactagaaattccatttgacccagccatcccattactgggtatatacccaaaggattataaatcatactgctataaagacacatgcacacatatgtttattgtggcactattcacaataacaaagacttggaaccaagccaaatgtccaacaatgataaactggattaagaaaatgtggcacatatacaccatggaatactacgcagccataaaaaatgatgagttcatgtcctttgtagggacatggatgaagctggaaaccatcattctcagcaaactatcgcaaggacaaaaaaccaaacactgcatgttctcactcataggtggggaattgaacaatgagaacacatggacacaggaaggggaacatcacacaccggggcctgttgtggggtgggggaggtgggaggg

SEQ ID NO: 42640 - DNA, 2300 bp, Homo sapien
cagtgccgtgggcgccaggaatttaaggagcacggaggtgcagtgccgtgggcgccagcagtttaaggcgtggggaggtgcagtgccgtgggcgccagcagtttaaggagcggggaggtgcagtgctgtgggtgccaggagtttaaggagcgtggagatgcagtgccgtgggtgccagtagctttttgcagacaagagtccttctgtgctgtgctgcagcgagagctacgacattccaccaaattacttgccacatttctggcattagcaggagatagctgaaggtctgggaattaagtcatctcataaacattcaaattcatggtaaaattactatttaattaggaaaagatctgtaacactgtgctacttttaaatgaaagtcattttggaggaattaaaactgggtcataacattagtgtaatgttttaaaacaaacattactaagatatactgagtataccctaattgataaattaaagacattagttttgcctttggatacttaatgtgatgatgctttaaacactgattctagaaacctacccctggattggaattgtgctttcttctttctttgttaaagtgagatgtggcagaggctgaacaaatacatgctcattttggaaaatttaaaatgttgtgtattattaagtattatgttaaaatgtaatatagaatttttgaaaaatctaaaatctgccacctaaaggcaactgctattaatatttagatatatttccttctttcacatatttgtgtctttccttgtctgtacaaatttttaagtagagttctgtgatattgtgaagtatatatttagtcttccttgcagtatccttcataatgaaccagtaaacataagcaaatgtttccctgagtttttgagctggtctagcaaattaatccaaccccaggaggcgggtgagggaaccgaatttttagtcagttggtcagaggcacaggtgaaacaactgggggcttgcgattggcctcagaagttgttggaggggcagtcttgggactgagcctcaacctgtggatctaacgctatcttcaggtccaactgaattagaggacgcccggccggtgtctgctgcagaactgtttgcttagtctgtgggggaaaaaaccctcacatgtggtcacagaagtcttctgtgttgattgttgagtgagtgtatgggagaaactgaattttttttttctataagttgtgattatgttatcaatcttggatctaagatttagtatattttttatgatatatagtcttcataacataattttaatagctatgtaatactgcatcatcatgaatgtactacagttacatttggagttacttcagttcttatggttacatccagtgctaaggtgaaccttttcctccattctggcaaacgcttgtcagcatctctggtggtctctttaaatagagtcctaagagttgaattatttggtaaaagacattggaaaataacttttctaaggctaagtatagaagtagccccaaaaggtcatacacatttatactcatgctaataagatgttctgttgagatcacttttcttattaccattctcactagcattgttttgctttatttaagtcttaaattagtaaatgataaatggataacatattcctttcaaaaaattagtctcgaaaatatctggattcattatgaaggtagtttaatcaactctcaggcaattcaagcagacttgaaagtgatctgttagtttcaccataaggaagattttaaattaatatttgatatttggaagaataaaaggctacattagagttagcattaaaattgtatggaatataattttttctatgtgatgtaaaatatcttcctcatggagggctgcagagaatcattacagaagtgtgtctgtgggctgtgggaaatagctcaccctccccatgcctaggaaagaattgccagttgctaaccatcttaacacatccaatactgtttggaatttcaggatccctgcataatccataaattattcaatttgttgggggttcagactttaaattaaaaatggcttccttcctgtagacttactaatggaacacatacaggaaattcgaactttgagaaagcgtttagaagaatctattaaaacaaatgagaagctacggaaacagttggaacggcaaggatctgaatttgttcaaggtaaggaaagaccttcctggaggactgtacatgtctgtgagtgcttcactgtgacgcatttgcctgagtaagcatctgtgtacaaagcaggtgcttgataaa

SEQ ID NO: 42641 - DNA, 2300 bp, Homo sapien
ttattgccaaacagtattccatagtatatccatgtggatatgccacattcattagttgatgcacatttgagctgtttccacttttggttattagaaataatgttgctattcatgtacaaattttgggggtgataatgtttttatttctcttgagtatatacctaggagtagaattgatgggtaagatggtaactctatgtttaatctttttgaggaactgccagactgttttctaaagtgcctgtaccctctttacattctcaccagcagtgtgtgagggttccaatttctccgcttcatcaacacttgttgttgtcctttgattatagccattctaataggtatgaagtagtggtattttattgtgatttgatttacattttccttggtgactaatgatgttgagcatcttttcacatgcttattggccatacacatatctcctttggagaagtgactatcagagtttttgctcatcttttaattggattatttgtttttattattgagtcgtagtatttctttaaatatagcctggatttaagtccctcttcccagcttttgaatgtttaaaattccccagttggaagagacccccatttggcctcttaagttattgtttatatgttcattccacaaatagttgttgagtacctactgtgtactagttcttatgctagaagctatacagagagtatggccaagatatgcaaagcctcttaaccctggagcttacaggttggtgcagaagatagacaaggaacagataattgcacaggcatttaattaaaatgatactaaggttctctgaggggatatgtaggggacagtgagtgtctaatagggagccctgccttggtcttggaaatcaagtcccattttcctgaggaaggcccatttgagttgagttttaatgaatgctatttagagttagtcggggaagtaggaaggagtaagtgttctgggcaaaggagtcggcatatgctaaggtcctgaggtagaaggaaggcattttgaggaaccaaggtcattgttgctgaagagcagggtgaagtggaagggggtataactcaggctgtaggtcctgcaggactttgtaggctgtggtatggatgttgacctttgtcttgatagaactggaaagcaattaaaatagttttaggcagaagagaggagtagtaggtttgtctttttgctgtagcgtggacagtggcttagagagggcaaaagtaaatgtgtggagaccacccaggagactgttgccatgacttaggtgagaactaacagcatcttggagttgagtggtagcagtggaggatgagaagagttgaaagaatggagagacagcctgggagttataattaatggaccctgatgagtagtgaaagtgggtggcaagaataaagggaaacttaaaaatcattgccatggttctagattgtgtagtaaatggatagtcatgtgattcaccaagacagagattgttgaagtggcgtagatttgcagcggagacacggggtgatggagctgaagagtagaattttcagttgactctgtagtgcccgtaagtcactacaaatgaagatgtctgggagttctgagcctgggaaatatccgctgggttggcaacttagtagccaccaaagtaaggggtggttctgggggactagcaggggttgataggccagaccagattagactgaggaatgtttgggaaacaaggaaatagataaggagcaaaataacatttcccagaagatcaggttggaagaagaactgccatttatggagtgtctggattgtccagagagacgataggccagggccaggagggtggcgaggagaagcttggctcttgatgatcagaggagggacctgccaagatacaagctccttggctggtggataagcatagctgccattatgggaacgagaagtctgggcagccagttcgaattccgttttataaggctggcatgagaatgttgactgtgcaaccaaaggaagtgtgttcaaagtgtattcattgttgcatatgtgtgttttcaggaggctaagaagtcccgcttgccaatcctaataaaaccatcccggtcattaggaaatatgtatcgtctccctgccacccaggaggtggtgacgcagctgcagagccagatcttggagctgcagggggagctgaaggagtttaaaacttgtaataagcaacttcaccaaaagttaattctggctgaagcagtgatggaggggaggccaacgcccgacaaaacgttgctgaatggtaagcaccaagaaaaatg

SEQ ID NO: 42642 - DNA, 2300 bp, Homo sapien
aactccatctcaaaaaaaaaaaaaaaggtgatctgccaaagatcacagagttggtggcagagccagggtgggaatcctgacaccccaacttccctgcttttggacacacctatctcatgggttgaacttactggcaaggagtattggttcctgggcttcaaggactgccccgttcctgaggcagtgcaccaggtgtgctaagctttccctctttttcatgcttttatcattgctaattgtgggtgtggttgaagatctagagaaagaagggggacaggcaaataatcgcgggctttggaagcctaactaaagctgagagagagacagagagagagagagaaagagagagaatgaatatgaatctgggatacacagaattactattgacagaggtcctaaaagtatctctgattattctcacaaaaaccttgcaggataggtattggccttatttccagactgattgattgaatcactcattcatttaacatacattttcaaatagctgctgagtggcagacatagtgctaggtgttgaggatatagcagtgaacaattcagaatatagtccctgccccatgcagcttccagtctagtgcaaggaaagacatttaaaaaatgattttacacacacacacacacacacaaattgcaaaatatggtaagtgccacaaaggaataatttgcattgctaggaatacaagaagtggcttgatttagattaaatgactagggaaggcttcttttgaaaagtatcaataattggttaattacttaactgaagaatgagggcctggtgcagtggctcaggcctataaccccagcactttgggaggccaaggtgggaggattgcttgaggccaggagttcaagaccagcctgggcaacatagtgagaccctgtctctatttaaaaaaaaaaaaaaaagaatgaggaaacagggtgaaaggggaattgttcaagattactgggaaagtcactatctatccactcaccaaccatttcaagttattttcatcgggctctctcacaagggcctgcagaggaaggagcaacactgagttgaggaggggaaggttaatttcattgcttaagctctgccaagattatctaagtgtttggtgattgctatgtgctttaagaaaggcagccaaggggccggtgctgtggctcacgcctgtaatcccagcagtttggaaggccggggtgggcagatcacgaggtcaggagattgagaccatcctggccaacatggtgaaaccccgtctctactaaacatacaaaaattacccgggtgtggtggcgcaaggccgaggcagaagaatcgcttaaacccagaaggtgaaggttgcagtgagctgagatcgggccactgcactccagcctggcgacagaggcaccatttcaaaaaaaaaaaaaaagaaaggcagccagggttatgcagagagccctcatctagttggcaggagctgcagacccccactccagttgaaagacattgtcaatacttaattactttgggagagtcctttcctcttgctggccctcagttttctgaccacaggtgcctttgagtcctaatggtaataaaagaccaataggtgagagactggagtgggagtgctgttgaccactggctcatgggaatgagttatttgcttcaaactaagtctgcaaattactgtttgccttgagattccgcacgtagtatttttccaaagcaaggcagcactcagttatctgagtttcaacttaaggtcaaatcccaaagttttggggtcattattctagaaaagcaaacacgaggttaggaactttgaggattcctgagtggctgtattcatttccatctcccgcgtaaattaacggactagggcccgctttggccctcaacaaagatggcacccgccctcgcctctccctaagtgccctcacaaaaaatggcagccggcctttttttgtctcttatttttgcttggcttaagcacggatgctttgcccttagttaagatggcacctatccccgcttccctgcccgtcctctggcgccagccggtcggcttcactgcgtgcgcctccgtgaccccgcctcgtttccgtaggaagaagcgccgggaaagatggcggcgtctgtggtttgaattccagcggcgccgccagagtctgaacaagagctggggtggagggggcggggacctggggagcccggcgggtcgctatcgcggggggtactagtggcgccgccgccacagacaccaacgctgtcgccacctctgtagccatgatggacttggtgttgg

SEQ ID NO: 42643 - DNA, 2300 bp, Homo sapien
ataaataacaagttctagtattaaggctgatgcatgcctatgagaagtaataaagccatgtgggcaatacaatttatcctgttgtatatatttctgaaagccatccttaatccttttaggaagaggcaacggagaggtagattggtagatcagggctgtaatcaatgcataaacaaggggtggtggggaaatgagaagggagagattaattcccactcaaatccaggaatgtcttttagagaatgtgacattttggttggggtttgaagggccagggagggtcagcaagggaatatgggggactggcatgacctgtccaccctcccaaagcaaagtaaaaatagaaccttggttagtgcttgctaaatattggtcctgaagacagaacactcacattctccctcattcccgctgtcttatatacatagacctatcaagacacacccatagataaccacaaatgcaaaaacacagaaaatacacaaaaacacacaccagtacacatgcacagattattaagacacaatatatgaaaatagatactagctcccatactcataaactcacacagatacatacaacactcatacacacagactcacaaacatgtttatgcattcatacacagcctcccccacccactactcatgcaggaaaataaatgcatgctttaattaacatacacgggttcacacataaatctcatcctgctggtctggttgaagaccaatgactaatgggaaaccatgcacaaagccaaacatcacgtaggggaggccgggattgggttagcagtggggcttgaattaagccccatcagatgacaaacccgccctgcctggcttcctctggaagctgctgagccgaagcagcagcgcctgacctagctctggatcctgggcggatgatgcgaggctgcgtgcccgaattccagcttgattcagggtttagtgtcatccagggtcaagctcggctattagccccaccccaacccctgcaaccagccggaggctctgggggcactgaagggctgtggcctggggctgctttctaatcctgggcttgccctggcgcaaatgctgagaatagttagcattaatgagggttacaacagtgggccaggctctgggctaagccctttacgtccatgacttaattctcacaacagctctgtgaggggggtggggggtgaggggtgtcctatcatctccattttagtggtgaaaaaaccgcgctcaggccacaaaaccattcagcaaaagacatcaagttgaggttcaaccctgtctgatcctattcttcccggggtttaggtaagtgtgcttgcgagcctgtctcctccacgcaggaagcttgcaccttctgccctcaggggtctccaccgcccggtcccgcccccttgtccagtctggcacaacacctggcccacagcaggtttctggtgagggcgtgggtctcggttcagggaggccctcagcaagggcctcagcttccccatctctgaaatgggaatggcggcagagacctcgcaaggctgcgaccaggctctctggagcagcagagggcatgccaagctctacatcgtcgctgccgctgccctctcccatcgcggggttcccgcgcggtccccgcccgagctggggtgcggcgctggcgccccattgttcaggagggcggggatgctcccgagtgctgattccaccccccgctcgtgctcgcagcccggtggagcagatgactaggcccggcgtctgccgcgcggggcgcatcctttgtctgctccgcggcgcccggtgcccgaggcccgcgccccactctttgggcagacaaagccggggccgccgcgagcccggcgggctagagctgggctcgcaccacccttctcccgcctcacggaccgccccctctcctggacgtcctctgattggcctacggggctacaaagaggccgggaagcgggcggatcacgtgggcgactgtggcttcccattggttaggcgcggctgccaatcgaggagggcgggcggtccgcgctcggtccggtcgctccctccgcgctggggcccgcccgcggggccggccgcctgtcagagggaggtggcgatggtgcgcccggtggcggtggcggcggcggttgcggaggcttccttggtcggattgcaacgaggagaagatgactgaccaaccgactggctgaatgaatgaatggcggagccgagcgcgccatgaggagcctgccgagcctgggcggcctcgccctgttgtgctgcgccgccgccgccgccgccgccgccgtcgcc

SEQ ID NO: 42644 - DNA, 2300 bp, Homo sapien
atgttatctgtaagatcctttctagcctggatagatgttttgtacttttataaactttcatcaggccgggtgcggtggctcacgcctgtaatcccagcactttgggaggccgaggtgggcagatcatctgaggtcagtagttcgagaccagcctggccaacatggtgaaacctcgtctctactaaaaatacaaaaattagccaggtgcagtggcagccgtctgtagtcccagctacttgtgaggctgaagcaggagaatcacttgaacctgggaggtggaggatgcagtgagccgagatcacgcccctgtactccagtgtgggcaacacagtgagaccctgtctcaaaaaaaaaaaaaaaaactttgatcaaacaccacctttcccttccatgccaatattatataatgactgaacgcacctctcccgctcccggcttttttataagtgggctgagcttttctccttatattttactttttatcaaaaacatttaactctaaatttgcttgaatttaatattggttttaaatatctccagaaaagattacagtagcataaacagaagcaaggttgccttctttcacagtccctaactctcatccttgtagggtcatcaagactcctgagatagcaaacttggccttgcttggctttggagatatctttgccctgctgtttgacaaccgctacctgtacatcatggacttgcggacagagagcctgattagtcgctggcctctgccagagtacaggaaatcaaagagaggctcaagcttcctggcaggcgaagcatcctggctgaatggactggatgggcacaatgacacgggcttggtctttgccaccagcatgcctgaccacagtattcacctggtgttgtggaaggagcacggctgacaccatgagccaccaccgctgactgactttgggtgccggggctgcgggttttgggtgcaacctctgcggcagccgactgcatgaaccaaagttctcacctaatggtatcatcacgcagtgcacaatcatttatctatgttttgccaggggccagggctcggggtgggggagggcttgttttattgacatacaacgcagcatgctaatggggtacaccattgacttcatttgtacttagttatgttggtcagtgttagaggatgcattttgggttcatctttcttgagtggagtattggttttaagtaaagaaagttaaatgatccattaatctgctaattggttgcctatgaaatcacattgtctgttattaaagctttttaccatagcctttttttcttttgaagttgaagcaaaggtgctatgatgttgttacagcaactttcctcacacggggtttagctcttataagagccagtgttaaaacttccaccaaataccagtttataaacttccaccaaataccagtgctaaggaaagtctgtcttccagttcaaatccaattctgtaaattgaatgttagcaactcattctaaaccttatatcttggcagagtcaaggttggccatgtttaagatgtgagcgagttctgtagtttttgttgccatgtcggggaagctagtccccggcagcctggatgactgcacagcggtgccctggtatagcagaaaagagcagtgagctggaaggttagagaccgggcctcttaccctggaactctgcaccctctctgggtcccagcttccttgtctgtacagccaggtatgaagctcagtgatttctaagattctttctggtccttcacctactgaaatgtgtaaaagttgatcatgtatttttgtctgatccctgattcatggtttctttcaggtcggataatatttaaatgaaatgactgttacagagttttctataagaacatcaattatatgaaaaggatgaataaaagggaaatgtagaaaatatagctgattccacttagacagtttaagtaattggttgaagaaatgctgatagaagccatggtttaaatagggacacagtatgctatactagaaggatacctgaacccaacctaacttcctcctttgcctctaacttaatctgcagcctcaggcaagttaactttctcttctaagaccatcattttcttcatcttttaagtgagggaattgtcctagatgagggctcacaaacccaaatgcctaagggagccgtgcaggtaacataaatgagtaaaacattctggggaggattgtgctgtcccctggaaagttgatctaatagggcagttattcagctctgttttgtcattaggagaagcaagcccagggttggcagg

SEQ ID NO: 42645 - DNA, 2300 bp, Homo sapien
gcttggattctgtcctagtgcttttgactccgttttggtgactctaagcaagttgtgttactctctccgtgctttgatttcttcagtggtaaagtaaagtgctagaggaagggaccgttaatgttcttgaagaacaccatgattttgggattgattttccttctttagtgtgtttgttttcttattaacctccctgtttttctcttgaagggtcagatgacttgtctgcaaagctgtgggatgtgagcacagggcagtgcgtttatggcatccagacccacacttgtgcagcggtgaagtttgatgaacagaagcttgtgacaggctcctttgacaacactgtggcttgctgggaatggagttccggagccaggacccagcactttcgggggcacacgggggcgggtgggttgccctttttcaagggtttttacaacttagcctcatccttttaagccaggagccaagaatgtgaaatgcttttttttttttaatttaacctgcttttttcaaccctctttcttagtcattgcagttatttccctttattctagttactcttatttcgaatgttttacccagttttgctttttcttgctttcttctatgtgtgtacccttctggtgggaagggtagttttcattctctctctgtttctctctctctctctcattctctctctcccccctcctgtttcatttatatcctattgaacagacagtcccttggcttttatcagattccatacctctgaactgagtaaatcctacttgtgtaaattccactttatttgtagcattagggctgaaagttctttggtgtgacggtggttcttagattgtgtggtctacacagattacatccagtttgagcttggttgacagttgattaaaacaagctaccacctagagataaggcgaaagaaacatacctgaatgtttcctaataaatgtatagcatccttattttgcaaaaactggtcatttgaatatagccttgagatttgagcttctctctctgttgctttttttttggcgggggcgggggtggggaggctttgtgtagaaattgagctatttcccagcctcttgtgttgagcagctcccttcctttcccccatttacccactgctttagcctctgagaatcatagtctgtaatgtcaagcattacgtttatgagcagccttccaaaactcccttaacaggttgcgtccctctatttcccagtaacttgtattactgtagaccgctcatcatacaaatataatcttgcttccccaccagactaaactccataaggacagtgatcttatctgtcttgttcacccatgtgactggagttacttgcactgtacctggtgcttagtgattctttgaagtaaaactagccgttaggctaataaaaacacgtattttttgcttcattttatttgtcctcctatatactcttcttcagtctttgctgtctgctaccacttgttagaaattaatatttgaaggtgcatgtatgcatggaagtatatgttaaattgagtgttatgttccacaatgttaagatgtaccatgacttccaggtgattttattcctgatcaactttgagaaccctgctctaaaaatttttattactgttgcctagacattgctgaggtttttcttaacttcatacctttactattccctctgcttgcagtattcttttttctttccttgataaactctgctcatcctttagggcccatctccaatatcgcctcttccctgaagtcctccctgatacccctgggcagagttagtcattctccttgatgtttccctagcaagaggtaaacatttatttttttctgggcttcctcctccactccctacttagattgagttccttaaaggaagaatcagtgtcttcatctctgggtccctaatgttcctttagaactggtatacatttgaaaacaaatatttgagtacacactatacagcttacactgtttttggcgctggggatacagctgtgaagaaattcagacacttttgagttaatggcttaatctaacctttgagatccttgtttttgttttgttttttctctctttacattgggttttcttgagtctgggtgctgttttgcagcttccattctttatattttgtcttactgttagtgtgtatcagagtaggaccatgtacgttttgttttcctgcataaattagataaagtattgtgtagtgtcaggcaggcagtcctaagaaggaatgccattatctccaacatttgttttgcctctcactgtagctaccaca

SEQ ID NO: 42646 - DNA, 2300 bp, Homo sapien
gaatttaacaattcaataggtcttgtatttaattaaatattacgtccactttgcaatttaaaaatttttttatagtcatgaattttgctcctggatcccctctgggcttaaatttgcacaatttggtttctttgttatgagaggtccaaacaatattatctctggggcagctccatctggacttttcaatttgattcatcaaactgtactggggttgagaatgtttgctccaaagagatatgggtgcttgattttcttgattaccctggtactgccttccctttcatagagagtatccaatctgtatatctgtcttcctaaatgtcttataatgctgtgatcagtcacgttctgacttagaagtctagagtgacatcctgttgcttagcaaatcaaatttgctctcttgagaccttacttttaggacaccgtagttgacttccaccccacataatcaatttttatttcccatgtttcaagtaccctaaatgaagtcaggatgcttggaaccttggccatgctctaccatctactggatatgtgtctctcttattgtctatattattggactgtgctatcaagcatggtagccattagcctcatgtggctattaaattaaaattaaataaaattaagaatttagttcatttacatcaggtacttttcaaatgttcagtagccacaagagactagtgactgccttattggacagcaccaacagaacaactccatcactggcaaaaagcttattggacagtgttggtataagatgtatgtgaatgtgcgtgtatgcatgtatggcttaggaacccttacagagaaacaaggataacttgtgcgctgggcattgtggttcacccctgtaatcccagcactttttgggaggcccaggcaggtggatcacttgagcctaggagttcaagaccagcctgggtaacatagcgaaaccctgactctacaaaaatacacacacacacacacacacacacacacacacacacacacaactagctgggcatggtgacacgcgcctgtggtcccttctactcaggaggctgaggtgggaggatcgcttgagcctggagaagtcgaggctgcagtgagccaagatcgtgtcactgtactccagcctgggcgacagagtgatacgttgcctcaaaaaaaaaaaaaggataacttgtgctctgaagtcggtttgggttgaaatcctatgacagccatttactatgaccttaggcaagatgcctaaacctcttttgatttcagtttccccatctctaaaaaggggcctaataatagttactagcttgtggggttgttgtgggaactgagtgagatggtacacaaaaaatgttgagaaagagtgcgtgggattttttagctcagttttagttcttgacgccaaaaggtttgcatgcttcatttccttcaatcctcagagccttcggatggggacctcactataattgctatgcagatgaagcaaagtctgagaggttaagtaaccgggccacagccagagtgtaaacgttgtgattcattcaaatctacatcacttgactgtctcttttcattcaacaacctccttaccttgctttatttttctcctttgcacgagccttagtttatctgtcttcctcctcctaatagatgtaaggcccaggcggtcaggggcttttgcgttttttgttcactaaccctatcccctagaacagcgttcgggataaagaggtgcccaacaggttgtatgaatttggacacgtctcttaacttctctaagccacagctccctctcctccgtaaaatgaggataataagaaaaactactgcagagctggtgcaagatcagattggaggagggacataagcgcgctgtgcaaacctggatgtacggtacgaaaggaacctccgttctaggttgcacccagcctaagcaccgtgagggccgcgcggcacgcgttcagcttcccgggacgctcttctccccacccctactcccggcctccagcctcccaccacccacctccgggcggggaccggaagtgcagccgcttccgccgggagccgcggagctgagggacgcgcggagatgacgcaggcagcaccggaagccgctcccctgtgaggctgcggaccgggagcagcggccgcaggtccgggtctgtatgcgaggcggggccggtcggggaggggactcttaggcgcccgcggctctgctgacccgccgcgccttggctgtttttctttccctgcaggcgccatggctgcggagcggacccggccgctgcaaggctctggcg

SEQ ID NO: 42647 - DNA, 2300 bp, Homo sapien
tttggcttatgctgaaaagcaagatggctcattaagtatataatctgtgtttggccctacagtaggtgctgggaatataaggatgcattcccagcctagtatgtgagacagtcataaaaaatacttacagcccagctctatgggaggcaagggcaggaggaccccttgaggccaggagtttcagaccagcctgggcaacatagtgagaccccatctctacaacgattttaaaaattagctgtgcatggtggtatgtgcatgtcgtcccagctactcaggaggttgaagtgggaggatcaactgagcccagaaagttgaagcagcagtgagccgtggttgcactactgcactccagcctggccaacagagcaagaccctttttatatatatatatatatttacagtgcaatataattactatgatagagaagatattgaaaccagacttgaaaaaatttgtagtagtaataagaaatggcccttatttgtaccagctttgtactaagcactatgctaaaatactcacatatattatctttaattcttacagtaaactttgtatgttgttatcattaacctcatattgatggagcaattgatccaagaccacacagttaatagggtgcatgtttgaaatagaatcctctatagtctaattccatcttcagaacactttcttactttgcatgtcatgataccatactatgctgcttttccttctacctctcagtttcttctcagcctcctggctcattatcctccgttgaatctttaattgttggagttgatgaaaacagagttccaagccctgctttcacggtactctactcattcctaggcagttttactcacttatgatttcacttcccatcagtgatgatgcctctcagatgtaaacttccaactgagacctttcttctgagctcgaaccttcatgctcaactgcttactcactcttggccccttgggtatattctaggccactcaaactcatgctgaaatcaaattcctgatcttccttatccaccctatccccctaataaaaaataagacaacaaactggctgtgtctcacagtctgcttagttgggtattagaccttggctcattctgaggcctgttttccttgccacatatccattcggtcatcatattttgttgattttatttaaacccctgcatttctcttcattagtacagcttctaccaccctagactaacttactggtgtcactcacctgggctactatatttgcatccaaactggtctccactcatccatttttatcatccctagtctatcttctcatgcagtcagaatggtcttttaaaagtccaaatctgattgtgtcatttctctgcttaaaacccttcagtgtcttcctatatctctcagtaagacctcagaacatacttgctgaatgagtgagtgaatgactgactgactgactgacaggatgcctgaatgagtgaatggttttataatctgtttgttgtggctgattcaggcttttgtaccctgattgatgattgcttgggcgggaaagtgctgatacacctagatataatggaacatttctgtgccaaggtggcagggcatggtggctcatgcctgtaatctcaacacttcaggaggccagggcgggcagatcacttgagggcaggagttcaagacaagcctggccaacatagcaaaaccccatcgctactaaaaatacaaaacaattagccaggtgtggtggtgcatgcctgtaatcccagctactggggaggctgaggcacgagaatcgcttgaactcaagaggcagaggttgcagtgagctgagatcacgccactgcactccagcctaggtgacagagtgagactctgtctcaaaaataataataataataatctgtgccaaagtaatttcttatgcgttcactgaagtttttctacttaaagagacaaataatggattttttaaaactcatttataaaaagtacctagtcctacatttaacttaaaatgagatctatcaggcgtagggctgatttgacctttttcttttttctgtgtttttttttttatttcagctaattatagagatttcttccgtgtcaccagaatctttaaactactgtaccacaagtggattggtaacccagctcctgagagagctgactggtgaggatgtgttggtcaggtgtgttgactgagttcttaaagtgaaatatcctcttttgaagggctgggaaacaaccttgggacatctgtgattttctctattagagactttgcccaggttgcaatctcatga

SEQ ID NO: 42648 - DNA, 2300 bp, Homo sapien
atggtctcgatctcttgacctggtgatctgcccgcctcagcctcccaaagtgttgggaatacaggcgtgagccactgcaccgggcctacaaagtgtttttaatcaaacactacggatgtgtaaaaaatcaaaaataaaagttgtcctactattttcagacccacttccctattaatagtttctggtgtacctttgcagatatttgcaatgttatacaagttttacatgcctgtgggggttgggaagattgtaatcctttttaaaaattacaggttaaaattatagattgatataccctgcgattttctttttcattcaacaacacagagattggccgggcgcagtggctcacgcctgtaatcccagcactttgggaggccgaggcgggcggatcacgaggtccgtagatcgagaccatcctggctaacatggtgaaaccccgtctctactaaaaatacaaaaaattagccgggcgtggtggcgggcgcctgtagtcccaggtactcggcaggctgaggcaggagaatggcgtgaatcagggaggcggaggttgcagtgagccgagatcgcgccactgcactccaacctgggagacagagcgagactcgtctgaaaacaaacaaacaaacaaaacaaaacaaaacaaaacacagagatctttccatgtccacatacatatatatacatctacctcaataacttaaataactgcacagtgttacagagtaatagcgcataatttggaatcctctgttaacggatatttagattgtttctagtgttctggtgccacacacgatatgttatattcttgcatataatgttgtagggtcctccagtcgccccctttctttctctgtcctgatggaaaatcagagtgccttgattgctctctgacctagccagcggcaggtttccctagcaggcttgaccataaaccaggggccttgaacattcacaggcctgataaaggtacctaggttgttgcccaaaacactggaagaaactggcctcaaccctgagccaaattcctttaaactctcatctgaactccataccctgaccccctcactgcggacatacccaggaacacctttctcccggtgtccgtcttgacaatttctgcagccctctgcaggtttccccctaaacgcttttggactgatcgccttggcattcagtgcttctttttctgtcatcccaaccagccacatctcgggaaggtttgaagcactccctcgtgggaactctcttgccgctgcttttggggcgattccagcctcgggttcgaaagaacaaagtaactgcacattttgtgcgcgtatacttgcattaaatttttttaacaagaatgactggatgaaaaagcatgtgaatttaaaatgctgatggttcttgccacattgccaggataggatccttttagaaggggaaacaaatcaagaacctgtacaaagagatgtggaatgctccttgtaagtggacagctttgctttcctcctttaatttctatttgatgaagaaggcagtgcctcactgctcagaggcagcgaggccaggcgacgggagaaaacaccctggggcactctcagaggctgaacctgaaccccatctcctgcctctgaacccaggatccttccttctctgcaaatttcggctactttccacctcccctgtgactgggaaaagcgctgttcttgccctcaaccactctcatgtccatatttaggggtgcccctctcctcggctcaagcccccggggtcctctcacctatggttctcgttaagcagggagaagagcgggccgaggcgcagctccgccgcttgctggcgaagctcgttgagcggcactgcctgcagcacggagtgaagcgcgcgtagctcctccagcggcgcttccagcctcgctacctctctcagcagcgccaaagcctgggctgccatcttgccccccgacgcaggggctggcccagcggcccagttcccggggcgctttcctgaacctcgcgagatctgatcacagcctccttgtccctgagatggctatggggctgccaagcctcgcgagaagcctccgttagggccgtgtcaactgtagccagtggttgcggctccctcagtctggcgtcatctaggtcgctgctcagggaaatgcggaggccagtaggcttacgtgtttaccgcgtagggcaaagccttgccaaattcccggccagcggagcggcgagggtggggactcacgggaagttaaacagcctcgtcggcgtcctcgaggctccaaaaccaggctctaggcgggg

SEQ ID NO: 42649 - DNA, 2300 bp, Homo sapien
cagacagcattcaatttcctctgcaaagacttcttcctatggaaatagactctcagtgatgaccaaagacagaaacttgagtagctcattaatttcactttccctaatatcaataaatcttaaacccacctgttttgcagacactaagattttttttaacttcttcattagctctagggaaatatgcatcattcacacatcctcccacagtttccagcaagcttaagagtggctgattttatatcacccatcacctcttttatcactaccaaagcatcggcaatattgtactgttgccatgcttctttcagagtaaggtgagggttttttcaatacagtcagcaaagtggtcaaacatatgcttgattatgttcaaatgcttcagttataccctgacccaagggctgaagaaagctagggccttcctgagggagaaacacagtatcaacattagaatgaacaaagaataatgaatctgggtgattgggacctctgtccacagttagcaacattctgatttccagattttttttgttaaatgacttcggatttgatggataaaaaaattgtaaaactaatccaaaaagtggcagtggtgattctgggtgtgattacaagaaaacaggaaggcgtttatctctaaaagacaagtggggtgttagagtctttgtaaagcagcagtggttttatcattttgtcacctgaggcactgccacaaaaaaatgagggaaatcctgtccttagcttcctctaagctttccagatttttgtcttttgccccaaaagtaggaaggcatgcactgcaaaagatgggtcatctccttggcgttgaagacctgttgaggcacaaagcctctctccagttgcttggaatactcgatacccactcaggatttaagggtccttcctccccatcaacttcgtatgttgcaaaacagcagcgatttttaaagttctcaaaccatcccttgctcgcatgatacttatttgggttgtcctccccagatgtttcccattggttccctgtagatgtatttggcctggttgcagagggccttccgggtcagatgccgccctctgtcatctggccttccacctaaaaggttaactgggtctccaccttcacgatgtttacattacaggggaatacacagcagcttagagcagatgggcgaccaactctccacgctggtctttcttggtttcctgagggtagtggaggacaagaggggaaagcagggtcttgctctgtcgcccaggctggagtgcagtggcacaatcaccgctcactgaagcctcgacctcctagacttaggggaccctcccgcttcagcctcccgagtagctgggactacaggtgcgtgccaccacaccgcactaatttttttcctttttttttttttttctttttggtagagacgggtttctcactatgttgcccaggctggtctcgaactcccgggctcaagcgatcctcccgccgcggcctcccaaagcgctgggattacaggtacggccactgcgaccagctgcttctccttggtggactgatcaacaccaacaaggcggcgcacgtccctattactcacgccttcgtcaggctcctggagaatattcatccagtcttccagaggcatgacgctccgcctcctcttgacaggtggctggcccaggatcaagattcccctccaggccaccgctccacctggggaggcctcagccgcggccgtagccgcggtggcctccataacggctgcagtcgtccccgcctagagcctggttttggagcctcgaggacgccgacgaggctgtttaacttcccgtgagtccccaccctcgccgctccgctggccgggaatttggcaaggctttgccctacgcggtaaacacgtaagcctactggcctccgcatttccctgagcagcgacctagatgacgccagactgagggagccgcaaccactggctacagttgacacggccctaacggaggcttctcgcgaggcttggcagccccatagccatctcagggacaaggaggctgtgatcagatctcgcgaggttcaggaaagcgccccgggaactgggccgctgggccagcccctgcgtcggggggcaagatggcagcccaggctttggcgctgctgagagaggtagcgaggctggaagcgccgctggaggagctacgcgcgcttcactccgtgctgcaggcagtgccgctcaacgagcttcgccagcaagcggcggagctgcgcctcggcccgctcttctccctgcttaacgagaaccataggtgagagg

SEQ ID NO: 42650 - DNA, 2300 bp, Homo sapien
gtgacagagactccatctcaacaaaacaaacaaacaaattatattatcccataataaagttttaagaaaataacaaccatttaacaaaacaagttaaataaggcgggagaggcagcatgatgtgtcaaaagaacaaagggtttgatgtcaaacagccatgggtttaatccccccctcacctacttactagctaagcaagggacttaacctttcagagcctcaatttccccatctttcgaatggtaatgatgataggcatctcagagtggttggggagattcagtgaggtggcatgtggggcccagcgctaggcctagcagacattagaggctgggcatctggaatgtgagtataaaacttccattcctgtgagctggacccgaccctcgaggccctctctttcagccggtgttccaggagaggagcccaagtgcaacatctgcctagggaagacatcagggccgctgaatgagatcctcatctgcgggaagtgtggcctgggtgagtggagcgagcagggccctgagaaggccccgacctataggtccccacgcactggcccctgacgggtactgctgcagcctgttggggcctcagctggcttcctgtttctcttggcactgcagggtgaaagggggccagttgctgtaagtgagggcttgggaagagatcctggggaaagctgggagggtatgatggtgtatgtaatttggggcccagctagatggagaggatgggtgggaaagatggggctcaggcactgaagtcagaccttcctgtgtcccccccaaccccacaactggccaatgctgtcatttagttcccagcctggacactgacttggccatcttggtgggcaccagcagccaggctcccggcagctggcaggcagagctcctaggacttccctcagccctcccagccctgcctcctttgggccaactggccttgggccacgatgtccttgtgggcgctcaccgccccctcctctgccgtaggttaccaccagcagtgccacatccccatagcgggcagtgctgaccagcccctgctcacaccttggttctgccgacgctgcatcttcgcactggctgtgcgggtgagccttccatcctccccagtccctgcctctcctgcctcctccagtggggcagaccagagactcccatcacagagtctgagctccaagcagaagggccacacctgggctttggagacagatagcgcctctgccactgtccttggccaggatttgtagactccctgagcctcagtttcctcaactgtaaagtggagatgggtttggtgtcgggaataacgggaccaataaatgatgctttactattaaaaaagaaaatccatgtaaatacatgttggtaattgttgcctttattgcgcttattactcttaattctgttatcaacggagttccttctgggatagaggggatgggtttggaattaatgagaaaaagctccttgcttttctgactatattggaatatctgcgggtcccccaagccctggcagcacttccctcaatagacagccgcgtgctgactcgcgtggtccacccggacctggtggttgactggggccctcgtctccccccagaaaggcggcgcgctgaagaagggcgccatcgccaggacgctgcaggccgtgaagatggtgctgtcctaccagcccgaggagctcgagtgggactcgccccatcgcaccaaccagcagcaatgctactgctactgcggcgggcccggagagtaaggcagggggtcagggccccccgggcggcagggcaggtctccaagaatcgccagcagggaccgcccatagggagcgagcctggcgtgtcagccaaggcggggaccttgagggcgggcccagtgtgttgcgctgtgggggcggggcctcgaggggcgggcctggagtgtcagccgcgggggtggggcctcgggggcgggactcggggaggggggggtcagccgctgcggaggtggggcctcgaggggtgggcccggaagattggacctgagggcggggcctcggggggcgggcccggaaggttagaccttggggcgaggcctcgggaggcgggcctggcgggttgcgaccgcccaagcagggccccagggaggtgaggcaggtcgagaagcaccctgtggaggggcggggtggggaggagggaatagtaaggcctcgggaacaggacctgaggaggcgaggcctcaaggggcggtccctgaagggaagggctcggggtggggcccgagggggcgggacctcaaggggagaacagaa

SEQ ID NO: 42651 - DNA, 2300 bp, Homo sapien
acttgaagccaggacaattcaattccacgtgcagctcacagcacaatcccctcttatttatctatgcatcaacaccgcctcctccacgaggttgccagttccttgtctctcatccacctgtgtgtctcccatccacctgtgtgtctcacatccccccgctctagtcccacacagtggggcaatcaagattctgaatacagaatttcttaacaaagtattaatacaatgatcacttactgcacacctactgggcaccaggggctttgcatacattaactctaaccttcccaataactctatttaggtgaggacacggaggcttaagacttaaagtctctggagcaagaattgtttaaaaaaaaaagaaagaaagaagtgacacactcaggctcccatggccagtaatgggtggagctggcctgtagcctcagaggtgagcacttcgctctatcatctctgtcccccagcatcctgaaggcagacccagccagcttagaagctagtgggagtgttctgctcccatcatcagccctacccgcgttggacacaccttctcttggcagaacatggttaagtagcacaatcctagggcccctttgggacttgaaaatgtgctctccaggattgggagattttgtgccatggggctgctcccaggctttccttccaggttcaggcaggtactcagcagtgctaggttctgctgaggcgccaggatccagaatggggcagtgaggcaggtgagagcagggggatcaaggggcagaaggaagtgaggaaggaggtgaaaggactcctggatctctgctgagaaggtgaggtggggggctgcacagatcatgctccaaggccaggaggcagagggcccagagtgagcaactgacagtgaacagggaaggctctgggggaaggtgctgtccactggccacacccatgaaagcacatatccctgtctggtgggggtgtctgcagagtgggatggtagccacagaggtgggcgctgtggactgagggcaaggatgggggtggggttattggtaagtgttcttcctcccttcccccaagagtgagtctgggtggggccatgtctgcctttcccccacagggcagggtccctatgattggagctctgcccactgactccatctgccattcctatgactctgtgcatgttgtctttcattgtgtgccctttatttacatgacatgttgtgcgtgtggtatatatttgcgattgtaccatgtatttctgtgcactgtgtctctacgcaatttgttgtttggggctatttcggccatgtaggtttcctcttttgtgaattgccttttgatatccttaacccgtattttaaaaattgcattgttagcccactgaattccctccacctggcacacccactaacctatttccacaacctatctgaatgccactttttcaggaaaacttgtgtctcttgcccgtctgtgttgtgactttatgtgttatgtccgtctaccttacatgcatgttctgttgtgtgtctctgttgtgtacagtgtgttcccccttgtgtatctatgcctatggctggtgtgtacagtacttctctttgtggtgtgtttgtgtcctgtacatgctgtggtgtgttctgacctgtgtcggaacaacatgcgttgtgcactgtgtgttgtgtatctacattatacttgtgctgtgtctctgtgccgaacgcctgtgctgttagtgcaaggtgttgtgtggcctgtttgggcgtcctgggtctgtgtctgcgccaagggtccgcgccgccctgctgtgtgtctgtgccagggtccgccggtgcctgcgcgcagagctgtgtttcctcaacaagtgtgcgagcggtcgtgtgcgccatgagcgctgcctggcgtctccgtgtgcgccgcggtgtggccgctcctcggcggggggcccgggtcctggctagtggccgcggaggatgcgcgcccgcggggcgggcgggggcgggcgggggctggcggcgctgcggagcccggcggccgcgggctccaatggcgaggccggcgcggcccccgctaattacataagcgggacgtcaataattcgcgggaaaacgcgaaaaagatggcgccccgcgcccggggggccccttcctgagcgccccggcccctccctccgccgcctccccctcctccccgcggcgcccccgccccgccccgcccccgccgagaccccgaccccggccccacgggcggacactcggccgggcagccgcgggccgagcgcagccgcctccgccaccgatgcgcctggtggc

SEQ ID NO: 42652 - DNA, 2300 bp, Homo sapien
ccaaaggcctaacacttcacaggggtgggctgtgggccctgcccactacactctgggcagatgccaggtctcgtgcagcctttcagtgggggcgtgttataccttataaagtatcctacacaagagaaagggaaacaatcgatttggaaggaggtggataagtagatgaaacttcatttcagggtgtgcaacgcagcatctccaaatgaagtgggttacagtaatttaaaagaaccatacaaacggccgggcacggtggctcacgcctgtaatcccagcactttgggaggccgagacgggcggatcacgaggtcaggagatcgagaccatcctggctaacacggtgaaaccccgtctctactaaaaatacaaaaaaaattagccgggcgtggtggcgcgtgcctgtagtcccagctacacgggaggctgaggcaggagaatggcgtgaacccgggaggcggagcttgcagtgagtcgagatcgcgccactgcactccagcctgggcgacagagcgaaactccgtctcaaaaaaaaaaaaaaaaaagaaaaaaaaaaaaagaaccatacaaacataaaactacacaaaaaccaacactgtctcatggttcagaacccaagcttcagggttctaatctgtgcctcatctgtccaagcttcggtctcctccactacacaattggcatgagagtggttagaggattaaatgagatcatggacctaagagcttagcagagtgccaggtacgagtgagccctcagtaaacactagctagtgttattatttatcaaggttttattgtatatcaagtaccatgctaacttgttacataattcctccccttaaaacctcacaacaacctcctgaggcagctacttttatcctgcccattttacagataaagaaactgaggctcagagaggtgaggtcactcttcagggtcacatggctagtgaggagcagcaaagcttggagttttttggtaacagctttttaaagatgcaattcacacaccatacaatttacccacttaaagtgtataatttggccaggcgcagtggctcccatctgtaatcccagcactttgggaggatgaggcaggcagatcacttgaggtcaggaattcaagaccagcctggccaacgtggtgaaaccccatctctactaaaaatacaaaaattagctgggtgtggtggtgcatgcctgtagtcccagctactcgggaggctgaggcaggagaatcacttgagcccaggaggtcgaggctgcagtgagccaagatagcatcactgctctccagccttggtgagaacttgactcaaaaaaaaaagtgccattatagctaattagataaacgcaacatgaaagtcacaggcttctctttaaggcaatcacttgtccttaaatttaaagctcaaaaccctgggagaggggagcaaagtagagctcactggggggttctatgctttgttttggggttttttgttgtttttgttttttgttttcttattttatctttttttttttttcttttgagacagagtttctctttgtcaccctggcatattttttatttttttgagacgggatcttgctatgttgcgcaggctggtctcgaactcaggctgaatccatcctcccacctctccatccctaagtgctaggattactggcattagcccccatgcccgggattaaggggacagttctatcctttataagtcttagtaactctgggattccaatgagaaaagcctccagggaggccagggtacattaaggtgtcagcagggtcccctccctctggagtttggatagaaagagcactggacgtggagtcctttaacccggattcaaatcccgacgtgctacttgctacctgtgtgactttgggcaagtcacatcaccagctctgagcccaactgtcatcttgggcaaagctggagaacaaagtccctgaccagtcggggatctgggactgggattacacaaatacaagagaaggtcctcgcccatggcaggctcccatcgatttttggtggagccgaggctggcggactgtgtgctgggttatttaaggagtcgactctctgacgccttctaccagtaagtcgtgtatttagcattcattcatcaaagcctccggatgcctcctacgtgccctgcactatgctggtcttggtaatccgtggtccctatcccagcgcccaggtgggtccgggagatcgacaagaacccgcggggcgggcgcgaggctggggagccgcgggcggccgggtgggcccgcgccgccgccatatgg

SEQ ID NO: 42653 - DNA, 2300 bp, Homo sapien
aaaagcgtgcgtggttacaggactggctctgggttcaggggtccccactcactagctgtgagaccttgaacaagtcgcttagcctctctgtgcctcagttttctcatctgtaaggtggggatgatgatggcaatacctgcttcacagagtgaaaattagatgagatgatgtctgtaaaattacgtaagacggtacccaaaagtagtactatttttcccttttcttattagagcaggttgcgcacgttttgatgtccgtgggaatgagcaggtagagagggtggtattgaggccggaggggagagaagggacccacagatggggagagaagtcttgggtgcctgttttatcccaaaccaggggaaggagggaacaggtagggctggctgcaggaaagcttgcaggtatggggtacacagttaaaagggagtgtcttctgatagtcttgatgcaggcctggaggtcgtttgttatgggggtggaggtcctgatgtacattgtggcggtaagatgccgtgctgtctttgccaccagcctgtggcagccctggtgttacaccagggcaggtgggcagtttaatgtatctcaggccagatgacctgccctgcccacctgttgaggctccagtagatagacgtgaaagcacagtataagcataatgcaccactttaatccttttctctgaggagctggaaggcctgtagtcaccatctgagccaaatgtcattcaagtacttcacttgggttacacaccacactttgacccactatctcatttagtcatcacaacaaatgggtgaaataggtattattgtcccattttacagatgcagaatctgagtttcagggaagttaaggactttgtcccagggcccacagttagtaagcagtggacccaggatttcaactcagctctgtctgacctcaaaacccatgatctgaaaccactgtgaaagtttgcaaaacctctgtagcagccaagcaggatggaaagatgtgtagggattgtcttctccatttgatagatgagacaagagctgggtactctgatctccatcccaagcacacagagcttggggccccacagccctggtgtgaatcccactccactaccagaggctgtgtgcctttggaccaggcatcttgcttctctgaccctatatacagctgcagaagaattccttgcaggttgctgtaaggatttggagggaaactgttgcccagcacacagtacacattctgggagccatcgtttccccagtgcacttttcctgcaaatgtggatctacatcccacttggatgctgagaccagctgctgtgatcttgcatttgtttagcgctttgttctccttgaggcagtaaagtggtggcacctgaccggagcatgtagccacctatgacttcctgagtggggtggtgtggggagggccctgaggagtctgtggtcctaggccttggatttcatcagggctttcctgctccttctggttgcctcagtcccaggcaagatagggtcccagaatcttacagcccagaggccacctgttgcaacttcttttttacagatggagtcatcagaacccactgtgaggaagtgacttctccttgaggtcacccagacactccaaacagagcagagcaaaagcgcctagaacttgaaattttggacctgtctccaacaccctggggatttccaccaggaaggtgagcacccccactgagaattccaggctgctcagaggtgccagggaacacagaccagggaccagctgtggccccctcctccgatgtgcccagggaagtgggggaagccagcggcagcctgcgattctcaaccaggggaactctcactgtgctttctgagagtctgtgacacgggtcattttctctgacttgctctcttgctttttctcactctaaaaaaaaaaaaaaatgactggacactcctaaagccttcagtcaccatccaggggatttttatcgccacaaagggtaattcctgctccatccctgctgtgactcagctgtgacgttgaaccacacaagccagagagaagaagataaagtcatcagagctcctactcaccagagagtgaggcccaggccaggactccacaaggctggtcccctgccctggagcaacttaaacaggccctctggccagcctggaaccctgagatggcctccagctcaggcagcagtcctcgcccggcccctgatgagaatgagtttccctttgggtgccctcccaccgtctgccaggacccaaaggagcccagggctctctgctgtgcaggctg

SEQ ID NO: 42654 - DNA, 2300 bp, Homo sapien
ggggacctggcacctcggctgcagagaccgccccggactcaactgcccccagcccagccgcgggcgccccggccccgcaggggctcattcctctttccgcgggcaccggcgctgcctggctcccagcgctgccctcgcaactggatatgtggaggtggcgacgcgacactcccccgccctcgggcgggctcaccgacctggctgggggctcagcctgcagagccgggcggcgggggctgtgctggcgccggcaggcgcgaggaatcacagagcggggcgcccagcctcatcatggggcggcccacggagacttcccgtgggagtggggtctggtgcaggggcgccccaaaggacgagtgggagatggggacacgcggcgcagagagactcctcgtggatggagccgatggaggcccagtgtagaagagaaaggggtcaaggagacggataaggagccaccagagacgcggggggaattccccgcagaggatgcgggaagccggggaaaggaagggattccggaaggaagggctgagagccgggtcaggtgctggcaggagggctggttggatagaaactggggcgggcccagggcatttggcgtccccgacatgcgtatacacttggagagatgattccctggagatccaagtgcctgtatagacaatcttttctagaagttctaccgttaggtgaggcgagagtagatgtagaaattggagacgagaataaagagtgttttaaaagcgtgcgtggttacaggactggctctgggttcaggggtccccactcactagctgtgagaccttgaacaagtcgcttagcctctctgtgcctcagttttctcatctgtaaggtggggatgatgatggcaatacctgcttcacagagtgaaaattagatgagatgatgtctgtaaaattacgtaagacggtacccaaaagtagtactatttttcccttttcttattagagcaggttgcgcacgttttgatgtccgtgggaatgagcaggtagagagggtggtattgaggccggaggggagagaagggacccacagatggggagagaagtcttgggtgcctgttttatcccaaaccaggggaaggagggaacaggtagggctggctgcaggaaagcttgcaggtatggggtacacagttaaaagggagtgtcttctgatagtcttgatgcaggcctggaggtcgtttgttatgggggtggaggtcctgatgtacattgtggcggtaagatgccgtgctgtctttgccaccagcctgtggcagccctggtgttacaccagggcaggtgggcagtttaatgtatctcaggccagatgacctgccctgcccacctgttgaggctccagtagatagacgtgaaagcacagtataagcataatgcaccactttaatccttttctctgaggagctggaaggcctgtagtcaccatctgagccaaatgtcattcaagtacttcacttgggttacacaccacactttgacccactatctcatttagtcatcacaacaaatgggtgaaataggtattattgtcccattttacagatgcagaatctgagtttcagggaagttaaggactttgtcccagggcccacagttagtaagcagtggacccaggatttcaactcagctctgtctgacctcaaaacccatgatctgaaaccactgtgaaagtttgcaaaacctctgtagcagccaagcaggatggaaagatgtgtagggattgtcttctccatttgatagatgagacaagagctgggtactctgatctccatcccaagcacacagagcttggggccccacagccctggtgtgaatcccactccactaccagaggctgtgtgcctttggaccaggcatcttgcttctctgaccctatatacagctgcagaagaattccttgcaggttgctgtaaggatttggagggaaactgttgcccagcacacagtacacattctgggagccatcgtttccccagtgcacttttcctgcaaatgtggatctacatcccacttggatgctgagaccagctgctgtgatcttgcatttgtttagcgctttgttctccttgaggcagtaaagtggtggcacctgaccggagcatgtagccacctatgacttcctgagtggggtggtgtggggagggccctgaggagtctgtggtcctaggccttggatttcatcagggctttcctgctccttctggttgcctcagtcccaggcaagatagggtcccagaatcttacagcccagaggccacctgttgcaacttcttt

SEQ ID NO: 42655 - DNA, 2300 bp, Homo sapien
gctccgcctcccgggttcacgcccttctcctgcctcagcctcccgagtagctgggactacaggcgcccgccaccacgcccggctaattttttgtatttttagtagagatggggtttcaccgtgttagccaggatggtctcgattttctgaccttgtgatccgcccgcctcggcctcccaaagtgctgggattacaggcgtgagccatcgcgcccggccgagtccatcaatttttaattcaaacacttaactctttgaatccttttcccgtagaattgaatggccccacagaggctacatctgggcaacctcccgtagattgcagaaattctctcttagaggcccctgcccatagattgcagaaattctctcttagaggcccctgagatcttctgcttgtccacaagcagcatctccctcccaggtgggcctctgaggtccccctttcactagagtaccctgtgttccgcagcttccgcctgtctagcggaagttggaggacagcagctctgcctccaataagtgagagtcttacaggcatgccaggttaaaaaacaagtaaaagatcgttccctgctcttacaatccagttgagagtcaggacataaaaagggaccctaggccaggcgcggtggctcatgcctgtaatcccagcactttgggaggccgaggtgggaggatcacctgaagtcaggagatcgagatcagcctagccaacgtggtgagacccccgtctctactaaaaatacaaaaattagccaggcgtggtcgtgggcgtggtggtgggcccagctactcaggaggctgaaacaggagaatcacttgaacccgggaggcagaggttgcagtgagccgcgattgggccattgcactccagcctgggtgacaagagccaaactccatctcaaaaaaaaaaagaccctaacacataaagagattttgagctgttaaaaccaaaccaacaaggtgggcagcttcatccctccctccaccatcagtcctacaaggttaagacatctgacagagaaggagcccttgtcaaattggtagttcgcaaaaataaaggtgtagcttttaatctaaaattctaccccaacactaagttccataactattttgattaatatattcttaaggatttagcgaccgtgtgtgtgtgtgtttagacgaaaacagaaacggttccttaaaatatccagtttgtaaaagcacagtgccttgaaccacttagtactatcattttgatcaagtactatcaagtactatcacttgattgctccaacccaataagcttgggcgagcctggcactgtgctaggatcttctggagaaatccaagaaaggtaagactgcggttttactcctcttcaccttctcactactcggattttgggcaggcaggggaccagggtgggggctccaattcccggtttgtgtttgttttttcagggggcatcttactgagcactaaacacgcgcaggtgctgcaccagatgccaggagccccgcaagcggaggagctgcgtacacgcgtgtcagttaactgggcgcacagtgcccgtggcgccgcagacccggccctcagactcagtttcccctcacagggatcgctcgccccgccccgcggcggtctggggagcagcagccccgggccccggccctgccttgccggtttccgccggtgcggctgcgtccttcacactccaccggaagctccgggcctggccgccggtaggcggtggcggaggcggcgccgaggttggctgccctacacccctgccccgggaccgcagggcggctccccggcccccttcctcgccccgaactccccgctccagctcccgcttgctgaggcggggactcctcgggtgcagccggggacctggcacctcggctgcagagaccgccccggactcaactgcccccagcccagccgcgggcgccccggccccgcaggggctcattcctctttccgcgggcaccggcgctgcctggctcccagcgctgccctcgcaactggatatgtggaggtggcgacgcgacactcccccgccctcgggcgggctcaccgacctggctgggggctcagcctgcagagccgggcggcgggggctgtgctggcgccggcaggcgcgaggaatcacagagcggggcgcccagcctcatcatggggcggcccacggagacttcccgtgggagtggggtctggtgcaggggcgccccaaaggacgagtgggagatggggacacgcggcgcagagagactcctcgtggatggagccgatggaggcccagtgtagaag

SEQ ID NO: 42656 - DNA, 2300 bp, Homo sapien
caagtgaatctcctgcctcagcctcccaagtagctgggattacaggcacccgccaccacgcctggctaatttttgtatttttagtagaggcgggttttcgccatgttggccaggctggtcttgaactcttgacctcaggtgatccacccacctcggcctcccaaagatctgggattacaggtgtgagccagcgtgcccagcctcaaaagttcatctgtgagccacatttagaaggtagataaaaaattttgactaaacacagcttagaatctataaattgttaaacttcagttctgttgagaatctttgagatccatcattctctaaatgttttctaccagagaaacaggacaatggcttgcaaatattggttatcagtatttactctatagctcaagcaaacaaacttatttgcacttaaaatacaaatattacctaccttgatttgagtgttgttgttctctcttaaatttcatttcccaaaaatgatggcaaaagtactgtttgttttaacttgacccatcttttgcaacccagcttaatcatttcacagattcccttttgaaataaatgggctagatgatcagacaatagtggcaaatgtttgtcatttcaatgacatatgcaagagatacctttagtgaaatttgtatatcaaatttccctttgtgctccttttttccctagtgaattcagcattaaagtgtttataaatatttttggtttattatttattaattcaaagcaaagaatgccaatgtgaccataaatatctcatttatatatcataaatatctcattatagaaatatgtttagagacatctgttttattattttaaagaagagtacatattatatattaaggtaaaaatagtactaaaaaagagaaggtagtaaataaaaaaattctaatgaacataaaacatcataaaaattaacttaattaaaaatcagccaggcacagtggctcatgcctgtaatcccagtactttgggaggccaaggtgggtggatcacctgaggtcaggagttcgagaccagcctggccaacacggtgaaaccctacctctactaaaaatacaaaaaattagctggatgtgatgggacatgcctgtagtcccagctacttgggaggctgaggcaggagaatgccttgaacctgggaggcagaggttgccctgagccaagatagtgccactagactccagcctgggcgacagaaagagactctgtctccaaaaaaaaaaaaaaaagtataaagataaaattttagtatattgtgaattaattactagactcaattgttataggaagctttgtttttctggagctcttatattaaaattattaaaatcctcactgaaaagtataacatgtgttttctttaaaagaaagatattctatatctgaataaagacaaactttgaacgagtggtatatgccttaataaatattggagaatatctattctccaatacttagagaatgacgacagcatcctccacatggcgttttcattgccagtcacaactttcctccacctagtgttctctagactgagacagaccaaggaacaattccctagacctcctttgcagagctaggttatgctcagaccatttgcagcaccaaggacactgccattcaggtcaccaaaaaaagatcatcttgtgagccctgtctaaaccaggccccttctaaaatcatttcagtgtgaaactgagtccaggtgggtcttcatcagtattagagtggacctgccagatgtatgcttgcagatgatgcaacatcaaagcaaatgccctgggcaagagaagaaaggccaaagcaatgggcttactggtttctagctttgagccactcttcatagtgccaaattcccattttagggtccctttatttgtattaataaaaataaattccctgggtgtaagttcctgtaaagtactccctatctgtattcctgggcatgaaagggtgttttagttccaattctagttttcccacttagaggttcacctttctgacattaataattaaccagattatctgaattcttcaagttcagtttatttaaaaggagactatcctcaaaagtgttatatccgtggtttcctgctacctccaaccatgggccttttgggaatactttgttttttaatcttcctggggaaaacctggggacaggagcaaacgtaagtaaaacaagctatcttcatttttcaatgcatcttagttatgacgaatgaagagttaaatttaacagattctgttaacttgaaaataacttgctacttctg

SEQ ID NO: 42657 - DNA, 2300 bp, Homo sapien
tctgtgtcgtgtaaatagttggggagaggacagcaccattcacttaaatgtcaatgggaatcacatttaagtaaaaggaaaaggaaatcagtaaatcaaagtaaatcaaagacacatctgcatccccatgtttattgcagcttattccctgttggacgtcccctgaatttcctatagaggtgaagccatctctgccttaaggaaaaatgaagtgcctaatactgcttataatatggtcccttttccagatttagcttctccaccccagatttttgcacaagccatactgaactacttcatgtttccatactcatgttttgttccagccacactgaattacttaacattcagcacattgccaagctcttttcccccgcttccggggtttgcacaagttgttccctttgccaagcaaattcttccccacctccctactccttgcctaaactcttcttttgggcgtagaaagaagtattgcttctgggtaacctttgtctaataatgaaatatctaagacatattgagaacttactatgggtccctcactgttctaagttctttcacagagattcacttttataattatcaggaaaactggactttttttttttttttttttttttgagatggagtctcgctctgtcgtccaggctggagtgcagtggcgcgatctcggctcactgcaacctccgcctcccgggttcaagcgatcctcctgcagcctctcaagcagctgggatgacaagcgtgcgccaccacgcccgggtaatttttgtatttttagtagagacggcgtttcaccttgttggccaggctgatcttgaattcctgacctcaagtgatcctcccaccttggtctcccaaagtgctgggattacaggcatgagccacagcgcccggccaggattcacttttataattatcaggaaaactgtaggaagtgttaataggtaaaaggacctcatttcatagataaggaaactgagacacagagagagagggagtttctaaaagtgttatacaggtggcctataaactctgtagtgaagaaaggaaatgaagacaggatagaatgatcgcgagaaaatggtaagaacaagggactggaagacgcaaggaagtttagaaatacgctggcataggggtcttttgagcaggcacgctgctaagatgataggattatagtcaaggatggggagcgattgcactggggatttctggagcgggtgcagcctctgatggtaacatggtccagggtataccttcaaaacgggaggctactggagtgaaaggcgtcaatggtgataacactttaaaaaaaacttcagtgtttccctagcatccagcccagtatctgctaaattctttaaaatatctgttgaatgcatgtcgtgaacgccgtgctcatgggcaagccccagatgaagcctgtgcaagtgcttcttgctttaactcccttgtagcaatcagaggaacatcctctgcctaggattcccaagctccctgaacctcacgcgacagctggagcccaggctgcgtccgctttgaggttcatccgagcctgggcagttcggtccctggagggaattcgctttagatacgactgtcagagagaagtgtgctgataagaacactcgctcatagcgcgcaagcatcagaagtgggggaggccggggaggcgctgcgccggtgcctcaggccgtcctcggacacaggccctgagaagcgtgtccgtgtttcagagggtggcggcggcagctttgtctcagcgaaggccacagcactgcgggcagctgccgcatgaaacctcggctccccctgactctgcacccgacacttcacctgcaacgcaatccgaaggcgaaggcaccgcatcccgtcggccccgcgcggccggaagcctcgcgcccaagactccccggcatcctagcgcgctggctgcaaaagaggcgggaaacgcctccgcgtcccttccaacagtaccggagagggagaggggcgtggctgagactagccccgaccacgcgcgcgcggcccctcggcaaccggcacaacacaacaaaatggctgccgcgccgctgggcccctgaggaaagagcccgaacttctcccgctctacctcagcctgcgggactgctcggctcggcttctaggcggtgagcgtcagacctggccgagcccgttccccggcatccggcccgagcagtgggggccggcggcaaaggcgggaaggcccggaccgggcgtggtgtgggccggcttgggatggattcggggcgggggcgcgtgtctgggaattg

SEQ ID NO: 42658 - DNA, 2300 bp, Homo sapien
ggctagggcgagtaaaggagcaggataaagagaaaaaaaaagcaaataaagttcagagctgcagttgtattttaaaggctgtctgcagagcaagagaaagccattggaatgacatgataatcagaatcctacgtccaggcaacaaaacactacccatcctgccacctataaacccagatagttgctctgatctaacaattcagtccatcacagcttagtacagactgcaaactccacctccatccagcctttcctaaccttcctaacttcccatcttctctgatctccaaataacgcagacctccttctgtctctctacagactccctaatatgcaaatacccatccccatttattaacccccatatccctctccttagccctttaattggatttcagtactttccaagtctacttcatcccataccctctgacctactgaaatacttttactccttaatcttctcctcctttcaaatatcctgattccgattcctctgcaaagtctccagccatttttctttccaaagccaattcccccattctgtgctgcccacccacctctgcctcccattcttctttatcccattctgattgccaattttcccacaaattctatcccagttccctaacacagtaatagtctcccccatttctctatggttctttcctgtgcccagactcaacatttctctatccatccagacttcccaagctgctcatctctcttcaccccagaaaataccctgacatcctaatgcgttccaatactctgacctccaattactcccctccctaaacaaaatactcaaacctccatccattcctcttcatcccaacccaactgcctgcctatttgcctttccatcctaatactctagcccccgtatccttctccatcctattaaaagcctgaatcccctctcccatctctcttcttctgctcagataccctaaaactcaagcttcccatctctttccattaattattcaattttattgagcaacttttatgtaggaagaaccatgctagaatctaagctcaagatgcagaagattttatctccctattacccatgatctctgcaccaagcagtctccttcatagcattttataaccattatttgtgaaactacttggttgttgcctgtttctccttctagactataagctacaagagagcagaggttttgtctgttgttctataaacaataaatatttgttgactgaaggactgtactaaacacttagacaataccaaatttaaatcctcaaagatttagctgtataggatcagaattattaacctgatttacaaatggcaatgtacctgaacagttaaaagcttggattctggaacgaaacagcctgagttcaaattctgattttccacttactgtgtgatcttaggcaaattacttaacctctctggtcctcagtgctatcactttttaaatggggatgataacctcatacaagttattttaaattctaaatgaggttaatacgtgcaaagtgcttaaaactggatctgacaaatagtgaacacccaaaaatgattcgcaattatttggacaaatgaggaaacatgatcaggaaggctcagacacatatccagggtcacagacctggttaagttacacaaggtggcagaattgaggcttcaacccaagtttgtctggcttcaaaattctctagtcccttaacgaatataacggaagtgtttgttcttccccttcttttagcatttcgtccccatatcctgtcatctttctccacgcactgtactccgtccgataccgtgacaacccgtcaggacgcccaaactgtcctttctcccgctcactccccacagacagctggcacatcccagctctcccctcagctcaggtggcaggacccacaaccttctgggcgccgcaccctaacttccacacctccccacactctggttcttcatccccaatcgcccccgccgtccccacctcttcccatccaaacctccctccttcatccaccgccccacgcccgttccgggccctcccctctttcccgtccaatcccaattcccagacacgcgcccccgccccgaatccatcccaagccggcccacaccacgcccggtccgggccttcccgcctttgccgccggcccccactgctcgggccggatgccggggaacgggctcggccaggtctgacgctcaccgcctagaagccgagccgagcagtcccgcaggctgaggtagagcgggagaagttcgggctctttcctcaggggcccagcggcgcggcagccat

SEQ ID NO: 42659 - DNA, 2300 bp, Homo sapien
ctgctaggtaccaggcactatgctagactcgggagacagtgtaaacaaaacagacaggctctcgtggagcatacagttcagaatggagacaaatgttaagcaaaatgacataaatgtgtaatttcaaactgattatgtgaggaaaaaatacaaattcattgagagtatagaaccggggacttcacttcatctgccctgcactggaggctttcctgaagaagcaacagttgagctgatctctgaaggaagactacaaattaacatggtaaaaagaatgagatcaagcattattattactgtgaggaggccagtgtgactggagcccacaattgagggaacgaatgacagaggtgaatctagagcaatagggacagatcatgggggaccaccttgtaggtcatggtaaagatttccttcattacagactgctggatttacttttttttttttttttttttttcctgagatggagtctcgctctgtttcccaggctggactgcagtggcgcgatctaggctcactgcagcttctgcctcctgggttcaagagattctgttgcctcagcctcctcccctcgaccccaagtagctgggattacaggtgcatgccaccacacctagctaatttttgtatttctagtagagacggggttttgccatgttggccaggctggtctcaaactcctgacctcagatgatccacctgactcggcctcccaaagtgcggggattataggcatgagccaccgctcctggactggatttactttttaaatagatcactctggctatctgactgcaatgtaatgatggaagaataaggcaagagagcttgtagacagatcagttagaagctgttatagtagtttgatgagggcttggattagagtgcgtgagagtgaaaatggaaagaagcagacttaatttgagaggttatttgggagtaagaattaacaggatttagcgattgactgagtatgggacaagggaagagggaggtgtcaggaatgactcccaggtttttggcttattccagcgagcagtgttcagtatttagggaacactggaagacgaaaaggagagtgagaggaggaacggggtaaataaattcaatctggactgagtgtaggatgccaatgagatatcacgtaggcaattggaaataggagtctggagctcagagaaagattggattgaggttataaatatcggctgggcatgatggctcacacccatatgtaatcccagcactttgggaggccaaggcacgtggatcacctgaggtcaggagttcgagatcagcctggccaacatggcgaaaccccatctctactaaaagtacaaaaattagccgggcatggtgacaggcgccaggaatcccagctgctcgggaggtcgaggcagaagaatagcttgaacctgggaggcagaggttgcagtgagccgagatcgcaccattgcactccagcctgggcgacaagagtgagattctgtctcaaaaaaaataaaaaattaaatagagtaaacacatggcattgggaaccatgggtgtgcattaatttgtccaagataagattagacagaaactagaagggaccaatgaggagttctgatgtttaaattacactgcaaggaggaacaaaagccagcaaaggagtccatggagtggccagggaggcaggaggataccaggagaatgcggtgtcccagaaaccaaaggaagaaactttgaggaaggagagagtgctcatcagtattaaatactgctggttgccaaatattccagcttcctgcattctaggaccccgttatgtgggtaaaaggggccttgggactagtttggttcaataaacagaacaggaatgacaacacttccagctggagcatgtgtcaattctatcccctctggagatcccttttctctctggcaaggtcatcagtgatgtttgatacagtgtctgctccatcagcttggagtagtatgggtcctagcatttatggcctctgagtttataactttatagacctgaaggttctagaaagaatagttttgataactcttaaaaattaatcttgttgaatatactgaaaactcttacaggttttgatgaacacctggctttattcttgcaatgaagaaaggttctcaacaaaaaatattctccaaagcaaagataccatcatcatctcactctcctatcccatcatctatgtccaatatgagatctaggtcactttcacctttgattggatcagagactctaccttttcattctggaggacagtggtgtgagcaagttg

SEQ ID NO: 42660 - DNA, 2300 bp, Homo sapien
cctggttcaagggattttcctgccttagcctcctgagtagctgggattacaggcacgtgctacgacgcccagctaatttttttttatctttagtagagacagggtttcaccatgttggccaggatggtctcgatctcctgaccttgtgatctcccctcctcggcttcccaaagtgttgggattacaggcatgagccaccgcgccctgccatatatttatttgtttattgtctgtttctgtgattgagaacaagaactttgttttctttattcactactttgtttccagtacctagaacagctcctggcccataatccatgtttgataaatatttgtggaatgggtgaatgaattataatcttggagagaaccatttgatgtggtagaagatatattgccttaccaatacaggttgagcatcccaaatccaaaaatctgcaatgctccaaaatccaaaactttttgagcactgacctgatgctcaaggaaaatgctcatttgagcatttttgggttttggattttttgatttgtgttgcttaaccagtaagtataatgcaaatatttcaaaacaaatctgaaatctgaaactctttaggtcccaagcattttgaataaggtatagtcaacctgtagaataggaatgaatggaagacagaatgaacaaatgtagacaattcgtgtgagaacattggtggtagataaggaagataagatgatagcttcatagtaaaacaagtttagtcctaggtgatttatatagaagaaatctgaacatattgaatataaactctgggcagcagggaagaattatctagttcacgccatattcccattacctggtgcaatgcctcatatgtagtaagtgtgtaatgaatatatgttggaaaatgactgcttttaaacttgaggggaagatccaggagggagaaagaggttgaatttgcaagggcattgggggaggaggtgagatcatgcaagagcataagtacttgatttaacttgaaaaagaagacattgtggctgacatggtgaaaccccatctctactaaaaatacaaaaaattaaccaggctaggtgggacgcgcctgtggtcccagctactcgggaggctgaggcaggagaatcgcttgaacccgagaggcagaggttgcagtgagccaagattgcgccactgcactccagcctggccaacagcgagactcggtccccgccccctccccacccccgcaaaaaaaaagaaaaagaagaaagctatctctcttagtctcttagtccattttctgctgctgtaacagactaccacagactgggtaatttataaagagtaaagatttctttggctcaccgttctggaggctgggaagttcaagattgaggtgctgcatctagggagggccttcttgctgcgtcatgacatggtagaaggcatcccatagtgaggcagagcaagagagcaaaagatcctgagacacagagagaaaaaggagactgaactgtgataattaatccactcccaagataatggcattaattcattcctgagggcagaaccctcataacctaatcaccacatgaaggtctcgcctctcagaactgtcacaatggcagttaaattcaacatgagctttggaggggacactaaaaccatagcactatcttttggaagaaaggaggggaatgagagggagaggtatggcaaaagtgaggtagagggaatgacagtgagggaaatcttgttggatagtcttgagcttcttagtatatagacaatgttgttgtcaactgaagggcaaagagagtttggtagcttgagtagagttattactcctagtcaaggagagctgcatcaagggattctccaggagagcagtaagggtatattattttctgatgactgatcaaacagaccctgatgcacataagtaaatgttgtactttatgtcaagtcatctgttgtgtaaagtattcattcatttgtttccaattagtatattgagaatttggaaaaatgtgttaaacttgaagtactgaatctcagctataatctaatagggaagattgaaaagttggacaagctgttaaaattacgtgaactcaacttatcatataacaaaatcaggtgagttatataacaaaatctttaggcagcattgcagatagctttgttagagaggtagattaatgttatccacattactgaaagaatgatttgacagaaacagaagatatttttatctttattcatcaatcaaatgaatgtctgtctcttcacatatggtaggtaactgtctttatgtt

SEQ ID NO: 42661 - DNA, 2300 bp, Homo sapien
aagagcaacttgtattattacagtttaactctccaagtgacggtatctgtttgcttcttcttttagcccttgtcttggtttcttgcaggcccttttctgctgattctttattcttccttaaaggtagttcttccaggcctgaactgtgtttttcagggtttgcatgataacttgcattaatatgcttgcttacattttaagttttgaaactggcttgtcttcttgggaaatgtggttgtgtgcgtatgtattatttttttttaatggatgtttatataggagagcaaatttgaatgtgggggaaagaattatttttctgattggtaaatatgttaccttcagtcaactcttgattatccaaagctaatactgtgactagcctactttccagttcatttgacatctattttgcttttattcatgcatttcttcaacagatatttattgagtgcttacaatatgctaagcctggggcttataaaagtcacaaaagtactttgaaatgcacagcctatttattattatttgcctgcagagaccagttcatgtattctctgtgattccagtcacatttgcctgttgtttgccactattgccaatgagttttgaggagagaacccaagattagttgacagtgttgattgtgagttgctttcttgagactcggagacttatgatcattcagtgaaaatatcaatgtgggtaatgtgctggacaccctgcagcagtacatcgaaggcagcatggaagaataggcagtattggatttgaaatcaggagacttggaattgaattctgcctcttccactaccagctgtgaaattgggcaagttatttaacttctctgtgcagcttttatcatcttattgggtggttgtgaagatttagtgcaataacatatgtaaaatgcttagcacaatgtctggcacacattgagtatttggctcaatgttacccattatctaggctattacttccattttgatggataatcaggaggtgactgtgagctaaatcatgcacgactttgatttcctgggccttgtaaaatgtttgtgtttgtttatgttttattctcttcagcttgcacttttatattaatgaaatttttctgcatgttttttctttgatatctaccatcagatactggccaaaaaaagacaaaaatcacttagtggatctttgaaataaactcaaagtttggtttagtagaaaggagctagtactagtagttagttaataaaatatttagtttctgacactgatctaatatgtaactttagacaagtcagttcatcaatctgagacttaatttctgtatttataaattcagagaattagattggatcatttgtcttctccaagctccaaaaatttctaagaataaaaagttatagtagaattactttattaaaattgaatattacatatttggatctggttgagcttattcacatcccttattctttattacaaagaataatattctgaacacttaatactacagcaacaacagtatgacaattaaaaccaagctcttcttttcatccttctcattcctctttatttctctgcagttaatgtcagttatcattttcccttgtaatttgaaactattgttaaagtcggaaagtcagtttaagaaattagtgctaattattggaaaatcaggaagcaggtatttattaggccagttacacaaaaataattgatacaaaaatattttcatgtttaacaaatttaagtgatttttaaaatcattattcattatatcgtgaagcagcagataaacttcaaaggtcttttacatgatctctgatgaaataataattttgtatttcattttttataatttagaagtaagataaaatgttctgagtgttgtgcagcttactgtgaagtttttaaacatatatgattataacttacgatgagaacttaccatatcatcacacctttatactaacttactgatcctgtatgttgtctcatatcaaattgggccaatagctaaaacagaagaccatagaattaacacgagcatgtcagaagcaatatgagctggaacaggaattggccttttataaaattgatgctaaatttgagccactaaattattatccatcagaggtgagttattttaattttttagtaatccaaagttaaagcccacatgggatggaatgggggagggcaggtggtgaggacatgtaagggatttgatcagatatcactccactttcttgttatgagaggattaaactgtattttggttcaatctatgacttatttggctccgg

SEQ ID NO: 42662 - DNA, 2300 bp, Homo sapien
ttttattttttatttttatttttttgagacagggccttgactcctgggctcaggtgattctcccaccttagcttccagaatagctgggactacaggcatgtgccatcactcccggctaattttttatatttttttgtagagatggagtctcaccatattgaccaggctggtcttgaactcttaggctcaagcgatctgcccgtcttggcctcctaaattgttcataagccatcttaagaagtttgaattttattttgcatgcaatgggaaatctttgaagggctttagatagttgagtggctgatcctatttgtcactttgccttacttcatgaagagtgaaatggactgagtgagatggaagggatgtgtgcatctgtatctgtcaggaggctgttgttcagtacaggcaagagatgatactagcaccaaccaggaaggtgctggtggatgtggagagaaagccagctgattccaggaaacactggacagtagaactgacaggacttaatgatgggttgaaagtaggagatgaggtagagggagctatcaagacggttttactaatttaaaaagaattttttataatagtactggccaaagctttacatagattgatagatgtaaataatgtacttaattttaaaagaaatagatacttccaaaatatgcttggaaaatagttatttaaatgagttaacattaacagttaataattaataataaagttaatagcctaaatttttgtttatactgttcacttacttgacatgctaacaaaggtaagcttcagctgggttctgattcagtgaaataaaaatctcaatttaataagagtttgctgtattttgaaattatttagtatgagatgattgtccagtgaacacggaattctaaaattttttcctgattataaaggtattgcagttatggggaattacataataatcgtccatattttatttcttttcagtcttttatcttcatcttttttacacttctatacagactcttgagaaatttttatatttgtttaaatctctatgctaaaaactgttagaaataagagatagagtattaagttattacttctatgtcaatactcaatttattggttgactatcttcatattaaaactaattaggtaactgtagcgtagtagtcagtgaaattgtctagagtcacacaaagtcttgcttccacaaactcctagtatgaccttgggcgagatatttaaattttccatgattcagtttctttatctataaaattgggataattatactttttactttatatgttttgaggattagattaaaggatataaagaggctgggcatggtggctcatgcctgtaatcccagcactttgggaggccgagacgggtggatcatgaggtcaggagattgagaccatcctggctaacatggtgaaaccccatctctactaaaaatacaaaaaattagctgggcgtggtagtgggcgcctatagtcccagctactcgggaggctgaggcaggagaatggcgtgaacccgggatgcagagcttgcggtgagccgagatcgcgccactgcactccaccctgggcgacagagcaagactccgtctcaaaaaaaaaaaaaagtatataaagagtttagaacagtgcatggcccatagtaagtgctatataaagttggctattattaatactatgtttattattaataatttacaagttgcctatactattatagaatgacagcttatttgtgcttgctattattagttttcataaacttttataaagtatgattttctacatataagcataaaaatataaaatatgcatggagtgcttagataactcccacatttcacttttatttttaaaaaactgatagaatatagaatacttattaaaattatagacattgtcttaataaatcagtgttgttcttctctgttaattatatattggggtttggggagattagatttcagaagcagggaaagaccttctttacaagcagttgagtggtagactacaacttgtaaataaattacgccaggaagctctggatctagaactgcagatggaaaagcaaaagcaggaaattgccggaaagcagaaggagattaaggacctgcaaatagccatagatagcctggattccaaagacccaaaacatgtgagtaaattaagaaattttgacttgttctgtctacatattacatgtctcatcattgttagcatcagagtccagagtcctttctgaaagtctgttttagtttgatgtacaaatttaagtgatatata

SEQ ID NO: 42663 - DNA, 2300 bp, Homo sapien
gctcaggctggtctcaaactcctgacctcctgatctgcctaccttggcctcccaaagtgctgggattacagtcatgagccaccatgcccagcccttcatctttcttaagagcagaaaaagctgaagggggttgcgagtcctttttctacctcttctatttaatcctttttgcaaattttccactgaacgtatttgttttttcatactgttttgttttgtccttaaaaaaggaaacattctctggaatgtttcttcctgagatatggctagatatggtcaggtggctggatacagccaggctcttgtctctgtctctactctaagaagttgtactaattgcttatattttagctaatattcctaaaatacaaggaaaaatatcttctacatattctcctggtataccttgaataataggggttttttttttaaagaactttaagatctctggattaatagaaatcatagaatttaacatagtaaggatattgtaattgctttaagtacttgacaagttgtttaactgttcctttaagcattttagtacatatcatatatatttttttgtgggccagctaatttcaataaaggataaccttatgacagatataaggtcttttctaacaaaagcctaaaaattgaaaccaaggtattaatattgaaaccaaaagtagtcttgattattttaaataattttgaggaaaaatggggtattttaagtaatgtataatgtggtcaataatatcttactttattgcatatgtttgttcaatctcccacccatgtaaggtccctgaagacatgaactctatcctactggtatccgtatccccagggaccaaccagccctatgtttatgaatgcttgcattgtggaagggaggaaggaagcagcttatagatcctacccaaaactcctttgcttccccttccagttctgtgatctatgagtctaattagtagctggattatgtgtttgctttcaacaaatgactgttatatttctggcggacagagagttcaattcccactggatttctgtagagaattatacatggaaaggaggtaaatgagacatgggaatggcatccaagttttgaagttagctaaaatcaacctgtgcagtggggatgaaacatacaaaccagatttgaatttcctttttaattttattaaaattactaatagttcttaagtttgcagccttagtcctagcatcagaggacatctcttttaagtttatccagcgggaacatctttttctgattcacaaagtttcatattggctagtgtttggcatcccattttaggctacaaaatgtgagcctttaagcagaagagaaataatcaagagtgagatgcctgcatatttttctatagatataggtagacttttatttaattaatttttatgtaatcagatgaagtatctttctgaatagccaatagaatttaaaagtaaaagcttcactttgatgagatattatagaaagcaacatattaagtgcccacaatgtgtcatacattgtgctgtattttccatgttctggtgaggaacttttattaacatctatccatttttctttcaatttgcagaggatgaaaatgtgatatagaaatattaagtgaattgcccctaagttattgttttagaaagaggtggagcccttgcttatgctaccacaatgaccctctcttcacaaagcaattaaaggtctaaagagattattttaaaattagctcagaactaagcctaggcaggttttcagcaaatataagcatttaactaggtttcaaattcacagactattttagttataaaattattcatagaagcacaaattatcaccggagcaaacataatgaagatttgtattgcttttctctattgggaaatgtcctattggaagcaaaaggtaactgttcgctagagggaacgagctgtagtgatctgttgcaaagtttgggcgtgattggcccctgggagcttcctgtgttatgatttaactcgcggagggtggggcctgcccgcagaggctgctggtgattggatgggcggggccgccgctcactcttggccaagaatgtggtttgaggctctgcgaagttacagaggctcggaggcgcttgcaaaaatgtggctgtcagagagggaagtgcacatgaatttgaagacagcattagaaagcgttccgcccacagtttctctgttctcaacggctcagttttaacaggataaattttaagttaaggtatgatattttttctctctctgtacaaaggacttaaaaggaggaggag

SEQ ID NO: 42664 - DNA, 2300 bp, Homo sapien
agagatggggtttcaccatgttggtcaggctggtctacaaactcccgacctcaggcgatccacccacctcagcctcccaaagtgctgggattacaggcatgggccaccgtgcctggccgagacctcttttaggttgatgataagttgtagtttgctgtctccttttagggttggttgaaagatccactagtttaaattatacttgcaagttacagaaaacatatccaataaatatttattgattggccattgagggccaggtactgtggattctctagggaaagcacagacatggtcaccatcctgtggagctgacagatctctgattggtaaactttagtccagcaagtgaaacaggtatggaagaaagaaagggacaggattctttggccaaggaggaagtagtcagggaagaccaccctacagaaatgatgtttcagctgatggctgatggatgagtaggatttggccacgcagaggggacagggtgaaaggagtaaaggtaaggtatttgtattctaggcagagaggtgaggagagagagcatatagtacatttgaagtgctgaacgtatgcctccaggatgccaggagcagggagaggagtgaggaaagagaatgagaggtaaaggcagagaggcaggcagaggccagttgtaatatattctttatcagattaaaaatacaatttattagccagatgagctgcatcttctttcaggaagcccacctcaacctttcctttctgcctgctgaaaatctgggttcaggactctactttggttttcctataacctgtgcacagtaaaggtatttatcatgcatatgatgatcatctgtttagatgctcctagatgatctgtttgttttaccccagctagactcagagctcagtgaatgcccaaattgtatctgtttgtttctgctttttctgtgcctggcatatgagaagcgtcaatatgtgcctatttgatgaaaatgaaataaataagatattttgaatctcaggaatgcatgtaaaaataattcatatggttagaaaaggaactagaaatatatctggtttattatagtaattatgtatatttctttacttatgagatatcagatcatcacttgacagttgtcaggattgtatttctcgagtaccgagttttgtagaagtatagttgacaagatcagagtctcagaaatcaggaggttttaggaaaacaattaaaataacagtaaatattttaaaataataataaataaaatttctagatggcattttccttaataaattctcctcttttcaagccagactgtactagcttgaaatacactgtcctttgtactttgattggcttttattttcttctcataagtcttgacaaaattattttaagagcctggccttttcaccaattcacttggtattgaaagggacattccccctccctcagcaccaagactgccaggattggtcttcaaaccacacattgagaatatgaagcataacagatctcctgtctctgatctgaagatctacagatctctgattggtaaactttagttgcatgaactcacttgtgatgcttgataaatacagattccttggccccacccactctagagattctgatccagaatctcttttctgagatagagtttaggtgtctgcatttttaacagacatacctagtgttgatacagtttttttgaggaccacagtttgagaaatactagtctaagggaaaggagagcaataattgttggatcacttgcagaacttttaaaggtaggtgcctcggcccacccctgaagattctgatttggtgtatttgggctgagctgattctgatgcttactccttcttaagtgttaataatagtttaaggattgtgtgaaaaaattatctttggtttttaaatttgggagtacaaacataaaattgagttgtaaaactatagctagcaagggattgtgtgtatatgtaaatttatttgtgccttttaaaatcataaattattgctgttttacactttcatgtcattgcttcctatggtgacagttagaacaatcagcccttcaagcagaacttgagaaggaaaggcaagccctcaagaatgcccttggaaaagcccagttctcagaagaaaaggagcaagagaacagtgagctccatgcaaaacttaaacacttgcaggtagagatttgttgttttagaatacattcttacacagaacacccaaagatgatgatatctttagtcaggcacttagcaacctgctctaacatgtagtaagcaatttgaattac

SEQ ID NO: 42665 - DNA, 2300 bp, Homo sapien
aaccattcctgacaactcattagtaaaaaattaagttacagcctgttgtaaaatgggtgataattctataaaaagtttttattttgcttaaaacatattttgcctaaaaatcattcttgaaattgtatttcttcacagatgaattttgataagaggcaacatgaagcaagaatccagcaaatggagaatgaaattcactatttgcaagaaaatctaaaaagtatggaggaaatccaaggccttacagatctccaacttcaggaagctgatgaagagaaggagagaattctggcccaactccgagagttagagaaaaaggtaggggagacttagaaaatgagacacataagtacctgctgccagtgtcctgcccactggcaactaggtcagctgagatgggtgtgatctgtagtcacctctggctgcattgctggcacagtgctgaacctgacctaggtgggacctggatgcatgtcattgaatcaagaagctaagaccatgtgttgtggtagatggaaacgagaattgagaatgtaaggagtgactttcaagttaattaggtggtacttaacaaatgatattgggaggagtttgactcctttgaaacctcttgtccagttggatacatccatgggaaattacttttaaactcctcatcatcctttctaatacccctgcctctctttaatggcttttctccattccacctcaaccatctactcccattgtcacattctggactttgtcaagtttaaaaattgcacccacctctgaaatcacaaactgaagtgtcttgctctgatcataaccgcttatcttgctggtatccacacacttaaaatttgtcagccttattgagcttccagttcattagcctcacccccacctttgctatctgttaagcccttgtctttactttcttacttgtccaacttaaattttgtggtctaccaactataacttttttttttttaacaaatatcctcaagttccttgcccttttctactgttttatttccctgacaaaactgaagctctctgctttctttgggccagcacttccactggttgttcctggagaaaaaagtcaccatccagtattgtggtgtcattataaactcatagttaccaatctcaaatagacaatatgacccttttctgtggtgagcttcctctcccatgcctcactgtttcacaccttctcattcctcacacctgctgtctgctttctcccagcctcagtgaatgccttgcttcatccttccctgagaactcttcagtttccaagtcctattgaatccatctctaaaatgtatctggaatatatgtcctttttccttctctgatgctagacccttgtgctgtcatcatctctcttctggatgactactgtggctgtctgatcgatctgtcacttctactcatgaccctgctccccagagcagccaagatgctctttctgaaatgtcaagtggctgtaatcagtctcccctcctgtagcttcctttgttcttaggagtaagaccaaaattcttaagcctacgaggcctacatgatttgcctctgtttagatctctccatttctcactgtgctcctcctatcattttctcaaaaatgccaaattcttgtgccaccatcctatgcccagggcctgattcagtgatttcaaaggcaggttcatccatgccgtggtggtagtgctaggaaatgtttttccaatgaatggatgaagttatgaccactaagattcttgactaagaagacctagtacaagtttctcacagttttgagatctattatttattcattggatatatgtggagtacctcctgtgtatcaagtattgttctaggcagcagtgaacagagtccctaccctcctggagcttacatctgaattcattcctgccaaatgattcatctgtttaattaatatttcttttattttagaagaaacttgaagatgccaaatctcaggagcaagtttttggtttagataaagaactgaagaaactaaagaaagccgtggccacctctgataagctagccacagctgagctcaccattgccaaagaccagctgaagtcccttcatggaactgttatgaaaattaaccaggagcgagcagaggtgagttcacatgtacagaacaggtttccatcaatgatgctgctgtcaaaaaacatggcaacttgtattattgatcttgctatagacattggttattttataaaccactgtaaagttgtctgtttttcttaagacctaaagattatattccccccatcacaacccccaat

SEQ ID NO: 42666 - DNA, 2300 bp, Homo sapien
caaatttcttagtttcaaaaatgttaaagtgtgacaacaaactatacttattaaagaatgtggaaatagaagcctagacctctagggttgcaaaaggatttcaatatcaccttagattagattatcatgtaataatcatttccatttcttattatataccagatattttgcatatactatcccatttaattttcacaaagacctatttgagagagatattactattttcatattgcagaaaagactgacaatctcagaaatcaagtgacatgcacaactgcataccattagattatagagcaggaattcgaacccaggtctctgaaaatatgagatgtacaaactggcacacacttttacagtgaaatctcacttgttcatggcagaaccagttcataaaaggtcctgaacgctaagagaaagattgatttaatttgggggtggggaactaaggcagggccaccttatccattaggcacagtacagtatgcacagggcttagggcctccaatacttttaggggccaacaaaaatgaatatttatttattttagagacagggtctccccatgttgcccaggctggagtgcagtggctgttcacaggtatgatcccattactgatcagcacgggagttttgacctgctccatctccgacctgggccggttcatccctccttaggcaacctgggtggtccctccctcctgaacttaagtgcagacactctatctagtgacacagtgcactacagcccagaactcctgggctcaagcgatcctctctcctcagcctccccagtagctaggattacaggcgcagactaccagccctccttgcttacgttccttttttttttttttttgagacagtctcgctctgttgcccaggctggagcgcagtggcgcgatctcggctcactgcaagctccgcctcccgggttcacgccgttctcttgcctcagcctcccgagtagctgggactacaggcgcccgccaccacgcccggctaatttttttgtatttttagtagagacggggtttcaccgtgttagccaagatggtctcgatctcctgacctcgtgatccgcccgtcgtggcctcccaaagtgctgggattacaggcgtgagccaccgcgcccggccggcttacattcttttaaagtcagaagaaaaaaatgaactttcaggtcagagaaaatattttgttatataatattgatacgtcatgtttatatcaatgcagttgtaaaatatgttaaatatttatacatatatttaacttacatgtgtgtgaaatatatgtgtgtgtgtaatgtacaagccacaaggcaaaagtgctcagggtccaagaaagtcaaaacgtgtccctgcacccgaaaagcacgaaaccttctggggcagtgattatggcagagcaagttggaagatggcaggtggtagacaaattgtgaaaaatatcacatttctctcaccctgtcaaaggcaaccccaaagtgaagtcaaaatagagatgaaatgcagggtcacttcctagctgcgtgatcttggacaagagagttgaccaacctgagcctcagtttctccatggatacaatggggatgcgtgcctccgacgtttgttggacaggaccggtatatacgaagcatacagcggtatatacagtaaatgcccccataaatacacgttgaatgaatgcagtaaatgcatgcttagcatggtggccagtatacggtaagcgtccaataagtggtaaatgttggctttaaaaattgttcaaaagtctccacgagcgacaaccctagttctccaagacgcaggcgcaccccaccaggttccacgcagacctgcgcagtagctcccccaagaggcgaggacacgcgactgcgcttgcgcatacgcgctttccaccttccctccgggcgcgagcgcccgtggggcgggcctcagcggcggcgcgacaagtccagaggtgagggctgaggaaggggcgtggctagcgggctggcctcagccaccctcttccgggctccgccagctgcgcgcgcatcttctcccccttcttttgtggtccggcccattgcgagggtgacaggaaaccctgtgcagggagcgccgccatcttggaccagcccgaggaagatactgagggagcacaggagcagtcaccgctgccactgctactgccgctactgctgccggcgcgtctgcacctctcggcctgccagtgtacctgccggcgcctcggtcgaccgcccccgccccctctcccgctgcgtccgcactcctgttcctggtcctga

SEQ ID NO: 42667 - DNA, 2300 bp, Homo sapien
tatcttcattatcatttctaatgattcctggtgataccctgttcccatgttcctctccagccaccaaatggagcaattacagggttatgggtaggcatctgacccagcttagaatatggaaccttagatctagcttagaatgtgaacccttttgctctcctggcctcagtttctccatctctaaagggaggagttggagcagacattctccaatgtttcctccatcgtgatgtggtattctccagttctatggggacacagattcagagttccacctccctttgtctgagagcagttgctggggctggaaatgatatgttagataattccaaggcatgtgtatgccggggcttgtaatcaaagattccagagccaaataagcctgtgtttttgcttttctccccagcagccttgcattgggccccaggcagcctctggagaaagcagagagtagcagagatggtgtgagcctccctgcggggtggataccttgcttgtattctcagagaaagtggaactgggcagaatttcccaagccaggaaaggtggcagagtgtgacataagacattgagcaaagaagcgagggccaaggactcaggcatagaagagtagactgcacagtatcagtagtgtgacctccagagagtacttaaccctttctgtgggcttggcctgctcatctgaaaaatacacatggtaatgcctcccttaggaggccaggtagggaggtgagaattaaagtcggtaatacgtgggaagcccagagcatggcatgaggcattcaagaaatggttcttgtatttactggtgttgaacaaagagagaatggcaggaggaagagccagggtgagattccctgggtcctgtggcttccctggctgctattcaatggaaaaaccagggagtgagcactgtgctcttggcttctgtgctacttaaacaacagccttttctgctctgatccccagcacccggcaattactgactctagtacattttaccttgtgttaagagggagctttaccctggctgaacatggggctgctgccagcacccaggctgggaatggacatctctgtcatgtggtgcagtctcctgtggagtgtgtgaatccttccaaaccggagtcacgcggcaactccaaaagtcctgggaactcatgtgtgcaccaggactgctgggaggccgtcttatgccttgctgcattataaacggctatcgtctcaaatgcatatgagatgttgttgaaatcaacaaagtattacatttgcttaaaattgaccttgcactcatctttctacccaatgtggatttcctcaatctcctaaaacagtatctgccatgacactaataagaacatcccttccgtttatgcagaagccacggtccctgtcattgtgctgagagtctttttctcactgagtcttctcaaccgccccatgaagcggcaattcaggatgcccatttgacaaacgaggaaacggagacttagacatgtgagctcgcttgcccaaagttacaggactagtcgatgtctggggttccaaaccaggccttctgactccgaggcgcctgcttaatggtccactttaaggaccagggatgcacttggcattttcgttacttcattcggaatgagctgggaatcgctcttcctccttattcccttccgtgggagggaatctcccctgctttgcatgcagcctatgtcactcttcgagggctttgcctcctgaagtccgttctctccagggctgaaatctgcctccgctggtgctagttgagcattgctcgcttgcccgtcccatctgagctctttggccccagcccagctcaggagctgccctgggtctcctccccgaccctaggcctcttcagatctcccctccgtgctccgggcctcagtttcctccaggggaaagcagagggcttggtttggtgccttcctgcgaggtgaagcgaggggtccccctggacgaaggcgagcttggagccacccgcccagcagccgacgggagggcctggcgctcctcccccacccgcctgcccggccgccccgccccgagggcggctcccgcccgcgccctgcccaccccggccgcgcgcaccacaacgcccccgccccgccgcccggaaccagctgagcgcagctggacccagcagccgctgtctccagtgccgcagcagcaggtaggggaggcgcgcggccccggccccgggcatctgggggtcccgggctgatttgagtccttcctctcccttccttcccggtcctatctcgcccgcgcctggagctcgg

SEQ ID NO: 42668 - DNA, 2300 bp, Homo sapien
actagattatggtgaagattatataaccaattaaatctactaaaattcatagaactataggtatacttagtgtgtgaatcactatgatatgtaaattataccttaatatactagccgaaaaaattgtaaaagcattgccgtagcatttgaaactttacaagtgtatatccaatatagttttgttcttttataaaacacaaatccagaaacaatcccttttaaaatatgcttatagtgatgcctgctcattagacaatttggaaaattcaaacaagtaggaagaaattttcttagctgcccagcccccagactgaacctgggccagcaactgcccagctgaggggccccttccagagcagtgtgactctgacctgcatagttggtgattaatagaggggctgctgtggcttgaccttggccccagaggccactggccatcaacccagggaccacgttaatgatcacaaagggcctgcagctttgcctgccatatagctctggagcccaggcccttggcacaggagagctggtgaacagaccccacccttgccctctgggagccctcactacagaccctggagcccttgctacagggcactgatgagtggagaccatgatgcgggcaacattgtcttactctgcttccagcctggaagaagatgtatgagttcaagggaatgggggaattcaggtacaagagaaggacccctaggtggaaaggaagaggcccgagtgctagggctggctctgacactgacttcctggtgaccttgggcaagtcactgtacctttctgggtttcagtgtcttcatatgcaaaatacagggtagggcctgatgctctgactcgaagcctctttcctagcccaagcagtaccagatactggttgtacaaccaaatccaggacctacaagtctctgagcttcagggttccatctgtaaaatgggtacattcggccaggtcacctctgcaggccgttctggatcagacagtccacagcccctgacttgaggaaggaggcactgcagtcactgatagcagcatgccacctcacctctgggcccagcctgggaaactgagactcagggaggttcaagtcactcaactggaaagaggtgttgccaagattcaaacacaagtctgactggcttcagagcccaggctctgtctgcggagaccaagcaggagctcctagcaccacctgacctgggcagggagcagcagtgccctttccaggtaacaggctaaatcaatcaagcccaagtcaagcctggcagccaggagtctccggagcagctgtccccacgacacttcccaggccagggcaggaggtgacaccgggaaagccctctagcctttcacacacctgatgtgactgcccaggccaaaggcctggaagatccccaggctgtggccatttagtgcaggactggctgtggcacctgccctctgagccacatggcactcaggtctggcatggtttctttgatttggaggcagcccttctgctaccaactcagtacatgagcatgtcctggtctctgcttctgtgcacctcggagatctccttgacctctgatctcggctattcctggatcctgcccagctccaggcacacagtaggcagattctctgtgtctgccacaggatgggggctgtacagcccatgtccccctgggggacccctccctcccctgtagttgacccaggacctccacaacacaaccagctctgggccctcctttcctctgtaaccttggtctctgtatgtctgcgggaccccctaccagagaccagaggaggtggcctcccccgccccttccatccccagccacagtgtacaaaaaggccttggctgggcctggaagacaccaccctgttcttttctcttcactccaaacactgttgttcttgattttccaggcagccagccactcatggaaagccctctcttggagtctatttactttttggctcactgctgttctctgggtcctcctaggagcacccgcccttctgaccagggattttgctaattgggacaatggtcagtaaacagagaagccagttatgaaacccagtggaactgaacagggcctggaaaagttccggcaagccctgtggacaggtttgcgaatctggactcagcttctgcaatccagacctcagtttcctcatctctaaaagggggagaatggtacctagagcatggagcagtgaggaagcccaggatgtgacgcacaggagctcgccaaaagtaagcactcttctttctgagcagcctgttttctgcacagac

SEQ ID NO: 42669 - DNA, 2300 bp, Homo sapien
acagctgcatagtgtctattgtaatggtggctccatcatttatttaaccaggacttttgggtcctttccagttttcttcaaacaatgcttcagtgaacatccttgcacatatatttttgtgtttgttggtaagtaattctgtagaaagtggaactgttgttgcgttgtgtgttttgagtttggataaattttttatctagagaggtgaaactggtttatgcttccattaagagcctatgggagctgtggggttttttataatatcatcctccaaatggctagggggaagggagagctctctgaatttaggccagagctggcccactgcaggctgggcaggcccaggcctggacttggagcccggagaactcaggtatccctctggggccccccacagacaccgagacaaagttcagactcttcagtgtggcacacaggcctcggtgacccctgctgccctctgcagcctcctctgctcttgctccctgtgtttcatactggacccctggtaattcactggatatggttatgtttgcctgccctttgcctatgcgtcccctccccctggaatgtcttttcttcttaatctccgtcctccctgtccttcaaggcctgggtcacaagtccctttctccacgaagccttcttataatctctccagcctgaattgtcttctctgtgttcctttagtcttttatctgaaccatatccccccttaggtgggagcaagttgtgggtgggagagggcaaacttcagcctcattagatagaggctggacttccggaagagctgggaagggggaccatagtttctggggaggggtggagaactcacatttacctagctgctggccaggctattttcatacccacagaccgatttaattctcaactactgtactcatttagtagatgagaagaatgagacattgaaaacatgcacagtggaggtgggaatgaaagccagctctccaactctccagtcctctttcctgtcactgcatcaggctgcagggtgaaggggaggtctgggatacaaagagaacttagaggtggagcagttggattctgtgcagtgctaggagggaggagaggggttggagtaggtgggaagtaggcctccttcagtttggatagcacttcccttaacccaatgactctagtgggagggtggagggatggggatgggaagggagcctgggagtgaggaggaaaggcaaactctgtcttcccccaggggagtcaatgaatagtacctaaaatggaaaccaaacaaaacaacttcaggaagtaacaagggcttgcttagagacatgacggtaaaccctgaaccatcagctaaaagaggtagatagcagtggttgcccctggggagaggtaaatgtgatggagagggaacaactgtgtacaaacatgtgactttacgttttgatcaaaataagacttttaaaaaacaaacactttttaaaaagaaggaaagaaaagtaggaggggctatcccaggagctgagcgttctgccccgcccctctgagtcctgccggcttcacctgcccacgggagccgggtcccctgccctgctgcggcgcatgctgcctggtgggggttctgcccaggcccactacggcctgagttcaaatcccggcagcaccatttacaagctgtgtgcaagttgcttcaccactctgcgctgttcccccctctgtaaaatgggttggccgttgtaccctctctgaaaaggatgtgctgatgcctcggtgaaaagctttcaaaaattgttagttcatgttatttttttgctggaggtgttaggtgcggagaggcgagggggctcgcgtgcgtcgcaggaggctcagctgggctcgccgccgctcgtgcctgcgcccatttagtgtgcacacagctagcgcccgccgtatgtcaggcctggtgctgggtctccgccccggagctggggtgcaggggctgccgcgccctgtcgggtcgatccgggtgggaacccagatgtctccaagatccgagacagatccccgccccgcgccctccctggggggcggtccccggcttgggcgggatgggcgggcggctacttaaggtcggcgacccgaggccgcggctgccgactgggtcccctgccgctgtcgccaccatggctccgcaccgccccgcgcccgcgctgctttgcgcgctgtccctggcgctgtgcgcgctgtcgctgcccgtccgcgcggccactgcgtcgcggggggcgtcccaggcgggggcgccccaggggcgggtgcccgaggcgcgggtgagtgcc

SEQ ID NO: 42670 - DNA, 2300 bp, Homo sapien
gggagcaggagcttgtgtctccacttcagaaaggagaggcctgaggctcggaaagggcaagtgacttacccaaagccatccagcattgttgtggcggggcacctgtcccttacccatagctgctctgaagggactgctgggtgggagttgctgcggtaccgtaggggaaagcagaagggtggcatgggctggaacaatccagaaagacttcccagagagccttgaaggatgagaaagatttggattagtacctctcaaagtggcttttgcaaaatactcaagctggaggcaggatatggtgaagaaaagtggttcttgggctgggttcagtgactcactcctgtaatcccagcacccaaggatctcttgaggccaggagttcaagaccagcttaaacagcatagtgagaccccatgtctacaataaaataaaataaaataagtaagctgggcactgtggctcataactgtagtcttagccactcgagaggctgagatgggaggatcattcaagtccaggagtttgaggttacagtgagctgtgattgtaccaatgcactgcagcctgggacagagtgaaaccctgttgaaaggaaggaagagagagagagagcggaaggaaggagagagagagagaaagagagaaaggaaggaaggaaaggaaagagagagggaaagagaatgaaagaaagaaaaaaagaaaggaaagaaaaaagaaagagggaaagaaagaaaagcagttcttggttcaataagatagggaaatactgtataaaacaaaaggcaagcaggtgtattcaccataggatttgacagagcctttattatgcacatgcgcgttgtataacagtcagggagggtgagtgagaagcattccctatgcttatttgaccgtggaactctttccttgcagaatgtcttaggggactagtgtgcctttgggaaacgccggttttgaggaaggaattgttgcagtttttttgatttagaaagtggctacaggggtccttgttagtggagtatgggattcaaaggggtggcagaaagatgcagtgggcagggaatctctcacttcttagctgtgtggccttgggcaaattttattcctttcctaaacctcagtttcctactctgaaacagtctcaaacaagataatgggtatgaaagtcctgagttaactgagaatcactgtgttgctggaaagcccctggtccacaagccagaatttcctttacctcaattctgtccccttcttccatatctgcttccctgggccttctcccctgggctaatgctgtctctttggccccacagaaaggaggtgtggcatcaggattcaagcacgtggtacccaacgaggtggtggtgcagagactcttccaggtcaaagggcggcgtgtggtccgtgccaccgaggtacctgtgtcctgggagagcttcaacaatggcgactgcttcatcctggacctgggcaacgtgagtcctgctttcctctttcccaggagccactgaggtgctcctggtctgatcagggacttgggtacatccacgtgaacaaatgcatagatgcaggtgggcaaaccacagggaccagcattgttcacgtacagatatgtctgtatgcaaagactcccacaaatgtagactcacaccacgggtatagtgcgtacttggactttgattgacatatagacttcctggcaccttctgttcatatgtacgtcttgtgtcctttttcacatgcttataaatatataacagtcatgggcaaacactctgggcttttgcccaccaggtgtgcacatgtgcaccatcatgaatgcccacacatgtatactcgggtatgttgtttaaggtcccacatgtgtatgtcatacatgtagttgcacatgcccatgatctatggcaatgtgtgtgggatgcccttacccaggcccaccttatagatgtgtgacgctttgtacacacttgtctcacaaatccctggagcgcagacctgcaaatggacacggcccttctaccccaaagctcatatgcttatacacctgtgatataatgtccgtgcaaacatgagcacacactgatttagtgtaagctttttattaaagcgtcatgggcacacagaggagtgtgtgaatcctgagtgtacagcttgatggattacacagagcgaacacactcacgtaacactggatcatgaagcagaacctcaccagcccctagaaggccccttttgcccctttcggtgccctcaccccaagggcaaccatcatcctgaactttctcaacagcatagatgag

SEQ ID NO: 42671 - DNA, 2300 bp, Homo sapien
ttccagtctttctctattacaaacattgctgtgattagtaaccttaaacaaacatcactttgaacatgcagagacatgcctctagagtaagttcccagaagtcagattgctgggtcaaagagtaactgcacttgtcattttggtagatagcccccaatttccctcgatagtgttcgtagcattttacattcccaccaagcaacctgtgagagtccctggttccctatagtcacactcgtggattgtgtggtcaaacttttgggcgtttgccaatcttatggtttataaaatggtgtctcagtgtatttttaacttgtatttctcttactatacagtctaaaactttttgtctgattattgactgttggatttttttttttttttgagacagggtcttgctctgttggccaggctgtagtgcagtggtacgatctctgctcaccacaacctctgccccccggggctcaagcaattatcgtgcctcagcctcctgagtagctgggactacttgccactactcaccaccacacccggctactttttatactttagtatggatggggctttgccatgttgcccaggctggtctcgaactcctctaagcgatctgcctgccccagcctcccaaagtgttgggattataggcatgagccaccacgccaagctggattccttctttttttaaacttattttgaaataatattagacacttgctgaaaagttgcaaaaatagtacagacagttctcatatatccattacccaatggaatattcacctatgttcacatcttacataacccttacataaccatagcacaattaacaaagccaggaagtgaacattgacacaatactacttactaatctataggctttacctaaatttcctcagttttcccattaccgttttttttttttttttttagacagagtcttgctctgtcgccaggctggagtgcagtggcatgatctcggctcactgcaacctctgcctcccaggttcaagcaattctcctgcctcagcctcctgagtatctgggactacaggtgtgcgccaacacacccaactaatttttgtatttttagtagagacggagtttcaccatgttgggcaggctggtttcgaactcctgacctcaactgatctgcctgccttggcctcccaaagtgctgggatgacaggcatgagccatcgtgcccggcccccactactgttcttttcctgatctaggatctaacccaggatcccacatggcatttactcatcatgtctccaaagtctctgaatctatggcagttgcccggtctttcctttttttcatgcccttaacacttttaaagggtactagtcagttattttgtagaatgtctctcaatttgacaaccccagacatttaaaaacagcttaattttttttttgactagataacacattcacctggtacaaaatgtgtgagaagactgttttaaaaattagctgcatcagcgcattaataggtcagattttgtttgcttatacgacgacatatgttggttatggaaaacttagacaatatgcaaagaggtgggatagaaaggcaaaatccccctaaatcttccctctaagagcaatcaccatggacctttttggtgaacatctgtgcagacctctctgcacgtgttcatgggaggcttaatcactgacatcttttcccacaaataggctctcgtaacacttgctattctgcgacctgcttttccgcccagagaaatgtcctggccacttttctgcatctcagatttgagtctcagagcatcttctctgtggctgttcagcatgggatgacccagccagtctcctgtgggacacatttagcataaggaaatccatgcgttgcactaagatctctgtaagcgggcaagatgctaggctgagagtggaagtgttggtgtggttcctggctctcgttgttctgaaagagtccccttccctctctatctgtttcattactggtaacagggagatgtgtaggtttctcagactcagggcaagggagaggctcagggctctgtgtgcaccctgatgctgaatctcacttccccttccaggcagggtgcccagtctacccaggatgaggtcgctgcatctgccatcctgactgctcagctggatgaggagctgggaggtacccctgtccaggtgagcccagcccaccgcctctctgggctgcagcctgagccttgtccttctcttcactcatctgtctgactctcatccatccattcgtttgtccatctgtctgtctgtccatccatccat

SEQ ID NO: 42672 - DNA, 2300 bp, Homo sapien
gcttccttcaccatgtgtaatgattcaattacttgtttgtggcccatctcccaactagagtataaggtaaactccacgaggcccttagcacactccctgccacatggaagatgctccaagaagattttgtttgaataaatgaccccaccgactgaatggactcccttgtggccaaggggactccagaaaactttaaaactgagttcccagccaatgacaggacagaaggtcagactcgcctcattataacttcatcgtattggagtttagacacaacagctgaccagcattaacgttaaaacacagatcataagactgacagaacagactgtttgtgacaataagataccaaattataaacaaattatacctaaggtcatgccaggcaaaggttaaggcacacatcccttcacttagagaataaactgtgttctaactgccacaaggttgttctctttctctagcagcttaacaagcactggcctcgagataagcaatattaaaacaatttgcagctccaccagatgtggcctaatggaacccctattccaccagccatcattacagctttaattggacaagaggctgatttcagtaactttctcctcataggaaaactaccgaccatggactggctctggctagtttacacagactgcatacttgcacaccttcctgtcctgaaaagaccttttgacgcatggggtctaactgtaatacatgtattgttattattttttagagtccatcaggctggagtgcagtgatctgatcatacatcactgcagcctccaactcttgggctcaagtgatcctcctgccccagcctcctgactagttgggaccgcaagcacacaccaccccacctggctattttttttttactttttgtagagatggggacgtcaccatgcaggccaggcatttaacatttaattggtaactcttcactccaaaatgaacatgggttgtatgttacatgcatgtttgctcaatgggcatgcgtcaggaccaccctcatgaatattcatagctcctcctgtcacctgctgaatatgcatgtctacccaagctgttcagcataaagccgctactccaacccctcctccaacgaaatgcctgtctctggtcctggccattctccagcctgcggaatggccaccttgcaggctgtaaccccttacaagaaataaagtctcctctcctgtttttttgttttttgttttgtttttttgagacggagtctcgctctgtcacccaggccatctcggctcactgcaacctctgcctcccaagttcaagcgattctcctgcctcagcctcccaagtagctgggattacaggcgcgcgccacacgcccggctaatttttgtatttttagcagagacggggtttcaccatgttggccaagctggtctcgaacttctaacctcagatgatctacccgcctcggccttccaacgtgctgggattacaggcgtgagccaccgcgcccggcctcctctccttttccaaatttatacattttgattttcttaacacacctcactcgagttcgttcacttcggctgcggcgtgatctgccggccctctcagctcaggctgacctcagcgccctcacttcggccacttctgtgtccctcagtcttctcccctcaactcggacctcgcgccctcatgacagggcgccattttcttccctctaactcctcagcccagaggaggcgccttggtcccgtacctctgcccggcaaggcgacttttcttcacttgcacttttgcctcgggtcatcctctgctgctacctccccactatcctcaccatctgctccacgtcccgtggcttccgccctcccttccggtgcagggccccggcctcatacccacagccttgggggctctcgcccctcaggccacgcccctcaggccacgcccctcagcccacagaactagcgggaagtgactgcgaagcagtcgcgccgtggagggacaggagggcggggattgggaggtgggtcctcctcgatcctgggcgttgattggccaactctcacgagggcgggacctcgattgggggcggggcggcaatctgggtcttgtgcctctggctcctcagggcattcccggcggctccgggtttggcaacgaggacgggggagtgcgactgcgtctcgggcagcatggccgagaagcggcacacacgggactccgaagcccagcggctccccgactccttcaagggtgagtcccgcgtcccctgaccctcccccgtggaccgagcccccgcccgcagcgtgcgc

SEQ ID NO: 42673 - DNA, 2300 bp, Homo sapien
tcatgcctgtaatcccagcactttgggaggctgaggcaggcagatcacgaggtcaggagattgagaccatcctggctaacacggtgaaaccctgtctctactaaaaataaaagaattaactgggcatggtggcatgtgcctgtagtcccagctactcaggaggctgaggcaggagaatcccttgaacccagtaggtggaggtcaggctggtcttgaactcctgacttcaagtgatccgcccacctcggcttcccaaagtgctgggattacaggcgtgagccactgtgcccggcctaaccatgtttttaatagccagtgagcatcaggtgctcacctaaacataaggaaggatatcaaagttaaatacatagctatttttgccaacaactcagaagatttagctaatagtattaaattaactctcatttgtcaaaaaaaaaaaaaaagcacgcaaaccaagatcattttgttttggctgggtttatagttttataaccttctatgccaaactctgacacctcaaagtatttagcagagacaaatataaagtccagacaaaaatgtatgctgacaattctgaaagcatttctattttaccaataattttaaaaccagcctgtttattaaagttatacttaagtcatatgaacttgaaaattgcttagacttatttagttaatttatgagcactcttttatttatatgccaatttggtaggcacaagatataacagtaagtgtacctacaaataaacacatctagacatgtatataccgacacaaacaaagatccaatagcttggaactgtagccatgagatagcaatacaagctcgctggttttactttgtttgccccaatagataatccaatgaaggctgtgaactaaaattttgggtaaagtagttttcatggcagtttgatttttttgtttgtttgtttgtctattcatttaagactgagtttcgctctgtcacccaggctgcagtgcagtggcgcaatctcggctcacttcaacctccacctcctgggttcaagtgattctcctgcctcaggctcccaagtagctgggattataggcgtgtgccaccatgcccagctaattttttgtatttttagtagagacagggttttaccatgttggccaggctactctcgaactcccgacctcaggtaatccacccatcttggcctcccaaactgctgggattacaagctagaaccacctcgcctggcctggcagtttgatttttatttgtatttattttttattttttcttttctttctcagtctccagcctcccgagtagctgggattacaggtgcacgccaccaggcctggggaatttttctatattctgtagagacggggtttcgccacgttgcccaagctggtctggaaatcctgagctcaagcaatccgcccacctcggcctcccaaagtgctgggattacaggcgtgagccaccgcgcccggccgaattatttaagaagcgaatttcttagtctatgaaaatgacgttcaacggcaaatggcaaaatgaagttctgacttttccacctgtaaagtagattgatatgagcgggagtgagaagaccttgtcgctatcagtataagacaagagaactgagggcagccagttgtggccacagcaactctctgagtgaattgctgccacactgggcacagaagcgcacactctgaaatcgaatgtttggattcctttctacataattctactaaagagttattccacagcctaggggctgccttagagccccgtttgagacactctgggctcacagatcatgaagtcagtgcgcaaacgcgggcagaccctgaaccaggtgcccaacgcccagccctcacttccagagctcaggactctcgcaagagcgactccagccccggcctgccgctgtctacattcgcgctcttccttcctcgggaaacaaacggtggatcagatctccaaggctctgagtttcccagagtttggccgtgcgccagcgcagcgcagcccctcccagcagcacagcacagaccccaccccatcctccaacgcccggggttcctgctctatcacctacaccaccaccaccacgtgcaggcccgagaaggcaaaagaggcccagccactctcaccggggattttatccgcctccccggcacacacacactctcactcacgcactcgctcgccggccttccagctgtctgtgtccggggcggggaccggcttggcgcagcccgctgtcagcgctcgccggctcctcgcgcccctacccgctgcgctctgcc

SEQ ID NO: 42674 - DNA, 2300 bp, Homo sapien
ggtgggttcttacctctctgccacccctggcctggaccctcctgttagcctcctgccttcactccctgtctccctgtatctcccttctctaaatgtctcctccaccccagcaccagagccatgtctccaaaaaccaggtcaccaaggcttggcttctagtgttccagccatgctgtggggatagaggatttctcctgctttcagagcagagcgttaagaaggctgcggggagccgcttgcaggagctcccaggcagccattgagaaggaggtcatttccctggaacaaatgcctgctggggctgtgtgtcaccctctggaacacgcccacacccccaggctggcactccaggccctttcttgatctagcccaaacctgcttatcagccctgacttcctcccagtcacctgtcatttccattgtgtgttaccttcttgcctccacgcctttgcttgtgccattccctctaactgggacgccctcacttttccctgcttggcccatcaaattctgctcttctttctctgcccagttcaaacacctcctcctctcggcagccttccctggttgagcccaaatgaagctgtctcccataagcccacggtactgccctgtggcttgggtgggcttgtgggagaggaagatgcagattttttttttttttttttttttttgagatggactctcgctctgtcgcccaggctggagtgcagtggcacgatcttggctcactgcaacctccgcctcccggatataagtgattctcctgcctcagcctcccaagtagctggaattacaggcacgcatcgccacaccaggctaattttttgtatttttagtagagatatgggggttcaccatgttggccaggctggtctctaactcctgacctcaggtgatccgcacgcctcagcctcccaaagtgctgggattacaggtgtgagccaccacgcccgcctaggagatgcagattgaatgcagattgattgagatgcatctttgtcctccccaccatcccagcaccaaggctgtgcactctctggggtccagacctgccctggtggtcactcacaactgtggccttggtcaagtcacatcacctctctaaactgcattgtccccgtctgtaaaataggagaaccagagtttctcctggaagggaccatagtgaggaatgtatgagacaatgtgggcaaatacttgaaatggtgctcacctctggtgcctgcttaataaatagcacccagggttcctacagctgtggccgtggagcctgcatctccctctcccctggtggcttcccctcttttacaaggtcaccagggaggccttcccagaggacaatccggatcatgtcattctcacagaccctcctccaggcaggcctggagtcatccccaaaggctctgtccaacccactcctgcctctctccctggctcccccgtcccatctctcaccagcctcgcatcatttgctctactccaaccacctggaacttattcgggggggcactgaacgccccacgcaccctttcacctcagggctattgcacaggtcactccctccttctgtacctggctaactccttctcgtcctttaggccccagcttacgtgcccattcctccaggaggccttccccgaccacctcttccatccaggtgaggcgccccttctctgttcctgcagctcttgcaccacacactgcgctgcaatgacctgctttcctgtgagctccaagaagccaggcactgtgcctcgctccctgctgcaaactcagcaccgggcacggtgtctggtgcagactagatgctcaaaaaacatttagtgactaactgaatggatggatgagtcaatttctgcatcccccacactgcgggaaatgtctgtagaacagatttgagtgggaggttccagcagggcctgggagaagcccttggggtttgggcactgggggtaaacagagcagaccccccaacccctcccctggggggctgggctccccgcttcctgcaaaccccctgggccccagagccggcttccagatgctaagcccgtctcagcctcacctcttagcttttccatctgcacagccgggccagatccccgcagccagcatcacgggcagccaggccaaccgtcccggcgtcttcctattttagacatctcgctgcctcagtcccttctaatgtttccagccaggctgcggggggaggaaaaagaggttactgctactttaaatgtactgtatgaaggcgagggctggaaaggggcctgcttgcaggaatacccagtcatcta

SEQ ID NO: 42675 - DNA, 2300 bp, Homo sapien
gcttctttgttcttcatacctcaagattgcaaaaattgtgaaattttcatcagtgtagaaaataaaaaccaagaaaaggtacaagcccattgggataacttgcttgaccacaacccctgggagaagagaacccatccaaattagccaggtgcagccccctctcctatagctggcaagaggcagagtttgggagagctcagagctcacgcagaggtgcaggcctctgcctccatgccatgtgtcctggagagcctagtgctctcctgacctgccaccgtttggggtccctctgcattaagcattgccttgtctatgggtcatgcctctggagaagggtccctcctgcagcccctaatacctaagagatatttgtggcggctgattagaataccctgatggataattccaggctgcagaggtgagaggcatttggactccactgcctgggatggccttctggtgaggtatcatttcagctgggccttgaaggacacgcagaatcccaacaggtggccacaggggtatgtctcctgtggatatgaatggctgaggaaggaggaaaaggcagaaggagaaagataggaaaagggaaatcttgaaagctcttgaattagccaggcccggaagctgggtgtccttgggtaagtcactttacctgtctgagcaagcttcttcatttgcagcaaatgtttttctgtcattttctgtctgtgcgggtgacatgagatgacttgtacagcccatgtttgaccttgtcatgttgaagatggacagatacagcccagggcctgtgccaaacatccactgctcctcttgaacacagagagggctgccaaactgaccctttattttgtgatggatggaatgtggtatttggattatgtacattaacctcaaattaaattaatatcccacttgccacctggaattgagactggggtgggtgagcccccagaacacccccctctttagaggactccccctcctccagttttcctctccctcaagctgcctgtagtttccaagcccggcaggacacaggctgtgtcccctggggcccccacatctatcccgtcacctgtaaagggaagattggtttgacctgtgtgtattgaacgcctgtctcctctgtctctgccattagaccaggagctcttgggatgggggaggtgggggattaagctctgttttcagtcagtgcaacctgttaggtggataaatggcgtgaataaggttccccaaatcttgaagcttttaatggggatactcagcaaacccttcagcccctcgggcccctccctgagctgagcactagggatcccgtcccgcaaggtggttgtccttgctggggtacatacaacggttccggggaggggccccaccctgacatcaagctactgccgctctgggaaggaaagtcgcccggaatcggggtctaagtggccagggcactgccaggcgcaggccagccggcgcctcagccgaccacgcgcccgctctcatcggtaccaccgagggctggagagcagcgacctcgcagcggaggaaggcgctttgtcaatccccgacggggtgggggggcgtggattcctccaggtgggtgtggggggtgtgacctcgcacggggaggacaagctcggaggcggcagggaggtgagcggggcggccggccctggcggtccccgggggtctccgcccctccgcagccccgccccctcgtcccggtactccccctcgccccggcgcccggggggctcgggcagcctcggccgcggtcggcgcggctcggctcggcgtcgccaaggcaacagcggcttagggggcgggggcgacgtggcgggcggggtgggctgggccgcgctgcgcgggccgggccgtcggcgctcggtcggcgggcgggcggcgcgggccgcgagctgctggggccgagcccgagcccggcccgccctcggccgcgcggccgcccagcaagggtgcgggtcccgcgcgggtcccggcccgccgccgccgcgctaaccccgcctccccttccccctcttgtccccccgtgcgcagggcttcctcagccgccgcctcaagggctccatcaagcgcaccaagagccagcccaagctggaccgcaaccacagcttccgccacatcctgccggggttccggagcgccgccgccgccgccgcggacaatgagaggtgagcccgccgccgccgcccggtcccccgcgccgccgccccgggctgcgcccctgaggacgcggggacaaagcgcgagcccggcccggggcgagccacacggcggtgggg

SEQ ID NO: 42676 - DNA, 2300 bp, Homo sapien
agctggagataacataatgtctgctagacgcctggtgggtttcagtgtctgttgaatgaatggcactcagatatttgagtttggggttcccagttgctttgttaaatgcttttcctggttaaccagtgtttttacatctgttatctgcaggggatagtgtattacctcattttatacatgaggaaactgagactcaggaaagtaaaaggatttgtccagggttccacagttgctaaatgacacgaccagaattggagcctgggcctgcaaaacccccaaattgggcctcttcttactgactaatcctgggggtgaggtagtaagggtggaggttaaggcacccaggtctcctactacctctcaagaatagtggccagatgttctgccagggctccaaggcattccttctgcctcccacccacctgtttcctctgatgctcgacaccccctcctctccccacatgcgcaccagatgcattcggctccaggaagataggatgaggcaagccttgaaccttgtcaaaccttggggatgcttgcggcaaagcctgtagcttttggggaggctgtttctgcaacaggcgtgtagggtggccctatggctgatgcagaactccccataggtaaggtgagctcagccggatcacatgccatgaccacacgtgagcatggaagacaaacccagagaggtctggaggcagggcccctcccggagaggcaaagccacttatgctgcctcctgacagcctgtgtggctttaggctctcgcttccctcctgctctgcccctcctactcacccagcagacttgcttagtctgggcttgggtagccgagacaggttgttttcaggcctcaaaggatttgggccacagcccagcctttctcagtgtttctcaccttctgtccttgtctccttatgggacggagcaggcatctggaaggtggcagaggggtgatcctgcctggaaatcactgagggtccttttatagaaagaaacaggctgagagaaagaaatgacttggccacagtcactacccaagaggctagtttcctgtttgtgcctccagctatcctggggcagcttccttcaccccagctgaaagcaggcttttgttacgcgctcactctcagcaaggctttgttctgtatcctctcggcaatcctatgaggtaaataatattatgtccatttttgaggaggaaacagagaggcctagggaggtgacttaacctgtccaagaccacacaggttacaagtggcagagtccgggtttgaacatagcctggcttcagagctcattttctttaccatcaggctacacattctgaaacttatttggcttccaggcatcacagaaacagagtgagggtgctaaatccttgaatgactcagcccctgtggagttggacctgaagacgcctcctggccttggcttttctgaccaaagatagccacactgggcagggcacggtggctcatgcctataatcccagcactttgggaggccaaggtgggtggatcacctgaggtcaggaatttgaaaccagcctgaccaacatggtgaaaccccgtctctactaaaaaaatacaaaattagccaggtgtggtggcccatgcctgtaatcctagctactcgggaggctgaggcaagacaatcacttgaacccgggaggcagaggttgtagtgagctgagattgcgccgttgcactccagcctgggcaacaagtgtgaaactccatctcaaaaaaagaagatagccacacagcacctactgtgggcccagccactccaggtgccagaatggcccacgcttctctgagggtgccgtagaccaggtgctgagacgcagacagtccagtctctcttcccttcctctccccatcccactcctattccagtaactaggcaggccctgcccacccttgccccaggagaagctccactcttgtggacagtggaagggcctcggccagcttgcctgagtcctgggcttggaaggacggttgcccccatctgccttggttccctgcacctgccttttcttccccgcatcctccctctgactgcccgcttttctctgctttcaccttcccctagtgttcctcttctttcgtgttgtgtcagaagccatgatttccagtcttctcatctggaagatgaaggaaaagatagacccgaccccacagggttctgaggctcaaactgaaagcctggtggtggggcacctgtgacaggtgagactcctcatcttgcccccttctttcttcatcatgaagaagagacactggaggatgtgg

SEQ ID NO: 42677 - DNA, 2300 bp, Homo sapien
gagggcagaaggccacgtgtctccctgtctcacagcccagggcgttctgtgtgtatgggggcgtcacaactgggtcttggtgactgctaggacctaccccttaccttggcctgagggaaccctgggttgagagggaccacgcctctgggccctgtcatccctggaagacttcccaggcagggcagccaacctttctgcctttttaggacaggctctgtctccccagggccctgggagccaccaggcggctgcattcctctcctctcccctgggatcccagctgggccaggagtgagcactggccttctgagcagccggttcccaggccagcggggcaaggctgggcttggggagagagctctgctggacatactaggcagggcgctgccctgtttatgtcctgccgtttgattcccagcaggtcagtgcattcattgtgaccatgtccagactctctttttttccagtgtgggcagacgcttctagcacagcctctggacctgcctggctatgacaggcagaagcatgattggcatgttctgacctgatgaggcctagagagtctgctgaagtcctgactgcagaaccatcaggtcctgccagcctttgggtgggcaccaactctgtggagacaaaccttgtccaggatttctcttccttccagacctggttggggtagtggacagtggcttgggaccacacaggctggtgggctggagactggggctggagatggctgtgcttgggagtcccaggcagaggggctaaaggggcctcctcacgggggtctactgcccactgctaggcacaccttcttctcctttcatttcgcctcaggaaatgaagggctttttaaagaaatttgaggcatcccagagcatttgggcagatatgattgatccccattttgcagatggggaaaactgaggcatggagaacgtaaagcgtttgagtcgtcacgggacaggaacaggaaacagcctgggaagtccatatcttgtcactccaaattgtcaaaagtgtgacctatcccagaaatgtcagccttgatagcagcgtgtgcatcgttcaccagtgttgttcatagctgtgtctccagctcctgacatcgtggctggcaatgaggtgggcgaatggaacagaccaaagaggcatgaacagttatgagcaatggatgggagtcactgacacccctgccctcctgagcctcccgcctgcatggtctcatttgatccttagagcaacccatgaggaaggtgtgtcgttatcctcactacggatggggaaactgagtcctagagagtcgaatgacttaaagtatccaaggttgtatatttcataaggaatagagactcggtttgctctgcagccaggcacccttgacactaggccctctgtcctcctgcccgctcgcagctgcaggtgcatttctgtagcattcacttgtgtgcgcgcgcgcgtgtgtgtgtgtgtttaatcccagggcccactgcactgcctgcctttgtgtactgcccagcccattaccctggcagccctagccatgcagcatgtcttaaaggggccccccggctcctgcttgcacactttcagagacagggagcccactctctctaaaaccagacgagcctggcccattcaaggacagctgtgactgagctggaagtggcctctcctggtcccagccttgccctttggggccacacagggcagctccctctgagctttcgagatttggagggtgaccctgagccccttattttccgaccaaacaatcccactctcaattccccccacccaatagttgggaacacccttgctgtgtcaagtagggatttttaattactgtaagtttcggtttggggtcctttccctccttggaataatgagtttgctgagcttttgtgtcaccgaccttttaagagaaaaaaggatcagagttgaaaaacagcttgtgggttggctggaacgctatcagataaggctaggccccaggagccaggacagtgtccccattgttctgccaccagccctcacaatgagctgctgttgggccctggcgctgtctctcatagcagctccccgtgccttgtgcccacgtttcctgggccctgggcaggggctgccccatccctgtatcccccggtccttccttccccacctggagtgagtgggtcacagctagtgggttagctggctgtggacctttccctgctgcccggctgctgtggacctttccccctgcccggctgctgtggacctttccctgctgcccggctgctgtggacctttccccctgc

SEQ ID NO: 42678 - DNA, 2300 bp, Homo sapien
gggtagagccaaggttggaatgcaggttcctgctctgtgcactcctgtcctgggcccctgcctgacagccaagcccacctttgtctgtccctacacagtgtcttcccacgggagttgaaagaggtgtttgcctcgtggaggcaggagtgcagcagtcgcggccgcccggacatcagtgagcggctcatcagcgcctccctcttcctgcgcttcctctgcccagccatcatgtcgccctcactcttcaacctgctgcaggagtaccctgatgaccgcactgcccgcaccctcaccctcatcgccaaggtcacccagaacctggccaactttgccaagtgagtgcctcctccctcaccaggcagagttgggcagggctggtgtccacagggcaggccctgggggtgtttctgcccccaagctgagcagagaccataaacaggccctggttttgtccctgtcatcctcagtccttctccttcccgctttttaaaaaataaaatctccacaccctgtccttctactcaaggtatatgtcattttggtatgtttcttaatttttaaaggtgacgacatgagacatttttttccttctgcttttttgaattaatgtattattataaggattctcacatatcccttaacattcattaagccctgttttgaaataaatgactaatattcctccaagggggactggcccatatttccttaatccattccctgtgcttgggcacttgggttgggcaccaccatcctggtgtcaggctatcaggatgtctttgctgataaagcactattggtgtttttggctgcatccttagagcaagtgggcagaagtagaagggctgggtcgtctcactgttgttcattctcaaaacatagattgagccccatcctggggccatctgtgtgctgggctctgacggcaccaagatgaatcagtcctggtggcgctcagcacttcagccagggagacgtgtggaatgagcaggagagcagtgatagacacacacgagcctcttaggagggctctcagcttgttgggagaggagacaggaaagcctccagggtgacatgatcccccaactgcatgtcagggtgaggcgttcattgtctcaagaggagcagaggctgggcatcccagggagggccatgcactgtgccaggtcaggagaagcgggcgatgagacctaagaggacagcagggacctgaaggccagacagggctgtgggagccaccagagggttttaaacaagggagaggatggccttcctctgttctggatcctgaaaagctcaccctgacagcagtgggcagatgggttggagggagcaggatggtagccaggagacgtgaaaggagagcatagctgtggttccagcaacaatagcagaaaattcgcagggaggggagcgggtacaggaggcagtggctgcaagggacaaggttaggggtgattagaaggcaaaatcagtgggccgtgccatttgggaatgaggaagagggaggagttgacagctgccagagattctgtctcaggtgtatctgtatgggtagtggggtctccacttagggtagggagctcaggaggagggcatgggtttgggtgttgatgatgacttcaggtgtggcaggctgagtaggagggactcccaggggtggtgcctgcagatatattaatacatgcctgaaagctcattgggagacctgggttgagcagggattgagcatcatctgcataccagggcagtgaaacttggaggaaaagccgaaggacactgttaacaggcagtgtatgggggacacagaacattccaggtcctgagataaaaggttcagaaaaggatcgctggacttaccatgagcaaggagggccctggtgacctgggtcagagcatattcagctgacttggggagtgaatggagtgggagcctgccatagtggggaaagcgggtggtggtgtcccagtggagggagttcctgggcagggcctgcctgggcccagtagtgctcacccaactgccctctctccagatttggcagcaaggaggaatacatgtccttcatgaaccagttcctagagcatgagtggaccaacatgcagcgcttcctgctggagatctccaaccccgagaccctctccaatacagccggcttcgagggctacatcgacctgggccgcgagctctccagcctgcactcactgctctgggaggccgtcagccagctggagcaggtgcctgttgccgtggggcggaggtggggccaaaagctgccatcaggcttttagtgttcccc

SEQ ID NO: 42679 - DNA, 2300 bp, Homo sapien
cccgacgtcctccccacagatgggcaggccgctgcagctcagctggtggccgggtggccggcccgggcaaccccagtgaacctggcagggctggccacggtgcggcgggcaggccagacaccaaccacaccaggcacctccgagggcgcgccaggccggccccagctgttggcaccgctctccttccagaaccctgtgtaccagatggcggctggcctgccgctgtcaccccgtggccttggcgactcaggctctgagggccacagctccctgagctcacacagcaacagcgaggagttggcggctgctgccaagctgggaagtttcagcactgccgcggaggagctggctcggcggcccggtgagctggcacggcgacagatgtcactgactgaaaaaggcgggcagcccacggtgccacggcagaacagtgctggcccccagaggaggatcgaccagcctccgcccccacccccgccgccacctcctgccccccgcggccggacgccccccaacctgctgagcaccctgcagtacccaagaccctcaagcggaaccctggcgtcggcctcacctgattgggtgggccccagtacccgcctgaggcagcagtcctcttcctccaagggggacagcccagaactgaagccacgggcagtgcacaagcaggtcagtgctgctagtcagagggcagggctgggcacttgggcccagctggggctgtcataccccataccatgctcctcctctcggtcatttcacctccaccctcacccagctgccatcccatcccaccagcctgccacatgcgccaccaccccctccccctggcttcttcctgaatcctgtgaaccagggacactgtagccttggggaactccaggctcctctgtcagtgcccctaggggcaggctggggtcagagagaaagaggaggagagtgcattcatcttcggttccaagcctgtcgaagcgcctacccagctctgcccccacacgcccctcccaaaatgttttcacaggctggacaggccttcaggcacaaccacctggagcatggatgaccctgtcacccaaaggctgcaggcagtgtctggagtggaggtgccttgggctgacagcccagcctggccctgtcccccactcagtgcagcctgccccggtgcccccagtggcagggtcactcactgtcctcttggcagcagagtgtggtgctcaggaggccacctggcacctgtcagctctgcctttggctgccgtctgagagacagttcccgggtggggactgcctcggtaggcgctcagtcagctggaggtcccctcttcccaccgtgtcccagagttgcttgtccttgtggctcacctgggccactcccgcccctcctgcttgccctccacctccctgcagcccctcacagctgtgtttcattgtagggcccttcacctgtgagccccaatgccctggaccgcacagccgcttggctcttgaccatgaacgcgcagttgttagaagacgagggcctgggcccagaccccccccacagggataggctaaggagtaaggacgagctcagccaagcagaaaaggtaaaactggaccctggcggctcgggacagggcggggctgcctcccggcagcagctggtaggagtctctcccccaggtcccccagcaacgggtgctgctgtccttgtgaagggcccgtcacctctgagcccctgttccctgtgagaatagcagtcagtggggtctggaagaaaagcaacaagagggatggattagcagcttagacctgaggcttcccatctgcagattggaatcaccagggaattgtcttggatacagactcctgggacctctgggaaggctccttagcccaggcaactgaggcagttgagcttcctgaggacctgggggttgagggctgagggtgcccaagtgacatatagaagcccccctgagggaacttggtacctgaggaggcagaggcatgggtccccaggatggctgggagagccaccccagcctggcccccaaggcttgtgcctgcccacggcctggctcttcacccctctggtctccaccagggcctgggaaagaaacagcagttaccagcttggggggtggggtcaggctgccattgagatgttttcttccccacccccgggaaaagaatctactctaaaaatgaaactctcactctgccacacactctgccatctgctggggcaaggggatgcttcgttggtctcccaagccttccagctgtggcagctgctctggatctgggggtagtttttg

SEQ ID NO: 42680 - DNA, 2300 bp, Homo sapien
atacttggtaatttttggttggatgccaggcattgtgaatctcacagtgaggtgctgaatgtttttgtgttcctttaaatcctttctgggggctttattctgggagacagtgaggttacttggaatctgttcaatcctctcagggtttccttttaagttttgttaggctgcgtcctgcagagcctttagtcttggcctaacgtggccctgctctgagggggtttccttccccgggtcctctgtgattcccagtgttggtgcgtcactgcactctcactggtacaacatgaactgcttctgcgattgtttcgtgttctcctttctgacggttcttgcctagcctggtaattttctcatctgcatgcggatattattcagtcagagacacaaggggaacccccactcgggagctatgtggagtttctctctgcctcttgctcctctctggcttctgccctgcaaatcccacacctcttgaccttcctgacctgcctgtctcctcaactcagtgaggctgctgactccgccttccctctgcttccaggccgttcactgggctctccttgttggtttctgttctcctagaaattattgtactgcattgcctgtattgtgtccatttttctggtttgtttgtttggttggtttttaataaagagatggggtctcgccatgttacccaggctggtcttgaactcctagtctcaagtgatcctccctccctggcctcccaaagtgctgagattataggcgtgagccaatgtgcccggccctatttgtttttaagacaagagagtaaatacaatctccttccaatctaattttccttaataaaacaaataccctcctgccaccccacccccagcacaagctttcctcagagtgataccttcctgtactggggaacctgccccggagggtcccccccgccaccaccgctcctcccagttagtgctccctgaactgctgccctgctgcccccattacagtcccgtgcagaaccggccccggcacagtggctccctgtgtgtcttctgtgagtgggctaagtgcttgcccagtgtgcggtggctgctctaggctggaggaatcaagagggcagggatggagagaagccttgggagtggagggctcatctaagagtgtgtggagcaaggagaagggaggctgaggccaaagccctgtggacccccatgtccagaggcagacaggacaaggcatctaggagacaggcagacccagagagtgtggggtctcaaagccaaaggagagtgggaaggtgggagtgcccagcagtgagagtgtctcaggaaccagccaggtggggccaggagggctcccaggcagggagcagcaggacggagccggcctcctgcccactgagcttccgcgggtggtatgtcccccagctactgctcattgttctgcctgcacacctgtccttcagatgtctcctactgatgtgcgacctcccagcccaccctccagggaacgtcactgcttcctgctctttgttccagggacctgagctttccactagcgcagctgctccgtgcagggtgtagttagttactcgtgcctcctgccttgtgaactccttgagggaaaggactagagttcattcatcttggcacctcgcgtacaactttgtgaagatggcgggggcagggtggaaaaagttctagagcctttcagggccttcgtctttccaccacctgcctagctctaggggtttgaagatctaatgcccatttccacccatcttggctcctggaagaacatcgggaaaggggcagcccgggggcctctggggctttaggagcagcgagtgtgggatgtggaggtgaggaaggaggcccagcagtgtcagttgctgggagtcggctggagggcctctgccccaggcaagtatgggaggcaagtctctgacccaaggaggggctctcctagtgtgtccctgctgtgtgcgggggtgatgggcttgttctcacaccctccccacctctgctgcctccagggccagtctgactgtctctgtctctggctataggttgatgtccgtggaggaagaactgaagaaggaccacgcagagatgcaagcggctgtggactccaaacagaagatcattgatgcccaggtgggggctccggccctttggtcagccacaagagttaaagggcctgggattaggaggggtgactagcctctccatcctcagtcatacctcactgcagacactgaggggaataagaaaccagaatctgccctgagaagtcagacctgtggtcttagtgggcca

SEQ ID NO: 42681 - DNA, 2300 bp, Homo sapien
acaaataccctcctgccaccccacccccagcacaagctttcctcagagtgataccttcctgtactggggaacctgccccggagggtcccccccgccaccaccgctcctcccagttagtgctccctgaactgctgccctgctgcccccattacagtcccgtgcagaaccggccccggcacagtggctccctgtgtgtcttctgtgagtgggctaagtgcttgcccagtgtgcggtggctgctctaggctggaggaatcaagagggcagggatggagagaagccttgggagtggagggctcatctaagagtgtgtggagcaaggagaagggaggctgaggccaaagccctgtggacccccatgtccagaggcagacaggacaaggcatctaggagacaggcagacccagagagtgtggggtctcaaagccaaaggagagtgggaaggtgggagtgcccagcagtgagagtgtctcaggaaccagccaggtggggccaggagggctcccaggcagggagcagcaggacggagccggcctcctgcccactgagcttccgcgggtggtatgtcccccagctactgctcattgttctgcctgcacacctgtccttcagatgtctcctactgatgtgcgacctcccagcccaccctccagggaacgtcactgcttcctgctctttgttccagggacctgagctttccactagcgcagctgctccgtgcagggtgtagttagttactcgtgcctcctgccttgtgaactccttgagggaaaggactagagttcattcatcttggcacctcgcgtacaactttgtgaagatggcgggggcagggtggaaaaagttctagagcctttcagggccttcgtctttccaccacctgcctagctctaggggtttgaagatctaatgcccatttccacccatcttggctcctggaagaacatcgggaaaggggcagcccgggggcctctggggctttaggagcagcgagtgtgggatgtggaggtgaggaaggaggcccagcagtgtcagttgctgggagtcggctggagggcctctgccccaggcaagtatgggaggcaagtctctgacccaaggaggggctctcctagtgtgtccctgctgtgtgcgggggtgatgggcttgttctcacaccctccccacctctgctgcctccagggccagtctgactgtctctgtctctggctataggttgatgtccgtggaggaagaactgaagaaggaccacgcagagatgcaagcggctgtggactccaaacagaagatcattgatgcccaggtgggggctccggccctttggtcagccacaagagttaaagggcctgggattaggaggggtgactagcctctccatcctcagtcatacctcactgcagacactgaggggaataagaaaccagaatctgccctgagaagtcagacctgtggtcttagtgggccacaagctcactaggacaggctgtgaaaggagagaggcagctcctcccctgccagggctcttggcgggcattgtctttcaccaggactgctgaccaaagagtggaagccaccaggagggcagtgggggtaggagtgaaggcaggctggtcagagggagcagtggggctctcgttcacaactatggcatccgggctgcattgaggggagacgtgaaaggctctgtggccccagcctcctttactcagggctgcaccgctttcctttcactcacccaggagtaggctgggccttgctcaggctgtaaactgcacagaccaggagctgtgacctctggtgtgtcatgcacacacatgtgagcaagggtgcctgccctaggggccgcaggcagcccatagacagcactagagctgctgcatttgggctgataagcaggcagcgaggctgtgtccatgatgctgcagaggcctctgcctaccttctcttgccagctgctcacagcccggagcctgcctgccaccctcatctccaggccacccccttccccgatgcttgtcgtaggtatacacagccctaaggagcctgtcccatgacccccgctcacatccccattgtccacaggagaagcgcattgcctcgttggatgccgccaatgcccgcctcatgagtgccctgacccagctgaaagagaggtacagcatgcaagcccgtaacggcatctcccccaccaaccccaccaaattgcagattactgagaacggcgagttcagaaacagcagcaattgttaacctgcctgaggagggaggaagctacccaaggagagggggactatggtggc

SEQ ID NO: 42682 - DNA, 2300 bp, Homo sapien
ccctgggtgagaatgaattcagctccaagtaaagaccctgcagctaccccgctcggggctgcctggggtccgtcatggtctggtggcatgggacaaggcagtcagggctcctaaatggtccattgtgagaaacaatgtttgaagcccccatgcagctctcccagtcccctttggcagaacaaatggatttcccagagaaagaccagagtaagcatgtctgggcacacttgtcatcagctgggagccaccagaagtcttaacaaagctctcacgtgacaccatttcttgaagttggtcttcagaaagtactcgcttgccaaagtggagcgcaatgttcaggtctaaaaccaaccaagcacattgaatattttgaaaaataaaatcaagaggttgaattccagccaccttgtttggggtgatatgaaaacatcagctctcctggtgagggcctctcccaccccatgccatcatctggaggcgggctgctccgcccaccatggcccctctgtcccgggagcagccccctcctctgcagacaaggccccgatagccccacccacccgcagggcacagagcctccctgctgattgttagggaaatgaggctgtggttttatgagaggccagtcctgacagattggcccttttcagtttaactgaaagcatttcgaggctgctccattgtcagaatgagtgataactgaatcaccccgcctcctccattcctaataagaagcaccactgtgtttacccctttggtaatcggccactcgttttattggatgtaattgaaacgatagcaaaagcagatggttccttcctccgagaagataggaagtagagccgggagtctggctggcccagaggcacggcacacatagctgggcagcccctgtgctttgctgcaggataagccccatccctgcaagcgccctcaggatccatctccagcgtcttctccctcccgctctcttgccccttcccgctcctcctgacgcctgtctctccccaccctcaatgcacacacagtcctctccctagtctgctggctgagttcctggagagctgggcactccgggggcttggaatgaacgggtaagaagatcaagctcagcctgtgctcagtttggggggttcacatccaagtatgacaagttagtgggaccaatctggggagggaagcatcaggagaacaggacagacccacagaactgggcccacctaccctttctttgggtgtgccccggggcagcctccttgctcctgccttgctgacactgcctgctcccttccttccaacctcctagggggacgggctcagcatttctgttgttaggggcgggagctttgtcctcacggcctggccaaaatggagcctgcaataggtgcttatacttataaagacccgctagattcagtgcagctgttagcaagtgctggtcccaacagacccctcccagtgggcagaggcagggcctccaggagagagcagcatccatccctaaaacaaaccacctggcttcctcttacttctcctcccagcctctgtccagtcccccaaactcggacacggtctctcgcctgggcttccgctgcctccctgcctctcacccctccaccctaccctccatctccataggtctggaaggaacttggagagccacagagctgacgtccagtcacctattgaaagcagcccttatcggcacccttcccttctttccatcctaaggcccgcacctgacccctgcacctcaggaccaggctctgcagcctccctgagcccctgtccgacccctgctcccaggactgtttgtatctgttgtcatgagacaggaggaggatgtgctatttcccaccacccttgtcttgctggcccctctgcctggaatggccttcctctgcccagtggcaaacagactttcaaggttcagttccagtgtccccgctgcaatcccccaaacagagtgagcggttccttccatctacttccaagaactggaaagttcctgtcttgtcgcgcgcactgtgggaccacagcattggttcccacccagctgtgcgttcctgcagggtcaggcatgtgctgggtccacgttggcacagagcaggggccagcaggtgcttgctgtgaataggaacgtttagcagaacccgggagaggagacagtgttaccacacttgctctccactttgcctgcgggtgcctttaagaagcacagatttctaaaccttgccaagccgatccgctgaacacctctacattcccggctgccttgttggctccctgggacacggcag

SEQ ID NO: 42683 - DNA, 2300 bp, Homo sapien
tctccagacccagaaccctgccccttaaattggtggcacctcttattgaagtcccctcaaaaataacgaagaggagttcttaactatctaaactaagcatgctgtcgtaagcacagaacatgatctttctgactggagaatagattcttcctgaagaatcatccgctatcctgctgaatggcccattcatgtgtgcactgctgacctccagttgaaattctgggctcaattgattcctgaggtgatatggtttggctctgtgtccctacccaaatctcatctcggattgtaatccccacaagacctggtgggaggggattggatcatgggggcagtttcccccatgctgttctcgtgataacgagtgaattctcatgagatgtgatggtttaaaactgtgtggcagctcccgcttctctctctttcctgccaccttgtgaagaaggtccttgcttcccctttgccttccgccatgattgtaagtttcctgaggcctcccagtcatgcttgctgttaagcctgcagaactctaagtcagttaaacctcttcatcataaattacccagtctcaagtagttctttatagcagtgtgaaaacagactaatacatgagagttcaatcaggaaccctgaccctgcagaccagcacacattgaccccaagcacctttgaagattttacataaataaaaaagtctgggtcacagagaaatgaatatttgcatacttatttgaatttcatttgtaccatgtgtggattagagaaacagatatttatttatctcgagtgtttattgagcacttactgtgtgtcaggggaagactgcagaagtgaattagatcgccagccagtaggggtggcaagacccacgcatcaatatctgtaaggtggaatgtgctaagtactgcaagcataaagacaaattgccaagagaggcaggtgtggggagaggttatttcctgatgggaagaacttttaaaaactgacaaggaggtggcacttgacctgaggtttaaagcgtgagtaggatttgaaatatgaaaatgaggggaaggaggtccctagtgaagaaaacaaaggcacaaggctctgttgggggagcctcgaggagttcaggtaggcaggagggatgggtgcatggagtgtattaggagagaggaaggtgggagctagatggaaacccaaagccggaggtttatggccttgaatgtcaagaaatttgaggccaggcacggtggctcacacctgtaatcccagcactttgggatgcctaggcggtggatcacatgaagtcagaagttcaagaccagcctggccaacttggtaaaaccccatctctactaaaaatataaaaattagccaggcatggtggcacatccctgtaatcccagctactcaggaggctaaggcaggagaatcgcttgaacccaggagtcagaggttgcagtgagctgagatcacaccattgctctccagcctaggcaacagagggagactcagtctccaaaaaacaaaaaacaaaaaacaaaaaaaaggaaaagaaatttgagcttgtttttgtgtgtgattttttttcctctcctctaatgaatgtgtcacagtctttattcttagtccctggcacagtattcgaaaccttttttttttttccaacttttatttcagggtcgggggtccatgagcaggtttgttatggagttgtttttctatctggaatgcatgaagtcttgaaaggtatctgtgattttgtgtatatgtgtattttttttctggagcaaaagccagaaatttcatcatattttcaaaaagtgaagaaccgaactgtcatcctattatcgttggaggctataaaaagccacaacttgtctgaggttcctgacttcaagatacattgcgttccccataccttgaaaggtctcaggtttcagatgatagcaaatgagaaaaatgtgcatacattttcaagtgtgagcaggaaggagatgactaatgataagtgcattattttatgtgcaagaagtaaaaccagacaactctcttccgttgaaaacgtttaagcattaagtcagaagtaatcagcaaaagccttatttgtgggaagtctgttgagagggaaccatttccaagatgtatggggaagaatttcctgagctgatgtgagagtgtcattccacagggccatcagacaggagccgagcccctctgccggcaggtaggcatgctctccctcttgccgtgggtggagtagatgggaaactagatgagcatatggccagtcagtcaccattacggggaaatgg

SEQ ID NO: 42684 - DNA, 2300 bp, Homo sapien
gataccacggacagctccaagaatttccagaggacttgcatcagactctatgagtggttcttgcctccgctgccttagaatcagcggaggagctaatttaacatgcagattcccaggtccacccagatgtgctgcatcacagtctctgggggtggggtccaggagcctgcattttaaataaacaccccgggttgttcccatgcaagtggccagacgaccatgcttacagaaactctgaaacaaagtcatgaagggaacagatgcgagcgccctctgctgctaaaaaggaggtttggatctcttaagtttatgacttggacatttcaaggcagtttattcagcaagtgaaacccctggactaaagcaaagaaacaagacacctggagagatgagagaggaagaggggccacgttccttgacaacttctgtgtttctttcaccctgtagtgtcgagcgaggcaaagttcccctgtgtgcagtcgtggccgctgtggtcagtctggggtgctgttacaccttctcaaccccacttcctaaaaaaacaaatgcggctccctcaggtgggaggggagagctttctccttggtttggctttaaaatgatggcaactcccaaaaatggaaagcaggggctcaaacaggtatttgtataccaatgttaaccgacattcttcacaatagccaaaaggtggaaacaacctaagtccattgacagatgaatggataaaaacgaggtggtgtatgcacacgacgaaatatttttcagtcttaaaaatgagtgaaatttggactcatgctacaacatggagaaaccttgaggacattatgctacgtgaaataagccagacaaatactgtatgattccactgacatgaggaaccaggaatagtcaaattcatagtcagaaagtagaaatggtggttcccagggactaggagagaagggaatcccgacttattgtttcatagacacaaagtttcagtttggtaagataaaagagttccggagacccatagtggtgctggttgcacaacaatgtgagtatacagaatgccactgaattgtacactaaaaatggttaaaatggcaaattttgttatattttaccacaacaaaaaaagtgatataagtaaaagcagtcaggctggacgtggtggctcacgcttgtaatctcagcactttgggaggctgaggcgggtggatcatctgaggtcgggagttagagaccagcctggccaagatggtgaaaccccgtctatactaaaaatacaaaaaattagccgggcatggtggccggctcctgcaatcccagctactcacaaggctgaggcaggagaattgcttgaagccgggaggcggaggctgcaatgagccgagatcacaccattgcatcccagcctgggcgacaagagcgaaactctgtaacaacatcaacaacaacaacaaaacaaaaacaaaaacaaaaaagaaaacaagagacgcggtggttctgcttgtaatcctagtactttgggaggccgaggctggcagattacctgaggtcaggagtttgagaacagcctcggcaacatggcgaaaccacgtttctacgagaaacacaaaacttagccgggagtggtggtacattcgtgtagtctcagctactcgggaggttggggtgggaggatcccttgagctctggaagttgaggctgctgcagtgagccgggatcgcgccactgcactccagcctgggcgacagagagagaccctgtctaaaaaaaaaaaaaaaaaagaaaaaaagaaaagaaaaagaaaaaatcgttaatatcctcaactcgagtgggaatctatagggggcttacccatgcccatgacttccccatcccatcgggagctccctgagaacagggaaaagtgcctcccctcttatctgggggcgctcaaaggaccagcagagggtttcttcagcggaacactctctgctcccctagggcctgggctgctcacatccatcgcactgaggagggtcccatccattgcactgaggagggtcccatccattgcactgaggagggtcccactggggggctcctcctccgtcctatcgagagttatcccagcgagtgttggcggggactgagcctcctgcttgaggtagttgtttttactcccagtccccaggctcacgagccccacgcgcgctcaatctgccctcccgcttctcctcgccactccgagttctgcgccctcgagatccagcgcatccgcggggtgggcgggtcctggcggctctttgccctcttccaacatggccgccgct

SEQ ID NO: 42685 - DNA, 2300 bp, Homo sapien
ttgccactctcacaggcatctaagattaaatgaagcattgcaggtagaagacttaacatacggccaggcgcggtggctcacgcctgtaatcccagcactttgggaggccgaggcaggcagattacgaggtcaggagatcgaaaccatcctggctaacacggtgaaaccccgtctctactaaaaatacacaatattagccgggtgtggtgatgagcgcctgtagtcgcagttactcgggaggctgaggcagcagaatcgcttgaacccgggaggcggaggttgcagtgggccaatatcgcgccactgcactccagcctgggcaacagagcgagactctcaaaaacaacaaaacaaacaaacaaaacacttaacatagtgccgggtatatcattgctggtacatcatttctagtcttggccttcctctcctttaatatagcctgttctactatccagccctgccatgacactcctctgccttaaaaccttccactcttcccaccacctcccttactggatcaagtccaaactgtttggtctggccttgtagaagctgcttccaagtcctatctcagcccaagttgcctctccaggctcagcacctgctgcttcccaccaccaccactagggtcacatcaaactgtacttggctccctaaacacacaagttctgctaggccgtctcattcttgtgagttttcacccataatatagtggaaaagcattggttttaaaatcagacttgggttcacttccagctctattacttacgagctccgtgaccttgggcaaatcatttctactctcggggactaattccttatttataacgctacgaccaattgtgtgtgtgtgtgtatatatatatatatgaccaattgtgtgtgtgtatatatatatggtatatacatatatatatatacaccaattgtgtatatatatatatggtatatatatatacacaccaattgtgtgtgtgtatatatatgtgtatgtgtgtgtatatatatatatatcctaccttatagtgttgctgggaggattcaatgaattaatgcatggaaagtaattagcatcctgcctggtatctagaaaggacttgatcatgttagctataattagtagggtatgtttctacttcactcctcacagcactaactacattgtactgtgactgcctctttatgtgtctgtctccctactggattgtaaagtccatgaaagcacgaagtatatctcttccagcgttatgtgtacacgttaattactgaaatgatatctcttgaataaacgaatgctttaaatgggtcctgttaccaaacaccttcccaaggctgtgagtagatgcacgctccaatattgtctcattttcccgcggcttcgtcaccccactctatgcactctgcaccggtgataccactttaaggtagatgaccgtctccctcgactgtgagcccctagggttgtatactcacctcgcatgcaagtttgaggattaagcgacataagctaagtaaaatgactggttggtgcttaataaaatgtatcactattattcacggaaggagaaataggtcgctgtggagggcgaaagggggaggattctagagccactgcaagatgcgacagggtggggtagagaggggaggcgactcccaaagctgcggaggggacctccgggggtcgacctgtatatgcgttggaggactggggaggggggcccgggtcccaggatccgcggagcccaaggggggctaggcccaggcccgagaagccgcagccccatgtctcccttgcctgtcctccggatagcctcacctcatctactttcagctcctctagagtgggcagctccactatccccggcatgacggctgcagccccgaccccgacgagaagccctcagccgcgtcgcccccgtctccttgaactcccctttcgaccgccgagtgccacacggcgcctgcgcatgcgcatccggcaacacgcaggcgtattgccctgcccaaccacgagcgagggagcgtgcgcaataccaagaacttttcagcctccagcggggtggggcttcgattcggctccgcccacccctccaggttgtcatagtgatgccgtatccactgagactccggatcctaacagctggaagctaaaaacaggcgccatggagtacacagggagcaaatatatcggggaatatgtagatgggaggtaaggggctcatttgattcacttactataccttgaatagctgtgactggaaaaagacggctttttgcttctgcgaaacaccttgtgccag

SEQ ID NO: 42686 - DNA, 2300 bp, Homo sapien
caggtctgggaatccctatcgtggttacagaggtaccagacaacctcaagcaaagcccaaattcctagggccaaagcatggaaatggctgattcagcacacaaacccaatgaaaatacacagaaggccaaaggcaaatggttgaaagccttccgtcttttaccttgtctgtgtgtttctctctcacccatatacagcccatcgaaaattaatgtagtttctcaactttttgtgcctaaaatgcccaataccccatctctatctgccaaaattctaccaccttcactgtagcagagccttgtgaaaagtaagaatgtggtttggacagaggattgggttcaaatcctgactctgttacttcctagctgtgtatccataatggtgggccagtcattttgcttctcctaacttctgttcctttatttgcaaggtcagcctgaactatctcactgagtagtgagagggagtacacaccaagcacctctgccacttacctgctgagtaggataagtgtctcaagccctgtaagggtcacctttcttacctggaaagataataacatcttccttgcaaaattgatgtaatgattagagagatagcatcccatagcattcctaccaccctctctaggaatctatctcctatccctgtccagaccacagatccctctttcctattaactcagaatgccctggaattccaccaacttgtgaatacagagccccaaggtgggagtgcttcacagtcccgacaactagcactggttcagcaaaccacttcatatcgtccagccttggtttcctcagctataaaaacagagattccactttcttcatccagggtggttggcaaaaaagagtggccacctctgtgtttcctctgcttctctctactacagctcttaccacactgaatcgcagttatctgttatgtctacttgtcgcatcatgtttgaatgaactttctgaagacagggattgtgcccagagtcaattacagggcctggtactcggtagccactcaacattgttgaattgctgggcacggtggctcatgcaagaggatcacttgagcccaggagtatgagaccagcttggacaacatagcaagatgccgtctctacaaaaggcgttgaaaaatttgctgggggtagtggtgcacaccggtagtctcagctacttgggaggctgaggtgggaagattgtttgagcctagggggttgaggctgcagtaagcagtgaacaggccactgcactccagccagggcaacagagcgagatcttgtctgaaaataaaacaaaaacgagagagaaagaaagaaagagaggaaggtaggaaggaaggaaggaaggaaaaaaggaaggaaggaaggaaggaaaagaaaagaaaaaaaaactgttgaattgttttttactactagtccactacagtgatttgtgtatataatcctctataataatccctagatcgtgaactcctcctggaaggaagcgaccgtgtagattcagattagccagtctctcttccctaatcttcgtgtttgtttttatagcatttaccattatctgtaattattttatcacttatttgtttattggcaatacatctccaactggattataaactccataagagcaaggatcttgacattttaaatattcttattcctatgtttaaaactggcagatagcacacacacacagtcaatgcacacacacatataagtatatatggaatgaatgcatcttagctttgctgcttattagatatggtccttgaaaaaattactcgggcaagtttgtgaaagtgcctggcacaaggtgtttcgcagaagcaaaaagccgtctttttccagtcacagctattcaaggtatagtaagtgaatcaaatgagccccttacctcccatctacatattccccgatatatttgctccctgtgtactccatggcgcctgtttttagcttccagctgttaggatccggagtctcagtggatacggcatcactatgacaacctggaggggtgggcggagccgaatcgaagccccaccccgctggaggctgaaaagttcttggtattgcgcacgctccctcgctcgtggttgggcagggcaatacgcctgcgtgttgccggatgcgcatgcgcaggcgccgtgtggcactcggcggtcgaaaggggagttcaaggagacgggggcgacgcggctgagggcttctcgtcggggtcggggctgcagccgtcatgccggggatagtggagctgcccactctagaggagctgaaagtagatgaggtgaggc

SEQ ID NO: 42687 - DNA, 2300 bp, Homo sapien
aatttcttttctacttctccagccctagcccatgcccatgctggactgagcctccttggatactgtgctttactagaccttgaaactagtcaaaacacggatcctgactccactgttcagagcctccccttattctggagttctcttcctactgcaatggggtagagagtagggtgtgcagccactgtgggaagaggcaggagactgggcccagtctggccagtagtgaccttcgcaagttgctgcttctctcggcccttagttcgccctttccaaggctgtctcccagagctgccaaagaggccactgttggggggaagtctctataaaggctccctaaatggtggttggtatgaatgcctcgattatcactgttgtcatcattggcagggtggatgctgggcacaagcccatgatggcatttccccacgcagcttgaggagcagagcctgcctggagggatgggactgggccatttctgggctgcaggttctgagcactaatctttttccaatgacaagagccctgaaagcaaaactaaaccagatttctggttaagaaaatggaggcagtaaaagctcacattccctgggttgagggtagaattgtggctcttctgatcatttctccccctgcaggcataacccatccctggcagccccacctgtaacaaaaataataaaacccacaaaaagggaaagaaaaagccgatcgagtgccaggcaaggactattgtctgcactgcactgcagcccaagctctgggtggctgctatgaggaagttcttcctggagagagtgtgaatggtggcgtgggaggcagaattttcctctaaggagctggggcccagggaggggtcacatgctgaggttctctaggcttctgtttcctgaagcccggggtcaagggtctggtaggatgtggactggagcactctgcccaaagagaggccaagagctcccaacggggcaagggggaggaagggagtggccaaggccccatggagggggagcatggagatcccatggtcctctaacctctggcattttccccagggaagagggtcacctaggttctatcccccaccttgtccctccttgacatcatcttatagaccctccttcagtctccattggcagagctagcactggtggctcagggaattaaaggttaggaaggaactccaagttcaccagggagagggtctgcaaagcttagagaagacatggaggtccagtgctgctcctggctcatttgcattgttgggagaggttggttctcattggctgcgtgtccttggccaggccactggactctgcctcagtttctccaattcacactctaaacagggtccttaccaacccttgtgcgtttatccagatctctacctccccttactccctgagattcccagcaggaaaaaaaaataccaccagaaaaatgtgacaggactcttaatttcttcaccttttggtgaagaccatttttctttctgttttcttccaaaaatggaagaaaattctggaggaagaatagtgctcctttccgggacattcacatttcccctgctaccgacaaccatagccccagacatacctgcagctgctgccctacaatagggcatggcccgatctgcagtgcccacctggctcccccagcctgctggaacatcatgcctgctgtatagttggggagactaatgtcctgggaaagtgccattgcttacagtgacacaggacaccagtcatcataacgtatggagttcttgtctaagccaggaattgggctaaccctttacctgctttatctcatttaattctcaggtccaccttgtgtgtatgatactctcataatcccacagtatggtggcgtgggggtgggatcgaggaactgaggccctgagagatgaggtcacagggctaagtggtagagactagataagccctatagctgcctggctccgccatccctgcccctaaacacccccatactcttctataggtgagatatatcagccacccgtctgtgcatcgtggggcccctctctgctgatccaaagagtccctgcccagtttggttggcacgcccgctgtgttttctgatgtgtggctccctgggtgatcttgcaacacttaggcaggagtgacctcagaggcctgtgaatggagcacctttgtcaatatcaggtcactgcggtccctggccctcctgccttctgacaatgggagtggggagtaaagggttaactgcttcccctcgtgtttatgggggtgggggttcagtgagtgccctggaggcta

SEQ ID NO: 42688 - DNA, 2300 bp, Homo sapien
tgatcagtaaaacaagcacgctgagagatgctacctcacgggattattgtgaaaagaaaatgagatcacgattgtaaaatgcctcgtatcatgcctggcacagattagtagctgtaataactgggaataatcccagtagtagctgaaattattatgtgcaaaggagatatttgagagggaggggttgttcttctgtattcatgtttgagaatgcatgtgtatgtgtgtacacatgtgtacctatgcatacacctcacccgctttcacattgcaacttgttctcttcgtataaaagattagggttcaaagagaaactcttttcactctgaatttctgtgtctgagagcaatgaatgactgggatgcagagggcgggaaatgccattagctgaggctggggctatttttgtgtaccttgatgccagtaaaggaacagatatttgtatctttggggaatatgggtgtggatctttagtatcgtgttggtgtgcaggcatcctctactacctgcgcctgtcagaacctgcctgtgtgtgtgcaaactgagactataactattgggaatctatggctgcagaagtgtgtgtgatgtgtctgcctataaatgcctatcaatagttgtctcaccatctgtaaggatgtaagtacatatttgagggtgcctgagtagaggacataaggttatacatgggtttggagctctgtgaaaatctgtgccctcttgagtatggctgtgtgtacaaatggaagaacaattgtgtgtgggggggtgtttacatctgtaaatgagggcaattatggaggtgatgacatgtgtgatgtggtgagggtaggctgtcatggtgtctgtagggctggatctatgtctgagtgtgcttatttgtttttagatgatgtatgtttacatgtgtctctttaggctcagtttgtgtgtggagaagggggctgagactctaagtgtccacttgtgtatgctgcagggcgttagtgtgtgtaaggctccatctttgggtttgaaggttctgtgtctgtgtgtctgggggcagtgtcttctgtctaaatgcctgggccttcctgccttccctaccattctcattgtcagtagaaccctagagaagaagggatgggcattggactgtgtggttaagcaaatcctgaagggaaggggaatgtgccaagcaatcccttccaagagaattcagggaaactaccctcccgtttcacctcagtccctgggagctggtgcactgtctggttcttatagagcagaggtatctgtgcaggtgtgtgagagtaagtgtggtgcctcgtgcccgtgtaaatgatgtgaacaggtaatcacttacattagtgtgtacacaaatgtaccaggcatgggattgcatcaacacagtgtaataacgtgtgacctcctacggaatctatctccgcagatggtatggccatgggtccctcctgtacctgtgagtggggcagtgtctgaggaagatgggtgccccttgagggaggagcggtagtgagagctgggtggatgtgtgcccgccggtgcctttgtgtactggcgtgtctccgagtctctctgtcggcagctctgagtttctgtgtgtctctgtgtctgtgtgtgtgtctctctctctgggtctctgcctcgtcgtgtgtgtcttgctctcccttggcggggaggggattggtcacgcatgactcatcttgaaccgagcggggctccagcggcagggcggccgccgttgcagctggagggggaggaggacaaggaggagggagaggaggaggaggactaccaagagggggaggaggagaagaaggagggggcgggggcctctccaagtttgtcgggaccttcttccgaggcagcggcggcagcagccagggaggccggggctgcgcgcgggccgggggcgggggctgaggccgggcccggggcggcggggccggcgcctcggctctcctcctgctcctgcagcagcctctgctcccactgcggctgtggtccccctcggcgcagctctccgcgctgcgcgcccgctgagcccgaggttccccggcccatgtactggaagcatgagaacgccgccccggcgttgcccgagggctgccggctgccggccgagggcggccccgccaccgaccaggtgagccggcgaacgactgggtgagcggcccgggccggggtcgggcagggtccgggacccagccgggccgagcagggtggcgggcggttgcaggaaggaggggtacgagggtgcgcctgtgagtgtgtgcttgtgagtgtgggagcgcgcg

SEQ ID NO: 42689 - DNA, 2300 bp, Homo sapien
cagtgtcactgcaaagataaaagccattgaagcaaaactgaaaatgatggcggaaaatcctgatgcagagtatccagcagcgcctgtttattcctactttaagccaccagataaaaaaaggactactccatattctagaacagcatggaaatctcgaagatgatggttgtgaattactgtagcagcaaaagcaaattggtctccacacctaaaatcgtctgcctgtgtactttgtagatgtgaatggtactattcaacggagcacaatcacatgttagcatttggtaacataatgtttttggatgttcttatggatgtttcttccctaaactatgtatggaattgagcatcatccagaataaatagcgttgtatcccaaattgtgatttgaaccctgggatgctctaattggctggttggtttggatttgtaactccagaaacattctatagtgtgccagagcaaaaggcaaatacacaaaatattatttaaatcaggaaactaaaaatattaacatctattaaaaaattgagcatttttctacgctcgtgtgtcttttacaacataaagaaaaagtaaaaggcagggagggaagtgagagacagattttaaatcatgttcagaactgttgttccagaatttactacggcaatccctccaactggactgaaaaagagaaagttcttggcaaaaaggagctgattctttgaacaaatgttgtagtaatctgtttaagaattatgcttattgtttcaaaatcccaactaggaaaacatggtgtatatcttaaaattgtttgtgttgacaaaactagaatcaaatttaacattttataccacaacacaagttctatttggaaattgaacttttattctatagcaaccatttttttcaaatctaaataaccatgccttctataataacaaatgttgctattatcatgggacttttaaaattacatttattgcatgggattgtttttatagcatgagaatgttctgtttggaattatatcatggtcagtctaaatagaaaaagcaaaatttctttgaaaacctaaacattgctatattggtcactatcaaacatacaattttctaataattgtgtagcggtctaagtggaagagattgcattatcttgtgcaggacgaggagaggacatgcagtgggcacagaaagtcaatggaacagatgccactgtggcaccaagactgtaatgactctgtgtggtaggtagttttaaaggactgcatgccttggaaatgattcttcacttggagaacatacttgcctctagatatgtttgtcactctaagcatcctgaatataacaatagagaaagataagtcaaccaacagatttagggatgtgtttcttcagcacattttggtcattttgatgccaagtttgacatactgtttaattgggcagcacctttgctcctttaccaggtatgtatcactttgttactccaggtgccattcttggtgatgacagaatgtttatcactatcgttgttagcaagaggaagctttcaatataggaacttaacatcttcccatgagtataaatgaatttaagacatttgaatcaaaacttcagtagagggaggttttagaattcataaaactggtttaaggaaattctttttacttttcccaaggttaatctttttaaatatctctagacatcaaatactttctgtatgtattagctgtgtctgtctatgatgcaagtaactctcctcctatttgggggatagttcagagaggtaggagcattatctcccatttttctggtgacttcttggagtatagaattcaccattttatccgtaagtcttcaaaggattatggtggactagaacttacatagtgcaaaatagtcttctatttttaataggaacttagaaaaaacttagaattatatatagagttgtttcctttagaaaccagagctatttatttgtatttaaagcactgtttattatttgtactgattcttatccctctgtgtgaataaatgtaagacggtgtccgtgtggttatatcttctctcgttcacttactggcatagactgcagttctctgacaggcttgtttccactcaggactctggccagcatgtccacgtggggtgcttcttctaagtgccttctctgcagagggttctggctagagagtcaaactgagaggcaactctctttaccctttatgcctgcctacctctgttgttagagatgagaatagagaccagctgtttccattgcaaatgtcactatttgaaaagaagttgtta

SEQ ID NO: 42690 - DNA, 2300 bp, Homo sapien
agaggcagggtttcactatgttggccaggctggtctccaactcctgaccccaagtgatccatccacgtcggcctctcaaagtgctgggattacaggtgtgagccaccatgcccagcacaaactgtggcatttccactggaagttatttctttctgagcttcagtttacccatctttaataaattttgccctgtttataacttaaggcttcgaggaccaaaaatgagacgacagatgtgaaataaagctttaggggctgggaggacagcaggctgtgtcagagttcagaagtccctgctagagaacacatatcctatacccagaagtacctcagaggtcagcactacaggaaccatggaggcagtcacaacaactgccattacctcttaatcatctcagcacaccctgtaaagtctagcacagcagtccctaggtaattgtttattgaataccctgcacatgagggtatttttcttcctttcccattcacatctttaatctgttcagcaatgtaagtcaagcaactaggaactgttaaactctgggctatgtactgaaatagacaaatgaaaaagccacagctcttgttcttacctcctgggagaaaggtgaaacagacataaatttaatcccaggggagacacatttttgtcttccctctgctttcctttccccctactttttaaacaaatcattcattcaaaaaataaattcactgcttctattatctaggacttatccagttactggagtcagagcagtgaacaagcaaggtccctatcctctggatgcttgtatttggaaggggagcaggacaaaacaaaagcaaaataaataaagaagatataattagtgatacatgccacaaacacaattaagcagggtgatgtgacagggactcgacgactatagattgagtggagggaaggcctctctaaaggagatgacatttgggacttgaatgataggacattctgattttctcatgtctaaaatcaggaataataccaatagctattaatatttattaccacgaaaaggtaccatgttttactggtaagagtgcaggctatgcgggtctgggttcaaatcctgacttttgcacctagtaactgcacctttagcaagtcacatgacctttctttaagcatcctctcgatagaaaagctttcctaaacagagttccttgttattctatatcatagccacttttccatctttttcctcctactaaatgctaattcaatgtattacttaatgtttcctcttctatttccttcactagaacgtaagctcccacagcacaggaccttgccaatcttgatcacggttctatttctagcacttaagtacactgcctgtctcacggttggtgcttaatatttactaaatgaagcaagccgcttctccactcgaagacttagtttctttttccttcctagaatgggtacaatttgtcgtctcacgaggtcgttgtgagtcttaaataagacaattttggtgacagctcagaatatggctttttgaggaaaggtaaagggtaataaaagatcaagacggcacgggactatcaaaatgctttgcgtttgcaatagcaacaatcctttagactaccagagttcacaaaacgcggttacatttgtctttccagctgagctgcaataactctggaagccagaaatagtcatctggggaaagtgcaatccagagaagaagagacacctgatcctaacagcaagcggtggggtcatgcctggaaccctggcttcccgatttctggctgcgaattcctacaggcgaagggtcattactcggattgttatttccgggccagcgacaggacaatccggggcggggcctgagatgcagtcctgcgagggcggcctcctgtaagacctcttagcgggcccatcgctgaggtgcagggacatgtcgcggccgaactcacctcgtggcctcggcgtggtgctctcagctcatgcccggaaaccaggtcccgacgccgcggtcagacggacctctagacgcgtccgcctcaatgccgccagctgccaggccgcccgtgacgcgttaagcctgcgccgcctcctggcttcgtgacgtcacgacgtccgcgcagctgcggtcgccgccgtcgcacgagtctttccttagtaacctgggcgatagctggtgagtgtccttgacagggcctcgaggggcgcgtgtggtctgggtgccagagacccttactcagggacctctgggggacctcaggggaccagactaccgtccccgacccgttcgagtccagcttgacct

SEQ ID NO: 42691 - DNA, 2300 bp, Homo sapien
ctcctgggagaaaggtgaaacagacataaatttaatcccaggggagacacatttttgtcttccctctgctttcctttccccctactttttaaacaaatcattcattcaaaaaataaattcactgcttctattatctaggacttatccagttactggagtcagagcagtgaacaagcaaggtccctatcctctggatgcttgtatttggaaggggagcaggacaaaacaaaagcaaaataaataaagaagatataattagtgatacatgccacaaacacaattaagcagggtgatgtgacagggactcgacgactatagattgagtggagggaaggcctctctaaaggagatgacatttgggacttgaatgataggacattctgattttctcatgtctaaaatcaggaataataccaatagctattaatatttattaccacgaaaaggtaccatgttttactggtaagagtgcaggctatgcgggtctgggttcaaatcctgacttttgcacctagtaactgcacctttagcaagtcacatgacctttctttaagcatcctctcgatagaaaagctttcctaaacagagttccttgttattctatatcatagccacttttccatctttttcctcctactaaatgctaattcaatgtattacttaatgtttcctcttctatttccttcactagaacgtaagctcccacagcacaggaccttgccaatcttgatcacggttctatttctagcacttaagtacactgcctgtctcacggttggtgcttaatatttactaaatgaagcaagccgcttctccactcgaagacttagtttctttttccttcctagaatgggtacaatttgtcgtctcacgaggtcgttgtgagtcttaaataagacaattttggtgacagctcagaatatggctttttgaggaaaggtaaagggtaataaaagatcaagacggcacgggactatcaaaatgctttgcgtttgcaatagcaacaatcctttagactaccagagttcacaaaacgcggttacatttgtctttccagctgagctgcaataactctggaagccagaaatagtcatctggggaaagtgcaatccagagaagaagagacacctgatcctaacagcaagcggtggggtcatgcctggaaccctggcttcccgatttctggctgcgaattcctacaggcgaagggtcattactcggattgttatttccgggccagcgacaggacaatccggggcggggcctgagatgcagtcctgcgagggcggcctcctgtaagacctcttagcgggcccatcgctgaggtgcagggacatgtcgcggccgaactcacctcgtggcctcggcgtggtgctctcagctcatgcccggaaaccaggtcccgacgccgcggtcagacggacctctagacgcgtccgcctcaatgccgccagctgccaggccgcccgtgacgcgttaagcctgcgccgcctcctggcttcgtgacgtcacgacgtccgcgcagctgcggtcgccgccgtcgcacgagtctttccttagtaacctgggcgatagctggtgagtgtccttgacagggcctcgaggggcgcgtgtggtctgggtgccagagacccttactcagggacctctgggggacctcaggggaccagactaccgtccccgacccgttcgagtccagcttgacctttaaggctgagggcgggacctgtggcattggagcgagtctcatggggtgggggcggggctccttttaccagctaggaatttaggggatgctggaggaacttactaaagagtagccgcacacttgacgggaacgtttgagtttcagaacaatcccataggagtagatattattatctcccataatgaagaaacggaagctcacataggtaattttaccagggtcacgcggtcagaaagtgagggcgcttaaattcagacctagggctatccgactcctaagcctggacttttaaccaccactctgtgccacccagtggcaaaacagttgtcatttcagtagcccttctccatttacttaaccctgacaaatagtattgtcatttacgttttacagatgagacggaagtcctgagagtttgaccgatttaaggtcacgtgcctaggaagtgctggaaccaagactcggagttttctctaagtttagtgcctttattttgttttaaaccacactgttgcatttccccccattttggaaagctttatagttggaaagaatgaaaacctgatctgaccccttcattttatggttgaaa

SEQ ID NO: 42692 - DNA, 2300 bp, Homo sapien
cgccaccacacccagctaatttttgtatttttagtagacggggtttcaccgtgttagccaggatggtctcgaccccctgacctcgtgatccgcccgcctgggcctcccaatgtgctgagattacagactgaaatatttttttaaactacttgaagcacacattctttttccaaagttgagggtctcaaacgatttccctgttcttcacagaaggttcattttaattttggctagatgaccaacccaaaatcctggcttatctactgtcccagcaactcttttcaatgcagctgtatactagcttataacataagcacttctatgagtgtgcatatacgcaggctcttgcatataaaatactttcacatgtaccatcttaactggttctcataactaaagagtgataatcaccacccgtattttgcaaaataagaaaagtgatctttcacttctccagggctccccctgctccagggtcttcaaacatgccattgaatctccttgatgatcttccctcacctctttaactgtttgtctccgtttttatttcagatttcagcttaaccatcacttcctcagaggacggcttccttggccatctcctacagcccaactaggtcaagtgtcctgtagtctgctttcatagcaccctttacttcatcatagcacttaattcttaacaatacaagctaacatttgtgtaattatttgattgtctaattccctccatatgactctaagtactacaaggactaatctatgattttcttgttcactgctgtatccccagtacctggtacattgccagaacacagaagacactgtgaatgtgatgaatacatcagtgaaagtccagaaagataaattccttatccagggtaaaccagaatcggatgggaatctacccttactattatggtaggttctgggcttcccagcgttgcctccactgtctctggtttgccagatttttgcttagagatagtagatgatgttcttctctaaatgcagtaccaggtaaagaaaggtacttgtagtatctgactatacacagaatcattatgcacctggcacggccaaagaaggaatgagacactttaacaggtagagaaagggcttttgcctaagagttaagagatctggattccagtatgcctaccttatcactccctgccatctgccatttagattcataatcacacgtattcaaaaagcatttgcggcagctctaccactgacttgtgacttgtaccaagtgatttctcctacgtagattttgtttcaaccataaaatgaaggggtcagatcaggttttcattctttccaactataaagctttccaaaatggggggaaatgcaacagtgtggtttaaaacaaaataaaggcactaaacttagagaaaactccgagtcttggttccagcacttcctaggcacgtgaccttaaatcggtcaaactctcaggacttccgtctcatctgtaaaacgtaaatgacaatactatttgtcagggttaagtaaatggagaagggctactgaaatgacaactgttttgccactgggtggcacagagtggtggttaaaagtccaggcttaggagtcggatagccctaggtctgaatttaagcgccctcactttctgaccgcgtgaccctggtaaaattacctatgtgagcttccgtttcttcattatgggagataataatatctactcctatgggattgttctgaaactcaaacgttcccgtcaagtgtgcggctactctttagtaagttcctccagcatcccctaaattcctagctggtaaaaggagccccgcccccaccccatgagactcgctccaatgccacaggtcccgccctcagccttaaaggtcaagctggactcgaacgggtcggggacggtagtctggtcccctgaggtcccccagaggtccctgagtaagggtctctggcacccagaccacacgcgcccctcgaggccctgtcaaggacactcaccagctatcgcccaggttactaaggaaagactcgtgcgacggcggcgaccgcagctgcgcggacgtcgtgacgtcacgaagccaggaggcggcgcaggcttaacgcgtcacgggcggcctggcagctggcggcattgaggcggacgcgtctagaggtccgtctgaccgcggcgtcgggacctggtttccgggcatgagctgagagcaccacgccgaggccacgaggtgagttcggccgcgacatgtccctgcacctcagcgatgggcccgctaagaggtcttacaggaggccgccctcgc

SEQ ID NO: 42693 - DNA, 2300 bp, Homo sapien
ttttcatcaaatctggttttatagacttcatacactgatcactaacttctagtatcccttactgttaaaaattccatcgcgagaaatgatttgcctttgtgctactcatttgctttaaaaataatatccatcattaggccgggtgcggtggctcacgcctgtaatcctagcactttgggaggccgaggtgggtggatcacgaggtcaggagatcgagaccaacctggctaacaaggtgaaaccccgtctctactaaaaaatacaaaaaattagccgggcgtggtggcaggcgcctgtagtcccagctacttgggaggctgaggcagtagaatggcgtgtacccgggaggcggagcttgcagtgagccgagatcgtgccactgcactccagcctgggcgacagagtgagactctgtctcaaaaaaaaaaaaaataataataataatagccatcattcattaagctgctatattcctggcactatgttagttgtttacatgtattcattattaaattttattttaagttcaaggttatttttatcattgatgaggaaagtgatgctcagaaaagaagagtaaattgcctaaagttgaaatttacatccaggtctgactgattgtaggctattttgtacatcattaataacatacaaggtttctttattgtgtctgaccctggcataaaagttttagaggccgggcatggtggctcacacctgtaatcctagcactttgggaggccaaggcaggtggattgcctgagcccaggagttcaagaccagcctgggcaacatggtgaaaccctgtctctactaaaaatacaaaaaaattcgctgggcatggtggcatgtgcctgtaatcccagctacttgggaggctgaggcatgagaattgcttgaacctgggagtggaggttgctgtgagccaagatcgtgccactgtactccatcctgggcaacagagtgtgactcagtctcaaaagataataaagataatatttttttaaaagtttgaaaaaaaaggtgatagctatcaacaggtattattttggggggctcctgctgtttgctaagtactgtgtcaagggctttacttgcataacctcattaattattcctaaccctaagaaatgagtacaattattcccattttatagttgaagaaatcaaggagcagaaatattcaggaatatttagtcagtaatggagctaggattggcttccaggtcttcctgacggcaaagcccatgttattcattccattgtgttggatcaaaattttaggatgggatttaaaaaaaaaaataaggtgtgggactgttactcaaaggaaacagcttccaggtatttgatactaattgttcttaatttttacctgagccatagcaacattactggcagaagctatcaatgatatatttgtcagttagctagggctgtgttctatcctgaggtagttgtaggcgatggcatctttccatggtcaaagacctcagatgtagaatgcgtaacttgtgttaacacaggagagggtggcatgttccagagctctagttctataccatggaagacctcaaacctcaatcatgctttagactcacattaaagggcatcctaattggtaatcagtgcataaggaaccaaataaaattttaattaaatgctgtcgtgtgaattttccagtcattttatgcctgttgagacggttttcttatttaaagtcctcttctagtgctctgccttccctctttaaactttatcaagattttgtgctttttctcatgtaagggtttaattagcatcattaaagttttagtctgctgcatatttgcttaatgggcattttggtgcagtggaaagagcttggggtttggagtccaaagtggggaagttccttaaatctctgtgagccttagtttcttcattctgtaaaatgaggcaaataatattttcttctagggctgttgggaaaaggattagagataatgtatttaaattgtctagtacttagctcagtttataggagttgcttgataattggtacgaattacctgaagttgcaagctttgtacttagatcttttacttagatctgctttttgtcttattctttttagtggatgtttccaaggattgtcttcagtcatggccttgggattaaagtgcttccgcatggtccaccctacctttcgcaattatcttgcagcctctatcagacccgtttcagaagttacactgaagacagtgcatgaaagacaacatggccataggcaatacatggcctattcagctgtaccagtc

SEQ ID NO: 42694 - DNA, 2300 bp, Homo sapien
gcccatgggccaagctggagaaggcagggaaggtttgatcctcctcattccttgaagtggatcaaatacaagaagcccaaattcaaattccacctacccatgccagctccccttccctggatattaccaccagcattgagccagaaggctaggtgtcctcagcacctttcttcccctaagctctagtgctaatcggtcaccaagccctggcacttctgccaccatttctctcatctaccttctccccactccatgctcttggtcctgcctcatccctggagggctgcctcggcaccctgcctgctctctcagactccatcctctcctgtattgcagctgtgttgagatctgtggtgctggtcacagagcctggctgcagtgagggctcaattgctccatgctggaactggaccagtcctcagagaccatctgatctgctcattctgttgttcaaatggggaaacagaggcccagtgaggcctagcggcttgtttaaggtcacgctatggaagaagtgacttgaactcacttctgattctgaggtgaaggctcttcccatcagtgccagggccacacaagtgtttcttgttttgagtgcagatgggtggcttggaagtcagcaggaggcacaggtgtggtgacttgatgggctcagggcccaaagggagggagggcctgggagtggaagatggaacctcattcaagcccgtctctcctttcttctcaccagaaactccccctttctttggacaactggacccccacacctccaccctgtccccatcccttttgctgataatcccatctccttgccctgtaaatgctagggggcccttgatttggggaggaagggaaggctgaagccggtcccggcaccctgagagccccagggccctccaatgccccactccttctccaggtctgccctggcttgctctgtctccctagggcagctggcttttgtcccaggggagcatgggaacagcttgggtgagaatgggggaggggcttcccagcaggtttcacctctcccacctggcataatttctaccctgcacccagtgatgcccaggagccagcacaagaacctctgagctctcctgccggctttccccactgtggggcccacaggatggctgggtgtgctggggaaactgagggagatgacttgtgggtgccagcaccatgggactttgggtgatcttggacctattccttcctccttctaggtgcttcctgagctggcgaaaaggagagctggatgctgggattctataaattcggcggtggatgtgagtctagctacagcatggaccctggccagccctggaatctgagttcagagatctttgaaaaaatgccttccgataactgagcacctactacatgctggacactgcaccaggagatttgtgtgcattccctcattgaatcttacaaccaccctctgggatggtttttgctattaagccgattttatagatgagaatactgagggctagaaaagataagtaccttgtccaaggtgacacggccagtaagctgtggagtctggatttgaactaggctctcttggagtttggagcccggtcttttcatttctggcagagacctgtggcttcagggggcggagcccagcccatgggggaagtaagtccttcctgttagatctgtctgaggagtagtgagtttctcatctaggaaaccatcagcaggccaggctggactgccccatttctagccccctttcttctctgcagactgccctgtttctagccccttttcttctctacccttttctgtagagtgcgttagacccattttacagaaggggactctgagaccctttcttctctgcggggcagggtatgtggttcagacgagccgcttccatccccagttctgtccctaagccctgggtgacctcagcattgagcatcgtctctgagcctcagtttcctgtctatatctagtgccaccaggcatcagaaacgtaagtgcttcaaggatcttgggtgaaaagccgctttagcggcgagcatacactaattaataaaatgccttggccggggctgggcagaggaagtaagcgggcagccgaggtgacagctggagggaggagcgggggtggagccgggggaagggtggggaggggatgggctggagctccgggcagtgtgcgaggcgcacgcacaggagcctgcactctgcgtcccgcaccccagcagccgcgccatgagccgtgagtgcgaccccggtgcccggtggggaattttcttggcctcctggtggagccttga

SEQ ID NO: 42695 - DNA, 2300 bp, Homo sapien
ttaagtccatttgttctagggtatagtttaagtccattgtttttttgctaactttctgtcttgatgacctgtctagtgctgccagtagagtgttaaattcccccactattactgtgttgccatctatctaattccttaggtctagtagtaattgttttatacatttgggagctctagtgttaggtgcatatatatgtggaattgtcatatttcctgttggattagtccttttatcattatataatgtccttctttgcctttttaactgttgttgctttaaagtttgttttatttgacataaaaataactactcttgcttgcttttggtgtccatttgcatggaatagctttttccatcccttgaccttaagtgtatgtgagtccttatgtgacggatgagtctcttgaagacagaagatacttggctggtgaattcctatccgttctgccattctgtatcttttaagtggaacatttagactatttacattcaacattagtattgagatgtgagatgctattctattcatcattctatttgttgcatgaaatccttgtttttgtttttcattgttttgttgtttaataggtcctgtgagatttatgctttaaggagattctattctggtgtatttttataatttgttttaagatttgagctacttttagtagttcttgtagtgttggcttggtagtggtgaattctcttagcatttgtttgtttgaaaaagactgtatttttccttcatttatgaatcttagtttcactggatacaaaattcttggctgataattgttttgtttatggaggctaaaaataggaccccaaactcttctagcttgtagggtttcttctgagaaatctgctctgtttgtctgataggttttcctttatagattacatgatgcttttgcctcgcagctcttaagattctttccttcatcttgaccttagataacttcatgactatgtaccaaggcaatgatctttttgcaatgcatttcccagtgttctttgagcttcttgtatttagatgtctagatctctagcaaagctggggaatttttcctcaattattctctcaaatatattttccaaacttttagatttctcttctgtcttgggaacaccaattattcttagctttggctatttaacataaccccaaacttcttggaggctttgttcattttttaaattcttttttctttgtctttgtaggagtgggtttattcaaaacccttgtctttgagctctgattttctttcttctacttatttgattgtattgctgagaatttccagtgcattttgcatttctcttaagtgtgtccttcattttcagaagttatgattattttttatttatgctatctatttcactagagatttttccattcatatcctgtatctttttttgatttctttaagttggactgcatctttctctggtgcctccctgattggcttaatagctgatcttctgaattctttttctggcacttcagagatttcaccttggtttggatccattgctggtgagctagtgtgatcttttgggggtgttaaagaaccttgttttgtcatattgccagcactgtttttctggttccttctcatttgggtagactatgtcagagggaagtttggaactcaagggctgctgttcagattcctttgtcccacagggttgctcccttgatgtggtgctctctcctttccccctgagatagagcctcctgagagccaaactgcagtgactgttgtttctcttctcaatctagccacccagtgaagctactgggctctgggctggtataggggagtgtctgcagaatcctgtgatgtgatccctcttcaggtctctccgccacagataaccagcacctgctccaatggaggtagcaggggagtgaagtggactctgtgagggtccttggttgtatttttgttaagtgtgctggttttgtgtggacctccagccaggaggtggcgctttcaagagcacatgagctacattagcacatcagcacatcagtatagggaagattaggcagggggtggggccatagggctctcaagggattatgtcctttgtctttggctaccaggtcagctagagaaagaccatcaggtaggggcagggttaggcatgtctgagctcaggctcgcctttggtgaggcttgctgtggctgctgtgggggctgggagtgtggttcccaggccaatggagttatgttcccaggggaattatggttgcttctgctgtgtcacacaggtcactagggaagtgggggaa

SEQ ID NO: 42696 - DNA, 2300 bp, Homo sapien
tttgtatttttagtagagacggggtttcaccttgttgggcttcaaacaactggtctcgaactccagacctcataagccacctgccttggcctcccaaagtgctgggattacaggcatgagccaccacatccggctgggagtgtggtcttaactgtgctcattgatgccacagcaatatttttcatccttaatccccctagcctcagtcagcccctgcctcagagtaataaaaagattacaaatggtgagtttccaaaaagccactgactacttttgtttcacagcccatttctttccatcttggtcttctctccaagacacccacaccttttgcttgttaattctgccccgctccaccaccttggatgtgatttttttgaaaaataccatgctaaaatttctttttcccaagagggggaaataattttagaatttgataaactaaactgtcctcactcaacagactcccccaattctgtcatttgttatgtcattccctgttcagaaaacaaaaataatgtcactcatttagtgctgaatcaaatacctgtctctttaaaggcaaaatcattcactgatattttcaaaattcatagtgtacctcttattaaaatccagattaacctattaaaacccttgcttaatattaaacagccactaaaccagatggcactgcaaggtattaaacttattataaaagaatataaaaaacagtctcattattctctgtaccagtctttggagtaccctgatcctacctactaaaagaccaaacaaccatgggaggaggtttgttcaggaactctctctgagttataaaccatagtattattacaaagcacccagtggttccaaatccccatactgtattaaatccaatacccattgatagcagattcttcaccatcactgatctgtgtattacattattcattattccaggggatcaagccaaccaatatcttcttgccttcacctgggaaggccaacagttcacctggacattaatgcctcaggggtttactgaaagtttttcctattttctcaaatgttaaaggcagacttagaggatgtaatttttctccaaggctcttgtttactacaatatgtagatgacttccttctttgctgtccttcacaggcagcctgtgaaaaagacagtgtatacctattaaagcaagtggctgcttaaggtcataatgcctgtaaagaaaaactgcagtgagtaaaaactcaggtgaaataataaagccatttaatttcagagaatgaattacatttagaaccagaacagattcaaggcattttacaatttcctcagcccaaaagaaatgccaactttgtgagtgggtttcttggactcactggctacttttgaaactgaattcccaacttttcttttctggcccaactcctatgtgctttacataaatttaccaaacctgaccccattacttggacaaaatcataagggtaagtttttaaaaagctaaaggagaaattgataaattctccagttctaggtaattctaatcataaactcttttttttttctctttgtctgtgaaaaggaagaaaatacttcagggatcttaacccaaaagcatggaggtccacaccatcctccaggatactacagttgacaactggatcccatctcctgtggattccctctctgcctaagagcagtccccgctgcatccttgttagtcaaggcgactgaggagatagtcatgggattcctccctgactgtgttttttcctcatgccatggaagccgttttacacactcatcacacttggcatttttctgctagcggactaacctcctatgaacctcttctacttactattcatcatattattcaatcatgctgcaataaccttaaccctgtggctctctggacctctccatcagatgaaacaccacatggctgcttaactctgacagaccagcttttaattccttgggagcaattcctgtggacaatgctgagttgtcctggtttacagatggctcacatttaaagaatgagtctggcaagtattgtgcaggctgtgcagtcgtgacttcctttgagattgtgaaagcagctcatttactattaactacttcagcccagcaggcagatctgtttgccctcgcttgagcctgactccttgctacaggaaagacaatgtttatgtaagcagcaggtaagtgatatggcttggctctgtgtccccacccaaatctcatcttgaattgtagttccataattcccatgtgttgtgggagggacccagtggtagataatttg

SEQ ID NO: 42697 - DNA, 2300 bp, Homo sapien
attcttcacaaatgttttcttattaatattcacaatattctcatgacttaggctcatagtctcatctccagattagagatgagaaaactgaagctcaggccaactggatcacttctccagaactcacaaatatgaagatatgaagtgatgttgccaggacttgaatctagggctaattgcaatgcttttgtcagtacaacatactaccctcagacactaggctctatccttaaggtcacagccccagggagccttaaaatgctggagtgagcaggtgcagccggggaacctgggccaggcattcttgccccttttctctatgggtccattcggaactctgttatgttggctgccttttggtaagtttcaaaggaaggatggtattctcatatgaaataggagtatgctcaactcaccagcttaaagaagcaaagaattttaagcctatccttaacctgtacaaagctcttctgaatttttctcccaattaagaactgttataatgaaatcctcacattttctatttacttagtatacgttggtatatatattaggcatttggcattgctttttgacttaaagggaacttttcaattaagacacagtggcactataaactcattcctactggccttgcaggatttggtaacttaggtttagaatatctttttgaggtgttttttttttcttatgttccagggtacatgtgcaggatgtgcaggttcgttacacaggtaaacgtgtgccatggtggtttgctgcacctatcaaccccatcacctaggtattaagcctggcattcgttagctctttttcctgatgctctcaccccctcaagctccctagacaggtcccagtgtgtattgttctcctccctgtgttctcattgttcagctctcacttataagtgagaacatgtgttgtttggttttctgttcctgcattagtttgctgaggataatggcttccagctccatccatgtccctgcataggacatggtctcattcctttttatgtatgttcattgcagcactattcccaatagcaaagacatggaatcaactcaaatgtccatcaatgatagactggataaagaaaatgtggcacatatatgccatggctttagaatattttaatgggtagatagtggctgtggaggaagctggcatatttttctcattcctgattttaatggaaatgctttaaaatgtctccactaggtatggtgtttactgtattatttagtttactgagtgtcttagtcggttgggctgctatagctgggtgactttaaacagcagacatttatttgttacagttctggagcctgggaagccccagatcaaggtaccagcagatttggtttctggtgcgggtccactttctggttagcagatggctgccttcctgctgagtcctcacatggcaatgccagagacactcttgtgtttcttcttataagggcaataatcccattcatggggttctaccctcatgacctaattacctcctgaagctctcacctttaaatattttgtgtaagatttactttttttatggcagtgatattgtaatcaatagacaagttttttttctcatcaactttatacataatgaaaactttggctgtttatctttgatccaatttcttttggatatgtgttatggaaacttcatccctatatgttgcttactaatagattttgaagtcaaattttaaaaagttcaatatgttacaacatgaaggctcatgactagcctgatgattgtttttaaaagtacataaacaatggaaattggaaagacgttatcttacgatccatctgctaatacggtgtgaagctttctctttactgactagacatggctggtcttctcttctatttcaaaccctctactctcttggcgaattatcccattttgagtgataaaaccatctacttgaaatgattttttgtagggacatagcaatgtagacagacattggcatattcatcagtagcaaggatcttattcttatctgctgctgtaaatcaacatttgtttgtttctgcctttttcaatgtccctctatttccagcagagagaagactgtcagcatgaagagggagaatcagagcagtgtgtctgagttcctcctcctggacctccccatctggccagagcagcaggctgtgttcttcaccctgttcttgggcatgtacctgatcacggtgctggggaacctgctcatcatcctgctcatccggctggactctcaccttcacacccccatgttcttcttcctcagccacttggc

SEQ ID NO: 42698 - DNA, 2300 bp, Homo sapien
tttacgaccagatgaaatcattgtgactagcctgtgatgaaaaaccagactcatagaatattgcttagtttctggaaatgacattttaaggacagaggaaaagtgaacagtgtcacagtagagacctggatggcagaaaaacctggagacgctatgtttaacaagactgaaaaaaaatgaaagaaaaaatcaccaacatttactgaatactttacagaaaccaggtactttcatctaatccttgtaacaactttaagtgtaataaactataaaaatccccatttgacagatgagaaaatgaaggctgggcttttaaccactgcacagtgctgcacgtttagatttctcaagggctgtcatggtgaagaataacaggcttgttgtgtgagatcccagaggaccaacctcattctgcgagacagaaatgagaggcaattatactttagcttctcctgtaaaaaaaaaaaaaaaaaaaaaaatctgacaactagagcttcctgccactaaaagcgttcaaaaggagaaaggatgattatttccccaggatcctataaaaagagactgaacattgattgagaagttgggtcaagttctcaatcaatgagtttatagttttcaatgatttatagtttttgcttatatatgcttttttattaagacccatgcgcttttaaaaagaggcatataaaattatccatttgatgtttaaatagctataagtatataatacatggagtattgtacttttaaaacaaaactttacattatttcttaaaatgtacccaatgacatctaaacacagagtgatttgataatcacatcattcatttttaaaatgcaagaacaaagtcatcctgaaaatgtgtatgttttacattattccttctccatttaaacatgtatttccattcttctcctatacaaattttatcctgttgtaataaatgtttatgctggaaagtctcttataatcacctatattacttttcacaataaaaaataaaagtttttttatttcttatgaccacaaaattttgtgttaaaataattatgaaaaatcatctacattgagttattatcacaattattactaattggcaccaatttggtcagtttaaacaactgaccaaaactatgtaattgttagcttcaattatattaagttgccaacattcacctattttgatctacaaaaatagtaatttcatatggtaatatatcacaaattttgaaaataattgttattcctaaaaagattttaattaaaggcatctagtaggacttttttagttcatatatctagaaatgagtattacttattactaaagtaagtcaaaatcaacatcaattatattaccatttagttttcatttgttacatgggaaacaagattatgcactaggtgacatcttaaagataagaagagtttagaaaagagaactgtggaaattgaggatctagacaattattttcctaaaaccattattctatgtactgagaagtctctggagatcagcaagagtatgtgtcccccaaagtgaaaattactgaaccaaatgacctctgacctccctttcagcaggcagattccttggttatatagctcatcaataggtcttattaccatgaataagatggcttggttttaatctggggagtcatgtcatatagtggctaatagtataatctttggcaccagataaatgtgacttaaattgatattttgctctttatgaacttaaactttccgtgcctgttttcaaatttgtaaaagtgaaataataataataataatagtagtagtagtaataatagcctcatagagttattgatttaaatgtgataacacagaaaagtccctggtttaaggtaaatgttctgtaaatgttagctatggggctattaggttggtgcaaaagtaattgtggtttttagcagtacttttaataatgatgatgttaatgaaaaatccatattatcttggaaaagtcataagcacttaatccctttatcagcacagtgtgtagtttacactggggcacaacagtgactatatgtccaagtctatagaactaattctttttgttcttatggcaacagatggacaacagcaactggaccagtgtgtcccattttgttctcttgggcatttccacccacccagaagagcaaatcccactcttccttgttttctcactcatgtacgcaatcaatatttctggcaacttggccatcatcacactgattctctctgctccacgcctccacatccccatgtacatcttcctcagtaacttggc

SEQ ID NO: 42699 - DNA, 2300 bp, Homo sapien
acaaggtaactttttgtttaacaaggtaactttttgtttaacctagattttttttaaaactttttttttttttcatattggaaaagtaattcatattcagtagaggaaaactgaccaaaacagaagcaaaaataagaaaattaaaataatctctaatcctactacctagaataaaacactattaatattttggtctgtttcctgccaaggtgttttctgtgtatacatggatattttgtttgtttttaaacaaaacgatgggatcattctgaacatactgttctatagtatggtcagctaataatatatcagacctttttttatattattaaatattctacaactttttaaaaatgtctattaatattccatcgtatagatgtgatataatttgcttgatggttgtctcttaaaaagaaagatagcaaatactttttttaaattacaaaagtgatagatgttcattgtagaaaatgtaataaacactgttaagacttaaaagccatataattccaccaaccaaaattaatcccttttgtcatatttctagtcatttttatagcctttttttctatgtatttataataattatcatttgcgtttttttcctttttttaactttaaaaatgtatattctagggtcaggggaaatgtaatctggaattaaatattagccttaaaattcacaattttgattttcctggcttttcaggaattgactaactgtaaaagagtcttgaaagtatttagtcaacaaacagagtgcattttttttttttttgactaagaaagctcgttgtagtagaaagggtggaatgtattgaaaattattagaagcagggaagtattgttagtctagcttatttcctttcagtcttttttcaatatttttataaacattgagtacttactgaatttagttctgtgctcttccttatttagtgttgtatcataaatactttgatgtttcaaacattctaaataaataattttcagtggcttcataatatttcatcatttggatatataataatttatttaaccagtctctttatttttatttatttattttgtttgttttctttgagatggagtctcgctctgtcacccaggctggagtacaatagcgtgatctcggctcactgcaacctccacctcctgggttcaagcagttctcctgcctcagcctcctgagtagctgggactacaggcacatgccatcacgcctggctaatttttgtatttttactagagacggggtttcaccatgttggccagactggtctcaagctcctgacctcaggtaatctgcccgcctcggcctcctaaagtgccgggattacaggcgtgagcacgctgcacggcctaaccaatctctttatattggttatttagattctcagtgttttgctgaacacttaatgcctttgtgttttgggctatattttgaattattctcatagatttctagaagaggaattactgggcaaatagggacacttaaaaatagcttttacaaaccatcttctgttctcattgaaaatgagaatatattatgcacttacagggaacttgactttgcttttcaagaacagaagttctaaaatacagtagggctgggtgtggtggttcatgcctgtaattccagcactttgggaggctgaggcagacatagtgaggcctcatctctacaaaaaatagaaaaaattagctgggcacggtgttgtacctctagtcccagctacttgggaggcttagtcaggaggatctcttgagcctgggaggtcaaggctgcagtgaaccatgattgcactccaacctgggcgacagagaccctgtctcaaaaaaaaaaaaaaaaaaaaaaattaaaaaaaagagtagacatgtaatggtaatggagaaatcctagacttttttttttggagatggtgtctcactctgttgcccaggctggagtacagtggcacaatctcaggttactgcaacctccgcctcctggattcaaacgattctcctgcctcagcctcctgagtagctgggattacaggtgcctgccaccatgcctggctaatttttgtatttttagtagagatggggtttcaccatgttagccaggctggtctcgaactcctgacctcaggtgatcacctgcctcggcctcccaaagtgctgggattacaggcatgagccatcgcatcgggccgagaatgttagatctcttaactttggtgtcgtggaagcagcatgggctttagagtcaggcagatctgggttcaaatcctgtctggcagtctagtggt

SEQ ID NO: 42700 - DNA, 2300 bp, Homo sapien
ccgggcgtggtggcgggagcctgtaacctgggaggcggagattgcagtgagccgagaattgcgccactgcactccagccttggcaacagagtaagactccgtcttaaataaataaataaataaataaaccagtgtcgggcagttctttatagcagtatgaactgcctgacactgggttatttatttacagcagtatgaaaacggacttattaatacagtattcttgaatgggtgtgtgtttgtgtgtggtattttttgactcctctgagggcctcagcaaacagcctctctgaaaacaggcaggtacagaaatttgcagacaatttcaggtggtcctagaaccacaaattaagatcccctaccccaaattaagagccctattttaaacagtgtatctttctagaatattttctatgattcaatttacccaaagctttctatgagcaacttcacggttgtgtattggatacttcaacaagggctcagaatttgaaatcattttaggttttaaaaaagttgcaaaaacagacgacaaagtatgcctgaggaaaaagaaaaaaaagttgcaaaatatcatagtatggctttaccctggaagaagaaaacaaagttgcaaaaataggatagtgcttccctagattcttcatctaatagaatctccaaaagttcacatcttacatagtataattattaaaactattgatacaatactactaatatgaattaataggccttattcaaatttcgtcagttgtcccattcatgtcctttttatttttcttttttgagacggagtctcagtcttgacccccaagctggagtgcagtggtgcgatctcagctgtctgcaacctccgcctcccgggttcaagcgattctcctgcctcagcctccgagtagctgggattacaagtgtgcaccaccatgcccggctaatttttgtatttttagtaaagacggggtttcgccatgttggccaggctggtctcgaactcctgacctcaggtgatctgcccgcctcggcctcccaaagtgctgggattacaggagtgaaccaccgcacccggccccatgtcctttttctataccaggagccaattccggatttcacattacattcctgctctgtcacccaggctggcctccaagtcctgggctgagcgatcctcccgcctcagcctcctgcgtagctgggactacaggcgcgcgccaccactcctggctgccgcttctttaaaatggtgaaaccccgtctctactaaaaatagaaaaaattagccgggtctgctggcggacgcctgtaatcccagctactctggaggctgaggcaggagaatctcttgaacccgggaggcggaggttgcagtgagccgagatcgcgtcactgcactccagcctgggcaagaagagcgaaactccgtcaaaaaaatatatatatatattttaatctatgccctgtacttgagggatttgtgctctcgggcaaattaccgaacgtctctgagtcacttttccgtctaatagacgtgatgcgatgaagaaccaataaaaaacacactttgaatggcttcggaaacttcgaagggaagtgaatacatttttcttttctttctttctttttttttgagacagtctcgctctgtcgcccaggctggggtgcagtggcgcgatctcggcccacttcaacttctgcctcctgggtttaagcgattctcctgcctcagcctcccgagtagcttggattacaggcgtcggccaccaggcccggctaatttctgtatttttagtagagacgggttttcaacgtgttggccaggctggtcttgaactcatgaccttaagtgatccgcccgcctcggcctcctaaagtgctggcattacaggcgtgagccaccgcgcccggcctgtgaatacatttttcttattgcttgacgctgggtcatacaattcacttttttgttgtgcagattaaaaccaaaacaaagcaattaggagagcgttgttgtcgaggtgttttgttccaaggtaggacccgtagcttctcccctgcccctcagctgggagtagcggcttctgattggacaatgcgcgtccgccacgacgcaggaaggccgcctcattggtccgcgctgtcgggcttcggcggcttttctctttagcgctcagggcgctgacccactgctcttcctcttaagaaagtgctccattccttccggcgcccggagctgctggcccaaagggatccggagcgagctagggcaggtaactgcattggggtccaccgggaagcggcagcagctg

SEQ ID NO: 42701 - DNA, 2300 bp, Homo sapien
ataggtcaaacagctgacttcaaattactcattcaaaccaggaatagctatgttggatatttgcagtggtttggtgtgcaattgagtttagttcaataaacactgaatataaatgcactacggctaggtgttatgagactctgaagaccgttaaggcatagtcctttactaagaattcaaaatctttcctatagtataattattttatggttgttttattaatagtgtgatttatatctatcatttattgagcacctactcatgccagcactgtattagtacatttgcataaagctattttatttaattctcacaaaaaccttagggggcaggtattttccatattttacagggtaggaatcttacagaagttaagtaatttgcccaagatctttcagctgtaaatagctgggatatgaatcctgggctgtctgaggtatttcttccctacttaacaagaagtgcagaaatacctacagtattatttatgctctttacatcactgctaattattgttcttggcattaccaaacaagtttgtgtaccaggatgattttaatttaatctggtgttttcagtactgttatatttggagaaaaccattaatttcttttttaagtttcttctggtttattccccatccccagaagttctgatattaaaatttttaaaatcttttcattataaaaaatttcaaacatatacaagtatagagagaataatatgataaactccatgtacccaacacccaggttccacggttatcaactcagtcagtactgtcttatttataccccctcttccccctggattgttttgaagtaatcctaggcattatattttttaacccataaatatttcaataaagcattgaatttttaaactagatccaaataggtcttgtcaaacttagacttcttcaaagcaggtaaatatcttgacaacagagtgacagagctgccacttgcttgctagatgccacttgcttgctagatgccacttgtattttcttttttgatatacaattatgcttcaggaaatgagtatttccctgagactccgatctgctgagttcgacttgagaaaagttttttaacttttttgcccttgagtttttttatctgaataattagtaaactagatttaatgattcttataactttagtattctggtcctataagtattccttattcacagtccctttaaaatttattcatttcccctttatctccagagcctcctttgaattccttttgttctttgatactgcataatttatcagttatattcccttatttgcacatgttctttttctcaagaaaattataaactcagcttggtgtagtggctcatgcctataatcccagcactttggaagatcgaagtgggtggattgcttgagcccaggagtttgataccagcctaggcaatatggcaaaacttcatctctactaaaaatacaaaaagattgtctgggcatagtggcgtgtgcctatagtcccagctacttgggaagcagagctgggaaaatcacctgagcctgggaagtcgaggctgctagtgagctgtgatcaccccactgcatgttagcctgggcggtgggagtgagaccctgtctcaaaagaaaaaagaaaattataaactcctttaggatatggactgtgatctctgtgtgtatctatgtatttgttttctcttacttttttttttcttggtgcaccccataccatgttagtaccatactataaatatttgttaattggttttgatagtattagtcaaatgttccatatgagcacttaaaggacaaagtgaaaagggaaagcatgccattttctattgtaaaaataccatttcttgcttattacagttttttatattagttattgaaaaagtataattgtttgctatgaagtcctctgaattctataatagttactttatattagttacaagcttgtaaatttaagcttcttactaattggctttatttatttttttttaaccagttctcagagagtgtgagtggtacaaaatttgaagaagatcatctttcccattattctccctggtcttgtggcaccataggctcctgtataaatgccattgattcagagcccaaagatgtcattgctaattcaaatgctgtgttaatggtatgattttgctggggttgcaggggttggaggtgagagatgatgcatgttcactcatgttgtagaatgaatgttttctattcattcattcatattgttgccttataactcagtagcagcagggttatatttaggtaagtctg

SEQ ID NO: 42702 - DNA, 2300 bp, Homo sapien
gccaggcagaggggctcctcacgtcccagacgataggcggccgggcagaggcgcccctcacatccccgacagggcggctggccgggcggggggctgacccccccacctccctcctggacggggtggctggccgggcggggtgctgaccccccaacctccctcccggacggagcggctggctgggcagagggtctcctcacttcccagtaggggtggctgggcagaggcgcccctcacctcccggacggggcggctggccgggcggggggctgacccccccacctccctcccggacggggcggctggccgggcggggggctgatccccccacctccctcccggacggggtggctgccgggcggagacgctcctcacttctcagatgggccggctgccgggcggaggggctcctcacttctcagacggggcggttgccgggcggagggtctcctcccttctcagacggggcggctgggcagagacgctcctcacctcccagacggggtcgcggccaggcagaggcgctcctcacatcccagacggggcggtggggcaaaggcgctccccacatctcagacaatgggtggccgggcagagacgctcctcacttcctagatgggatggcggccgggcagacgcttctcactttccagactgggcagccaggcagaggggctcctcacgtcccagacgataggcggccaggcagagacgctcctcacttcccagacggggtggcggccgggcataggctgcaatctcagcactttgggaggccaaggcaggtggctgggaggtggaggttgtagcgagctgagatcacaccactgcactccagcctgggcaccactgagcactgagtgaaccagacatcgtctgcaatcccggcacctccggaggccgaggctggcggatcactcgcggctaggagctggagaccagcccagccaacacagtgaaaccccgtcttcaccaaaaaaataagaaaaccagtcaggcgtggcggcgcgcgcctgcaatcgcaggcactccgcaggctgaggcaggagaatcaggcagggaggttgcagtgagccgagatggcagcagtacagtccagcttcggctcggcatcagagggagaccgtggaaagagagggagagggagaccgtggggagagggagaccgtggggagagggaggggggagggggagggggagagggagacattttcttaaatggaatccaaaatcaaattgccagtccttttgtgtattagagtattatatccaatgatcaccataaataaaactcaaaacttagtatcagaaaaatctttcatacaaatgtttttaactttaggtataaactattctgagaactataatacagaatttctatttttgtgtaatgtttgtttaagaatgagttttttaaattatttttttaaattatataatccttttacagtttggtaacaacagaaaatggcttcagctcttgcataccttttctctttactctgtgttctcaaccaaatttgttgccagttcctgtcatttttacataacatcccttatattctagttatacaaaattttcaaatggtctctttccactccctcaaaaggtttttttgaatacattcttggacaaagtggcatgaggggaaaaaaaaatacatataaactcggcttgctatattaattacatgtatattatatgtgaatggcatatatattttcatgtggcatctgttgcagtagaatttgatatagactgtatttgattatttagctgaagaaactttttgtcaaaactgtttcctcctttttcaatctattcccattgcccattgccattttttgtcttgagtaagatttagtgaaatattcaccaatctgttgattgtttttgaaacaggtatcgattaaggaacaaaaagatcaatgccactgtaagaacgtttcctcttctaaataaagttggtgtaaacaacactgtcacaaccacagccggaaatgtcatttctgtcataggaagtactgaaacaacagggaaaattgttccaagtacaaacggaatttcaaatgcagaaaacagtgtttcccagctaatctcacgtagtactgacagtaccttaagagctctggagaccgtgaagaaagtgggaaaggttggcgctaatggtcagaatgctgctgggccctctgcagattctgtaactgaaaagtaggtattaggtaaaaatgattactggaaattctttttcctttttagaaatgcctgagtgtttttatttctgctgatgaataccggt

SEQ ID NO: 42703 - DNA, 2300 bp, Homo sapien
ttactactgttcttattctgcttaagctacactggcttcttagccagttctcagatataccaagtatattgccaagtgatggcttttgtagttactgttacctttgcctagaacgttcagtctgtctccattttcttttttgttgttgttgttgagatggaatctctcactgtcacccagactggagtgcagtggcgcaatctcggctcactgcaacctccacctcccaggttcaagtgattctcctgcctcagcctcccaagtagctggggttgcaggtgcgtgccaccatgcccagataatttttgtatttttagtagagatggggtctcgccatattggccaggctggtctcgaactcctgacctcaagtgatctgcccaccttggcctcccaaagtgctgggattataggcgtgagcaaccgtgcccagcctctctcttcatgttctttattcattcatatctcacagttctcaagggagccaatcctgaccaccctaattaaatttgtaacccctcgctagtatttccagtcccccttatctttgctctataatttcacctcttggaacactacaaatttattatgtttttaatttattgattggctacctcttctcctctccactagaatgtgagctccacaaaggcaaaacattttgtctgttttgctcattgatatatccctggtacctataactgtgtccagtgcatggtaagcactccataaatataattatttgttgaattgcattgaactttttttttttttgagacggagtcttgctctgtcgcccaggctggagtgcagtggcgcgatctcggctcactgcaagctctgcctcccaggttcacggcattctcctgcctcagcctctggagtaactgggactacaggtgcccgccaccacgcccggctaattttttgtatttttagtagatacagggtttcaccgtgttagccaggatggtctcgatctcctgacctcgtgatccgcctgcctcggcctcccaaagtgcgggattccaagtgtgagccaccgcacctggcctgtattgaacttttatagcggcactacaaaatacagattttcatcttcattttgcagatatggaaattatgacttggagcagttaagtaatttactcaaggtcattcatagaagtagcagagctgcaatttttacccaagttttgacctttgaatgagaacactctgtcttaataatgcttatcttaagtaaataatatagtaaaaaggtgataagtgctttggggaaaaaaaaacaactgtgtctttttttctccactctttaattttgaaattctttcagacttacaaaaaagttgcaaaaaatactattcagagaacttgtataactttccacagcttaacctaatgttaacatccaacaccaagaaattagcatcgatacaatactgttaactttctgcttcttttcttccttcattaatccacacagctcctgctgttaagtatgttattttttgctgttgctgttattgttgttattttgagatggagtctcactctgtcacccagactggagtgcactggtgcgatctcagctcactgcaacctcagcctcccgggttcaagagattctcctgcctcagcctcctgagtagctagaatcacaggcatccaccaccacacctggctaatttttgtagtttttagtagagatggagtttcaccatgttggccaggctggtctcaaactcctaacttaagttaatctgctggcttggcctcccaaagtgctgggattacgggcatgagccaccatgcccggccttatttttggtttgtggaaagcagtttggctaggtgtttgactttaattttacttaaatggctttcatgtattatctatgcatgataattttatactcaccaagattattatcaagtacataaataatagttgcatgagctggatgaatgtatttctgcaatattcctttttttttttttttaaggtaccagatcatcagtcaattaagttaagtaatctaggtgagaataaacactatgaggttgcaaagaaatgcgttgaggatttggcactctacttaaaaccactaagtggaggtaaaggtaagttcataaaatgcatttttactgataagtaggacttggtagtacatttactttgaatgacttgatgtggataccctattaagttatggaaaaggagtttgcttgagaaatgccttgaaaaatgtatagactgagaaaattatgttgtcctattttctgaaaataaccaatat

SEQ ID NO: 42704 - DNA, 2300 bp, Homo sapien
gaaagtttgtataggggtgctttttacatagcaagccctgtaattcatttttaccaagattttttttaatctctgtttttgtgaatataaaagcgcagggccgggcgcggtggctcacgcctgcaatcccagcactttgggaggctgaggtgggcagatcacctgaggtcaggagttcaagaccagcctggccaacatggagaaaccctgtctctacaaaaattagccaggcatgatggtgggtgccgtcccagttacttgggaggccaaggcgggagaatcacttgaacctgggaggcagaggttgcagtgagccaagatcacaccattgcactccagtctgggcgacagagggagactctgtctctgaaaaaaaaaaaaaaaaaaaaaaaaaaaacacaataaaggctaatagaatttttttgtatgttggcataattgagaatactttctgttatatattttttctctttgaatgtgactacatttttaaacatctaatttctgtggaactaatatatttgggttggtaaacattcctgtgaaataaagtattagttgtttgattgccctaaatacctagatttcttgttcaccagagagcttttgtcagacttatgttaagtcttgaattggaagataaagaaattctgggaagtttagtgtgttcaaattagtatcgttttgctactaaatcttttactttactaaacttatggaacttttttttttttttttgagattaagtttcgctctttttgtccaggctggagtgcgatgacgtgatctcggctcactgcaatctccgccttccacattcaagtgattctcctgcctcagcctccctagtagctggaattacaggcatgtgccaccacgtctggctaattttgtatttttagtagagacagggtttatccatgttggtcaggctgttctcaagctcctgacctcaggtgatcctcccacctcggcctctcaaagtgctgggattataggtgtgagccaccacgcccagcaggaacattttgatctcagaaataagaaaaattctctcactgtttttttctatgtgccttttcagtttttaatcatgcatatataactttttagaataatgttttattcttctgtgtcttcctcattggactttacagtttttggttatatatatcaatcgctaaataatgtagttttatcagaagtattgtattgaacaatacaagatatttaagacaatttttttgttttactttggcactgtatgttgtggtcagcattagtctttcatttatgaacaaacagctctcttaatcatctctcagtcatcacagtcttctcttatatgttgattttcagtgcctcattttgcttcctagccaagtcttgtcagagatttcctctttcaggtggcaaagctgttttcttcacacttgagtctctacaatattgtttggatcagtagtttccaaagttcattaactcctggccatactttattatgttttggggtactggttatccaagggaaacacttttttaaacaacaaaacaaaaaaaccgcccagcagtccaaagtaatttgtgttcctaaaaatggaatatggaaagttaatttgcttgtttgatgtggtcgttgagaaaaatacataaaagctttgatgtttattatgtgagcaaccaatataaatacagtttagttgaaaggaacactattaaggtattgtttccaggcagaatttcagaaatgtaattaattcagcaaataggttttttaaaaaagacatccaaaggttataaaattatttagaagtattttaggtctgaagctgtaatagttgacttaagcaattaactcttcaaaggtgaatgatgaatatgtggttaattcatacttttgtccatttctagcttacaaaacactacacagcaaaataatgatctgctagactgctaacccgagcatccagcttccacaatgcctgtgcaggcagctcaatggacagaatttctgtcctgtccaatctgctataatgaatttgatgagaatgtgcacaaacccatcagtttaggttgttcacacactgtttgcaagacctgcttgaataaacttcatcgaaaagcttgtccttttgaccagactgccatcaacacagatattgatgtacttcctgtcaacttcgcacttctccagttagttggagcccaggtaagcattcaagattttactataggttggtgcaaaaataatcactatttttgccattattttaacggcttgtccagcctgcaggctacat

SEQ ID NO: 42705 - DNA, 2300 bp, Homo sapien
aggccgaggcaggcgggtcttctgaggtcaggagttcaagaccagcctggccaacatggtgaaaacccgtctctacaaaaatacaaaaaagaaatttagccgggcatgatgacgggtgcctgtaattccagctactggggaggctaaggcaggagaattccttgaacccaggaggtggaggttgcagtgagctgagatcacaccattgcactccagcctgtgtgacagagtgagactccgtctcaaaaaaaaaaatatgtacatatatgtatatataatgtgtatgtttatatgtgtatatatacttatatgtatctatatatgtgtatatatatttatatgtatgtatatatgtatatatgtgcatatatgtatatatgtgtgtatatatatatatacacagtagggtggaaaacaaatatgtacatgtaaattacctatcactgtccagttgaaattactgaaacaattattggttgttaacagttctctaggcctggcatatgtttcataaagagaagagaacgaaaaagataatgtgtggaagaaacgtcttcgatgtggccaatgaatcttttttcaaaaacactgatttttgcctgtcattcagacaaatataataggtaataactatatattttgttaaaactgtagaagcaacctttccatattctaatttatcgtaggtttacttcgatatttttgttgttgggcatctgatttcacattggaaagtgccttgagtttaattacaagtcatggtcattttttttcttcttttttttgttgagacggagtctggcactgcccccccgcctggctgtagtgcaatggcgcggtctcggctcactgcaacctccgtctcccgggttcaagtgattctcctgcctcagccccccgagtagctgggattacaggtgcccgccaccacacccggctaatttttgtatttttagtagagccagggtttcactatgttggccagactggtctctaacttctgacctggcggtccacccgcttcggcctcccaaagtgctggtattacaggcatcagccaccgcgcccggcgtcatggtcattttctagcctacattctttagtttctcatcagtaacaaggggtacattgtatctgtcttctaggatcactttgctaattaaatgaaatgtaaataaaactaaaatatttaaaattaaatatcacctaacacaggacctgcctgacacatactaagtagtttataaatgttaattctgatatccctattccaagtctgtttcatctataaattataaactgtaagaataattcttaccttagttcgctgtgtaaaaagcttcaacaaatatttgagatatgatgccagaatttgtgcttaaattttttatttttgccagcttttgaggagctcagagctttcttccccccctcccccccccactttggactctttgtctagaaacagagttttctctttaataaagaagtgagatgtggaagtgcctgccaaatacatgttttcttcttgtttttgtaatggggagattacttgacatctttgtaaagggattgagggatcctgtcggcatgtcatcacaggagtgtgaagaagaatgtgacacagatgtatcagattctgctcaatggattccacgcttttcacgaagggagttaagacactcgctcaaaccagcgtctaggaagccggctcaaggcgcagatgaatgtgcagggaatttcccatcaatcccttcggcttgcctagtccttctcacagtacctcccacagtgctccggggctcccttgtcacgtgatcggggtggatccgctgaggcagagggaagttgattcgcagtttgggtggctggggctactacgctttccttccaactcccgactcccgggcttgcgtaatctcgcgttaagtggggagtaacttctcgcgagagctagatcgggatccctccaggtccgcctccgtggtgaggaggaggaggaggaggaggcggaggtggagggaggaggaggaggccccgtcgcggccttcgccgccgccaacggggctgtccctgtagctcccgatggagtttgaggtcgtgaaacctccgccgagctctgccccggcgagacgaggcgcctccgtcgccaagccgcgccgtcgcggggctcccgggagcggcccttagcgaccccgcccgggccccctcaggtagggcgggggcgggcacgatgcggctcgggccccagcccgggtgcctggtccccggcggtcgggcgggagaccagtctcagccct

SEQ ID NO: 42706 - DNA, 2300 bp, Homo sapien
aaaaaaatacgaattaatcagaaagttgttactagattcatttacttccacgagaacctgttgctggaggagcagagcaactgcctttaagaattggttcagaggcggccgggcgcggtggctcacgcctgtaatcccagcactttgggaggccgaggcgggtggatcacaaggtcaggagatcgagaccatcctggctaacacggtgaaaccccgtctctactaaaaatacaaaaaattagccgggcctggtggcagggcattagtcccagctactcgggaggctgaggcaggagaatggcgtgaacccgagaggcggagcttgcagtgagccaagatcgcaccactgcactccagtctgggcgacagagcgagactttgtctcaaaaaaaaaaaaaaaaaaaaaaaaaaaggaatagaattggtgcagaggccgggcgcggcggctcatgcctgtaatcccagcactttgggaggccaaggcgggtggatcacctgaggtcaggagttcgagaccggcctggccaacatggtgaaaccccgtctctaccaaaaatacaaaaagtagctgggtgtggtggcaggcacctgtaatcccagctactcgggaggctgaggcaggagaattgcttgaacctgctaggcggaggttgcggtaggccgagatcgtgccactgcactccagcctggaccacagagtgagactctgtctcaaaaaaaaaagaaaaagaatttcttcagtcatatcttcattcagcacaaatacttgatgcctaccaagtgctagacttcgagaatacaaagatcagtaagccactgtcctaaataactctgcctagatgaggcacaaattaatacaggcgtgttaagtgcaataatgaaggcaggaaaagggattacaggtttcaaactgggaaccaattatcttagggcagttcaggatggcttcaggatgatgagatttataaacgggttctttaaagatacgttggggaaggccgggctcggtggctcacgcctgtaatcccagcactttgggaggccaaggcgggcggatcacgaggtcaggagatcgagaccatcctggctaacacggtgaaaccccgtctctactaaaaatacaaaaaaaaaaaaattagccaggcgaagtggcgggcacctgaagtcccagcttactcgggaggctgaggcaggagaatggcgtgaacccaggaggcggagcttgcagtgagccgagatcctgccgctgcactccagcctgggcgacagagagagactccgtctcaaaaaaaaaaaaaaaaagcctggggaaaaggctagggcacgtcagaggaaacagctgggccaaaagttttgggatggaggaacgcatttaagtgtgaagctagatccagaggttggggccatctcctgatggggcattatctaggcaatctcgaatacggatctttatgatagtttctgctctgccacctttcaagttgtaggtggccccaataaggagaggaatcgtcccagaataatccataaaaggtctggttactctgacagacgtgccgtaaccgaacctcaaaccccgtctccaattcggatgttcaggaggactcacaaaaggaaatggctcggctgggcgcggtggctcaacccggtaatcccagcatttagggaggccgaggcgggcggatctcctgaggtcaggagttcgataccagcctagccaacatggtgaaaccccgtctctactaaaaatacaaaaatgagccgggcgtggtggcgggcgcctgtaatctcagctacttgggaggctgcggagcgagagtcgcttgaacccgggaggcgaaggttgcagtgagccgaaatcgcgccattgcactccagcctgggcaacaagagcgaaactccgtcttaaaaaaaaaaagggatggtgggggaaaacggctcgagtgccgaaactgggacaagagagatggggcttgccggcattcaggagcctttctgtcattccaagaggggggaagtgaggaaggaagaccgtctcagaatgtccttccggggcgcctagagggccccagtaaagaataaagctggttggcaccggatgtgttttcttccaggctaagtccatcttccggcttgggcagacgctgccgcggaatccttgactctagttttctgagtcggtgagtgagtgcaaagtagattcctcaggtggagggtgcctgaggaagaggaggaggaggaggaggacagctgggctcggccccggagtggctaatcttgtgctgcaaccactgggccga

SEQ ID NO: 42707 - DNA, 2300 bp, Homo sapien
agattttaaaatttgaaaaggttataagagacaaagacattatatattaataaaaggctcattacaacaagattatataaaaattataggcatttacctcgctaggaacagactctcaaaatacatgaagcaaaaatggacagaattaaaaggagaaataaacagttctacaataatagtgggagactacaataccccattttcagtaacggggagaagaatcagatagaagataagtgaggaaatagaggaactaagcatcataataaaccagctatacttaaaagacatatacagaacattccacccagcaagagcagaatacacattcttctctaaagcacatgaggtattcaccagactgtatgccacaattcaagtttcataatattttacaagatagatatcatacaaagtatcttctcggaccacacagatgaagttataaattaataacagaaggaaaactggaaaagtcacaaatatctgaaagttaaacaacactcttaacaactgggtcaaagaagaaatcaaggtcaggcacggtggctcacacctgtaatcccagcactttgggaggccaaggcgggtggatcacctgaggtcgggagttcgacaccagcctgaccaacacggagaaaccacgtctccatatctctaaatatcaaattagcccggtgtggtggcgcatgcctgtaatcccagctactttagagacggaggcaggagaaccgcttgaacccaggaggcggaggttgcggtgagccgagatcacaccattgcactccagcctgggcaacaagagcgaaactccatctcaaaaaaaagaaaaaaaaagaagaagaaatcaaaagggaaattagaaaatacttagaaatgaatgaaaataacacaacatacaaaaacttatgagctgtagtgaaaacagtgatcaaagtgaaatgtatagttgtaaataactacattaaaaagagggaaaggctgggagcagtggctcacacatgtaatcccagcactttgggaggctgaggagggtggatcactttaactccagagttcaagaccatcaagttttacacttacaaatgattaaagtaataaacattacgcatgttttacctcaataaaaagcccctcaccaccaccaaaaacgaaaagaatggtcaaaaaccagtaaactggattggcaaggaaaagaactctagaaggatcctcaagttttccggtctggataggagatgagatgaacttgagatcattaaaaggtactttcacatcaggacagctggagatctcgtccatgtagctgcctgggttgtgaatggtcagcatgaagtaggtaacggaagccatgggagtgcaagagtttgccctaggaagaactccaaggcaagaaccctgaaaaacacatccaaaagtgaggggagagctttctgctcttcgggctcccgcgcgacgagtctacacccctaggctaaaaagacttaccaaagtttaagtgcagaggagcccttcaggcccaaggaggcagcggaccgtctaggcccagctacagaagagccgctgagacgggggtcccgagcagcgggtccctgcgaggcgcacagggcctgagccacagacgcttacgagctaaggcacctcggggtagtaggcagtgaagctagtgcccagagtacggtgccctccgtctgcgccccgcccacaacgcagaaattccctctcggggcccctgttgtcctccgagccttccgattggcggagaggaccatgggacctggaagttgtctttgtccggccagggctgcccttccggttccgttgggtccccctttggctcgggttccttgcccctcccccttcccggagccccgaggggccggagctcctggcggtgccggatcctgacggcggccttcccccgggtctgtaagtgcggagacggccggagcggcgggctggggtgcggggtgtctcaaaatggaacccccctggggccctggatcaaccgggacctgcactgggatgggagccgagaggctggcctaggcccctggggacttgaggagcccttggcccggcccacgctgcgccccgcccctttcccttccctgtgactggagtggggagcctgaggatgcccctgggaccgcctcataggaccccagctgagggcccagcagttggcttgggggcctgactctggcatcttataagaagtgccagaggtgaggccctaagaaaacgagcctcgggagccagcccaagaccaggcattcagtgccagtctttgagaacca

SEQ ID NO: 42708 - DNA, 2300 bp, Homo sapien
ggcgcccataatcccagctactccagagctgaggcaggagaatcacttgaacccgggaggcgaaggtggcagtgagctgagatggcaccactgcactccagcctgggtgacacagtgagactccctcgcaaataataataataataataataataataatttaatgaaaaaagatataacatgcaaatagttactgaaaaagagctgatgtagttatactaccattagacaaaatagattttaaaatttgaaaaggttataagagacaaagacattatatattaataaaaggctcattacaacaagattatataaaaattataggcatttacctcgctaggaacagactctcaaaatacatgaagcaaaaatggacagaattaaaaggagaaataaacagttctacaataatagtgggagactacaataccccattttcagtaacggggagaagaatcagatagaagataagtgaggaaatagaggaactaagcatcataataaaccagctatacttaaaagacatatacagaacattccacccagcaagagcagaatacacattcttctctaaagcacatgaggtattcaccagactgtatgccacaattcaagtttcataatattttacaagatagatatcatacaaagtatcttctcggaccacacagatgaagttataaattaataacagaaggaaaactggaaaagtcacaaatatctgaaagttaaacaacactcttaacaactgggtcaaagaagaaatcaaggtcaggcacggtggctcacacctgtaatcccagcactttgggaggccaaggcgggtggatcacctgaggtcgggagttcgacaccagcctgaccaacacggagaaaccacgtctccatatctctaaatatcaaattagcccggtgtggtggcgcatgcctgtaatcccagctactttagagacggaggcaggagaaccgcttgaacccaggaggcggaggttgcggtgagccgagatcacaccattgcactccagcctgggcaacaagagcgaaactccatctcaaaaaaaagaaaaaaaaagaagaagaaatcaaaagggaaattagaaaatacttagaaatgaatgaaaataacacaacatacaaaaacttatgagctgtagtgaaaacagtgatcaaagtgaaatgtatagttgtaaataactacattaaaaagagggaaaggctgggagcagtggctcacacatgtaatcccagcactttgggaggctgaggagggtggatcactttaactccagagttcaagaccatcaagttttacacttacaaatgattaaagtaataaacattacgcatgttttacctcaataaaaagcccctcaccaccaccaaaaacgaaaagaatggtcaaaaaccagtaaactggattggcaaggaaaagaactctagaaggatcctcaagttttccggtctggataggagatgagatgaacttgagatcattaaaaggtactttcacatcaggacagctggagatctcgtccatgtagctgcctgggttgtgaatggtcagcatgaagtaggtaacggaagccatgggagtgcaagagtttgccctaggaagaactccaaggcaagaaccctgaaaaacacatccaaaagtgaggggagagctttctgctcttcgggctcccgcgcgacgagtctacacccctaggctaaaaagacttaccaaagtttaagtgcagaggagcccttcaggcccaaggaggcagcggaccgtctaggcccagctacagaagagccgctgagacgggggtcccgagcagcgggtccctgcgaggcgcacagggcctgagccacagacgcttacgagctaaggcacctcggggtagtaggcagtgaagctagtgcccagagtacggtgccctccgtctgcgccccgcccacaacgcagaaattccctctcggggcccctgttgtcctccgagccttccgattggcggagaggaccatgggacctggaagttgtctttgtccggccagggctgcccttccggttccgttgggtccccctttggctcgggttccttgcccctcccccttcccggagccccgaggggccggagctcctggcggtgccggatcctgacggcggccttcccccgggtctgtaagtgcggagacggccggagcggcgggctggggtgcggggtgtctcaaaatggaacccccctggggccctggatcaaccgggacctgcactgggatgggagccgagaggctggcctaggcccctggggacttga

SEQ ID NO: 42709 - DNA, 2300 bp, Homo sapien
agatggagtttcaccaatattggtcaggctggtctcaaacttctgacctcaggtgatccacccacctcggcctcccaaaatgctgggattacagacatgagccaccacgcccagacaacataaatattttttatgcatttcacttttaaatcagagaaaataaaaagtggagttacaaatcataattataataattgcttttatagttgccagtgtatttgacttactagagatctttgtttctctgtatggctttgagttactattgagtgtacttgcacttcaaaatgtcggtttctctttagcatttcttgaagggcaggaatgctggtggtaacgaactcccttggcttgtctttatcagggaatgtcttaacttcaccctcatttttgaagaacaattttgccagatatagatttttccatgacagttttttttttctttctttcgagcctctgaggattctttattgggtgataatcttattgcaatcctttgtatgggacaagttgctcatctctggctgctttcaggattctctttttttttggcttttcacagcttaattataatatatttggtggtttcttagtatttcctatcaggagtctgataagcttcttggatttgtatatcatgttgttaatagagtttggagagttttgaccatgatttcttgcaatattatttctgccctttcttctcctttggaactcccacaattcattatgtttgtcctactgatggtatcccacagggtcccttaggctttatttactgttcacttttcttcattcttttttcttcctattcttcagatggagtaggagtcaaaaggaatccacctctccacctagacaacagttctaccagcagcaactctctgaagtaactatgttggaactctggagtctattcgaatgcttacatcttccaagggaaagctgggctggtaaatagaggttaatttcagtctctgtcagctttagtgtgataccagctactcatgcagtgttacttaaccctgtagcacgcagctgtatccacattcctggtgcggcttgctggaggctgggtgggcgatacgaactttgtcctccaaatactggctgtcgacactctggttgttgatgactgaagtgcaggtgcagaggcaggttgccactgttttgaccccccaccagctgaacctctttccaagggttttaaaagaatagcacctgttttgtttgtttgcttcccttttactccatttatgagtcagatattgaaggattaggatattcaaaagcaatcacttaggcaggggaaagtagaaagctactgcatataaccagggaaagacacaggctaagaaaagacctgagaaaaccttaagctttcacccgaggctgatcctgatccccagcacagagacaattacaaaagcccagcaaacatgggggcaggagaatcttattttcagattcaccacattatgagattcaaatgttcaattttcaacaacaacaaatcataaggatttaaagtgaagccaaatgtggtggcatgtggttgtagtcccacttaattggttgttactgggcaacatagtgagaccccatctctagttgaaaaataaaatttttaaaaaaatcacaagacatacaaataaacaggaaagtatggtcaattcagaagaacaaaataaatcaactcaaactattcccacagaagccaagatagatgtctgagttaatagacaaaggctttaaaacaactattttgaagtcgttcgaagaactaacagggctgggcgtggggtggctcacgcctgtaatcccagcgctttgggaagccaaggtgggcagatcacctgaggtcaggagttcgagaccagcctggccaacatggtgaaaccctgtctctactaaatacaaaaattagctgggcatggtggcgtacgcctgtaatctcagcttttcaggaggctgagggaggagaattgcttgaacctgggaggcggagtttgcagtgagttgagttcctgccactgctctccagcctgggtgacagagtgagactctatctccaaaaaaaaacaaacaaacagaaaaaggactaaaggaagacatgaacaaagtcaggaaaacaatgtatgaataaaattagactatcattaaagagaaattataaaaaggagctgaggccaggtgtgatggctcatgccggtaatcccagcactttgggaggccaaggctcgtggatcatgaggtcaggagttcgagaccagcctggccaacatggtgaaacctcatct

SEQ ID NO: 42710 - DNA, 2300 bp, Homo sapien
aatgaaacatgaagtataacctgtcacttgtgaggtatactagtctgatatgtttgacttgaatccactgagtcttcaaatataactttcttgttcaagaaatacaaggcttgcaggaacaagctcaatgacttcatgaggaagcaaccactcagataaaaacattttgcacttcaagtggcctgatttctacagtgaacaagaatcttttaatttttttttaagtgccataattaaaaagtcaagggatgtaaccagatggaatgtatggtcctgaattggataatttgggtatactggttgtagaaaaatataatttggtcaacagaatatttgattgtagttaggtattatgtgagaggaaattttcctgtaacattactgagttaagaaagccaactgtaaaaataactttagatggatagaaaatgtgaatgtgatctaggaattaggtgagaagaaaatgtactgaaataaggtagatatttttaattgaaaaaggagatgactaaagtgatctcattttgaaaaaaaaaatacacacacacagaaggatatactctaaagtattaacattggccctgggaatgccatggtttttttttgtttttcattaaaacatagagacacggtctcactatgttgcccaggctggtctcgaactcctaggctcaagccatcctcccacctcagcctcccaaagtgttaaaattacaggcatgagccaccacacctggccttttttattaaaaaaaattttttttaaatgcaatgttttctttttttgttgttgttttagcttgtgtctattctccaaagcatgttgtactgattgtgtagtacaattttatttaaaaatgtatgttaagatttacataaatatttggggtgtccatgaatcaagaaatacatgaaagtatgggcaccaaaacgttaaaagtggttttgttgggagttcaggggattttactttctccctaatactttattctttgaatatcttgaaatggatattttgtaactgtataaggagaaaggaagcgaaactatttttctgcaggggtacacccacatctattgtattagacaaatcacagagggattgcaacagaacacagatttttctcactgttttttctctggttgatcgggatgcattatccaccagaaaacactgtagacgactcactcaccaggaaaagagcatatgccagttggaataaataaaggggaagagtaaggaagaggctgtagaattattttataaattatcaagtcttatgagccaggtgcagtggtgcatgcctatgtacagtcccagctactcaggaggctgaggtggtaggatagcttgagcccaggagttcgagggtggagtgtgatatgatcgtctgtgaatagccacagcactgcatcctggacaagatagggtctctttaaaaataagacttaactagcactttaataatcattgtttttgttcccaactgcattgtacattcattgaggacagggactttaaacttcattatattgctgttgctgtgtttcacctttgaatgatttttaaataaaaatctcatctttgagtcacaatctgatgtaaccttgtccatttctgtcctcttgtgtgccttaaatgcctttaggcagctgtgttgtaccagtggttttaggacttggcagtcggaagttttgacttctagactggattctgtaactaaagctaaattactttataaaaggagaaaaatggtaccattctgacgggtttgtggtgaagctgaaatgagatagccacataaagaaccatcacaatccctgacacaccgtgcgccctcagtaaatgccaggtgaattttattacactgtgaagtactgattttcaaacaggacttgcacatgaaaggtgagcagggggattccttgctcaagcaccagtactctggggttgtaccctttgttaggctcaacaggtactacccagtccgcttccatcgtccccagtcccggctgcagtcacgtagttggctgtccaactccaaatacacaagacagcccaggtccagctcacagccagtgcacttcgcgcaggcgcacagtcctgaggcgggctgaaagcccaggtggggctcggagaagaggaagctccgcctcgcttcccggtattgggccaatagggtcgctcgtcatggtcgcagacctatgagacggggcagggggcggggcggagggcggaagaagtcgctctcacgtgagtaaaggggtgggggggcggggacagggcggtttgggaggcc

SEQ ID NO: 42711 - DNA, 2300 bp, Homo sapien
agtggcctgatttctacagtgaacaagaatcttttaatttttttttaagtgccataattaaaaagtcaagggatgtaaccagatggaatgtatggtcctgaattggataatttgggtatactggttgtagaaaaatataatttggtcaacagaatatttgattgtagttaggtattatgtgagaggaaattttcctgtaacattactgagttaagaaagccaactgtaaaaataactttagatggatagaaaatgtgaatgtgatctaggaattaggtgagaagaaaatgtactgaaataaggtagatatttttaattgaaaaaggagatgactaaagtgatctcattttgaaaaaaaaaatacacacacacagaaggatatactctaaagtattaacattggccctgggaatgccatggtttttttttgtttttcattaaaacatagagacacggtctcactatgttgcccaggctggtctcgaactcctaggctcaagccatcctcccacctcagcctcccaaagtgttaaaattacaggcatgagccaccacacctggccttttttattaaaaaaaattttttttaaatgcaatgttttctttttttgttgttgttttagcttgtgtctattctccaaagcatgttgtactgattgtgtagtacaattttatttaaaaatgtatgttaagatttacataaatatttggggtgtccatgaatcaagaaatacatgaaagtatgggcaccaaaacgttaaaagtggttttgttgggagttcaggggattttactttctccctaatactttattctttgaatatcttgaaatggatattttgtaactgtataaggagaaaggaagcgaaactatttttctgcaggggtacacccacatctattgtattagacaaatcacagagggattgcaacagaacacagatttttctcactgttttttctctggttgatcgggatgcattatccaccagaaaacactgtagacgactcactcaccaggaaaagagcatatgccagttggaataaataaaggggaagagtaaggaagaggctgtagaattattttataaattatcaagtcttatgagccaggtgcagtggtgcatgcctatgtacagtcccagctactcaggaggctgaggtggtaggatagcttgagcccaggagttcgagggtggagtgtgatatgatcgtctgtgaatagccacagcactgcatcctggacaagatagggtctctttaaaaataagacttaactagcactttaataatcattgtttttgttcccaactgcattgtacattcattgaggacagggactttaaacttcattatattgctgttgctgtgtttcacctttgaatgatttttaaataaaaatctcatctttgagtcacaatctgatgtaaccttgtccatttctgtcctcttgtgtgccttaaatgcctttaggcagctgtgttgtaccagtggttttaggacttggcagtcggaagttttgacttctagactggattctgtaactaaagctaaattactttataaaaggagaaaaatggtaccattctgacgggtttgtggtgaagctgaaatgagatagccacataaagaaccatcacaatccctgacacaccgtgcgccctcagtaaatgccaggtgaattttattacactgtgaagtactgattttcaaacaggacttgcacatgaaaggtgagcagggggattccttgctcaagcaccagtactctggggttgtaccctttgttaggctcaacaggtactacccagtccgcttccatcgtccccagtcccggctgcagtcacgtagttggctgtccaactccaaatacacaagacagcccaggtccagctcacagccagtgcacttcgcgcaggcgcacagtcctgaggcgggctgaaagcccaggtggggctcggagaagaggaagctccgcctcgcttcccggtattgggccaatagggtcgctcgtcatggtcgcagacctatgagacggggcagggggcggggcggagggcggaagaagtcgctctcacgtgagtaaaggggtgggggggcggggacagggcggtttgggaggcccaggcggcggagcctccgggacggcgagcggcgggcggcggaggaggagacggcaggtcgggtagggccgtgtttcccctcctcctcctcccaccctcctacctaccaaccccaggggtattttccgacggcccctgcggggagccaagctgtcttctcatcccgcggggtcgggc

SEQ ID NO: 42712 - DNA, 2300 bp, Homo sapien
gctatggccgcgtctgggactggccagacaactgctgctgcttcagatttaaaatgtaattcatcgcattctgattatgggtggccatttgtctgtaattagaaagcatgtgtataaaatgaataaaaatgaaagttggatcacatgtttttactcagttgcctacctcttggaatgctttcaaatgccggcatttgtttattgtcttttattctgctggatactttcaattaatccttctaaataaagatactaaaattacacattttcatagcacccaactctgttagctgaaaattgtcatcatttatgacattaccaggaaaaccacaatataatatgatacagtttgcattgttttaaataggcagaagcaagattgtatattctaagatacaaaggcttatttgtaccatgaaacttcctgtaatatccatgcctgagtagaagaaggtacatttacttttctatcttctgtttgtattcttgtttactgctcagcaaattagaagcaagaaatgcatctcaaaattatagcgtagtgtcaaatatgggaacagtgtaatttatctgtgctatttgtgtagtattcagaatgggagatactttatttttctcttgaaaaagtgatcttaaagtttcttggccaatattcagtgaatcatgagagacaaaattaatggtgaatagccttctagctagaacttcttgtgcagctgaattatgattctcagttgccatacgccatacacttaaaggaagttaacatacttcctttctttaatattgctctttgttctttgggaaaatgccgtgagaaaatagaaattacccctctggtagtgtgtttcagtctaattcctgacaccctgttctgttactaccccttctccttgctagcaccctgaattctgcttatctactaaaagggggattccagacagacgaggaaacagccttcaaatggtgcactgcaggcatagcaagccattcccacactgtgcagtctggaaatcggggcacctctctgacgatgaattccaattagttgctaaagatgccagagtgtgtgcacgtacaggctttttctttcccctccccctttcttccttttcccaagccccctcttctccctgtttcccctcctactcctttatctcctccctccgtgtcttagttctgcagtacgcgggttgaagcacattcctgctttgcaaggctttctgctaaggatgtattgtggcttttgtttggattgcagcatgcagaattacaggtaacattctgaaattgaactaaacagtaaattctgttgaaatgttttcaaagaggcaaaatattatattggaatcaatgaagaaagtaaattatcttggctaattttattagtggtaattgtagtgaaaggttttcctaaatattataagcaaattccttttctcccccgtctcaaatgaaaggaaatgggggtaaattaatctgactgtgattggttttgttttatgctgatcttgaaagcttgatgttgctgctgctcctctatacagtacagatcagttgtgtggggtgctattgagggtagccgtgaatagtggtgccagtaggggtggagcgggagggatgatgccagcctgagctagccaggttctttgattagggcattggatgtgaaatgtaaaatgctctctccttttcttctatcagctgttcagaggagactcattacaactcctgctgaagctcctaatcttcttcccttctcttctaccctttccccctaccctcacttggcctgaagacgttctccccagagtttaccttgctcccctggtgctatgtgtatggtgaacctggcactatggccgcgtctgggactggccagacaactgctgctggctctccttattccaggaaggatttaaaggggaattgcactgcaggcaatgcaccagagcagcagcatcaggagcttggggagtaaggctcctctggcattattacacacatgcaaagctgaccgcaatgacagcagctgcttctttgaactgttggcagcagccaagcggcagcatgaagtgacagatcactcctgagctcaagatgaactccaccttggatggtaatcagagcagccaccctttttgcctcttggcatttggctatttggaaactgtcaatttttgccttttggaagtattgattattgtctttctaactgtattgattatttctggcaacatcattgtgatttttgtatttcactgtgcacctttgttgaaccatcacactacaagttattt

SEQ ID NO: 42713 - DNA, 2300 bp, Homo sapien
ccttggagtaggcctcagggcagactgccagcctggagtttgctgtcttccctccaagttggacccgtgtatggtaagccctgcttggatggctttggggtctctaaattgctgcctgtgaaccaccctgttgagcgtgttggattcttctgctgctgtaaccactttaccagctcctgggctaatgaatgacagctgggtctctgctcaggcgtgggtgggtgcggggatggctgcgggatccttttcaggacaaagtattcctcatccaccccaagtcatcctctttctgggcacttggcaatgtttctgtgcaccctgctgtaatcctggaggggagcaggaaaaaggaacctttgaatcccaggctgtcgtgttctagagcatgactgtgtcagggagaatgagcgcctggcattcatagaacacagtcctctctcaggccctttcccgtttgccatttcatgacttgctgtactggtggcccttggagaagcagcagtgcatagatcgttgttcccaccttgcagacagggagagtagagcccagagatctctccaaaccacactgcttatttgtggcaaagcattgtggcccctaatgagtttttaaccaccagaagaaataacatttcttaagactgtttttagaggtaacagcagccctttctgaggaattagttttgaatttcaccacaactggaattagaaattttctccttttacagatgaggaaatagatgcttagataaggtgacttgccccaaattatagtgcggtgagtggcggcgctcaccccgtctgaggctatgctgtgtgcaggtggtttgcgtcgctagtaggcaccaatgtccgttctgtcttccaagcccacttggcagcagtggcttctctctctgtgatgtgttcggctcacctttcctgtaggcttctgggctatcccctgtgcgccttgaaaccaagcaaaaaccaacccacatctccctgatccttccttagcctcctaaaatccagactttctgggctcgttctttttctgttcctttgttagtgtgctactgggcaaggtgaccaactggtcagccctgggccaggcagcctgtttttttgttttgttttcttttttgccagctacacagttggggttaatttctacagaccatcattttatactgtaactgaaccctataataaagtgcaaattcagtaattgctacttggagagctcctcaggggtgggaaggaggacaggggatgtgctgttggaagtatgtgttttatgttccgcctcatccacactttggtttttggccacatcctccgttcctggctcggccttcaaacatgtgctctaacccatgggatcaccgtcacagtaacacattttccagagcaatctggtgttgggatccccttggattcttccatcatgagacttctcggaagtctcagctttctaaaaatccctcattcctgcagaggctacgttaaaggaatatggtagccatcatctgggaggtaaaaaacctatggaaattggcacctggggaactcaggaaagctgaaagcaccttgaaatgagatggaaggaccagaaggttaaggctggtgaagaggagacctggagagaacgtgggcactcctgccaggtatttttaagggattatatttatttgttgtatgtggttccaaagggtgaaagacaattatgggaagccagtggggcaatttgagctaaaatacacctcccgcgatgacagacgcagccttgagagagcagctgaggtgcgacatgagctccctgtaaccagcatgttcaagcaagaagccggttgtgtggacggcaaagaggaaatgctgtggaatgtcagtttggacgaactctgatgttgactggtgatgctgccaagaccatgtctcccttcttgggcacgtagatttattgagaaaaaccattcactgtcacctactgcttcttaccaggctctgtgatgggggagaaggagcagttggagaaaatgtcagaatctgcagcttagacaactgagtagaaggtgaaatcattgacccagatggagagtacagggaggggaagaaagaggtgcagaggatttgaacagaatgagagtcctcctctgtgcagggagaaaggcttcagtgggtctccccctccctgctagggatcctccttgccagccctgggctgggcgctggcaggcccgttcccaggtctcccgccgagggcaggagaggagccaggcctcaggagagaagtgcttactgagtaatttaccaagagc

SEQ ID NO: 42714 - DNA, 2300 bp, Homo sapien
tgtttcattgtatttgtgcacagaactactctgatgactgtttacttaaataataatcatagtgcacataatttttttaaaaagcaacacagccaaatgaggaaattttctgggagtcttattagttcactcaaatgctgttattctttttattttttattgtttgataatttgataggaatcgcttggtcaaattgtatttgtctctctttatcccattttactgttagaaaatgtttcgatgaaagatcctccggacttattggacaggcagaaatgcctgaacgccttggcgtctcttcgacatgccaaatggtttcaggttggctttttcttactatcttattgttattaaagtttgtccaagtttcatttggaacacctgccacttaattggtttctgtgtactacataaaatgaggggtgctttctagctcatagtgtggttgttggagtaattgagttaatttagatatgtgcctagtatagcttctatagttcatgatgttttattataattctttttggcttagtattctgaatttcagatggttgcttataaaatcaaacatgactgagaaaagctaaaggttaaattaggtagttgcctggagtggggttgccatgagactacgaaattaattttaatattatggtccttttatttttaaaatgtacctttttaagccttaattttactacttgtgattaattgatttttttgtttgcctgataactgatgaataatttgctacttagtattcacttgaaagaacttgcccaaaatgaagaatagatctcaatagggatatctggaatcattttgtttgttttaggcaagggcaaatggattaaaatcatgtgtaattgtcctccgcattctgcgtgatttgtgcaacagagtccccacatgggcaccattgaaaggatgggtaagtacttaaatatggctaaaagcaaatttggaagctgtagcagagaaaatcctgtagaaatgagatgttactttaaaatggctatctcctaagttagctaaggcatgcattatgtatgtttgccatgaaaaaaaaataaagcatctttttaagcgaattcttcttttgtgcatataacttgcctcttctacctcattgtattcatgttacagagcttgaaatattttttgctgacaaaaaggttttataccttttagaagtgagtgtcttcttacacttgactttgcactggtggttaatcacttagtgttcacctgctgcccacaaaagtctccttggctgacccacttctcttttggtgcccccttgcattaccatgaaaattacccaataggccggtataaggatcctatacctctgtagctttctctttgagtggagacatttacaaataagttcatgttagtaattaaagtcaggcaaacagtacacttaaccccatatggatatcatttatatatattgtaaaattgacttaacttggaaattatgcctgctccaatcaagacaacttaagaacattataaaacaatttaaataaagccgtgaaagatcattttataaatgaatgtagcaatgattactttgacaaaatatgagttcttagtttattgaacatggacatttggtcgtttgtttattctaatggtaatacttgagacaagctgtctgaaacgaagtcttattattatattgaaatatttgtggtttgtgtgcttcctaagtgggagattaagtgggctgggttttgtacactggctagttattagctattactaacttatatgaggacttgttaagtctttattaaatgaattagagaccatagtttctctagtgatcctttctgggtaaataaatgtaaagtttttgttacaaaaatgtcttctgaagatacgatcttaaaattgcttgatttaaaaactcttcccagggtaaaggttgataatcatggggaaaatgttaagtgggtcctaaatgttaaattgaatttcactctttggcctcccttgtagatagaaatgttagctcacatttaactggaatccttttaacacttggtgcatgtactaatttgtaatttaatatcttctagccactagaacttatatgtgaaaagtctataggtacttgtaatagacctttgggcgctggggaggccttgagacgagtaatggagtgtttggcatctggaatactacttcctggtaagggtttcaaactctggaagcagaacaatcagcaaatctcagtttagtttatttttctaaatatatgctaagtttgttctctacacaggaaaat

SEQ ID NO: 42715 - DNA, 2300 bp, Homo sapien
tcttccattgtctccctcttcctgacattcctacttggtaagatgatggaataaaatttagcttgtcatagtattcatttaaaaattgacatcttaaaaaacaagttccatactatttattgggattacattacttagtagttagtcaacctttgttacgtctaacttttaagagaatgtaaacattcatttacagtagtttgttttatctgatatgtgagctttacacagatgcttgtattgaccacagttaagcattttgacatagaaacattaaagtgagctacttgtatattttgtatcactataaagacaaaattgagctatatcacctatgaaatgaatacccgtggtacatttgtttatatttataaatcagagtaataatcctttttgaggcttcccattttatgagtaaaagggagtaatgaaacattgtattctgattttgttagcagtggttaatgggaaacaatgcaaataactggtgtagagctcacctggtcagaaaataagtgtgtagcacttcagcctttacagtgtcatggccagtaaagagaaccacagttcttcctttaatagatttgtttcctattggcattatgccttttttaatgacatttcatcagttagaataaacattggctgggtgtggtggctcatgtctgtagtcgcagcattttgggaggccaaggcaggcacattgcttgagtccaggagtttgagaccagcctgggtaacatagtgagatcccatatctacaaaaaaattagctgggtatggtggcacatgcctgtagtcccagctactcaggagggtgaggtgggaggatcgcttgagcctgggaggaagaggttgcagtgagctgagatcgtgccagtgcactccagcctgggtgacaaaggacgaacctgtctcaaaaaaaaaaaagaaaaaaaccacagaataaacattgattgttgtaataggatcctctgataactgaagaaatcaaaaagtatctttgttattgtctcccatttagaaatatatacattgtattagttggcccacacaaatgcgctacctctatccgatgttactatcatgataatgctgggaagaagtgttagtgggctgtcttatatttaagagaatccttaaaaagaatggtaaatccgacttaattgtattaaacaaagaattattactcaagaagcatttgcatattgtgtgcatttatggaatgtaccaatcccaaaagtttaaaagcctacttttcagtagcttagaggagataaatttggctgtctaaacttgactttagtgtcatgtgacatcttctcaaatatggatatttgctgctttgggccatttaatccaactttaaattattaaggcaagctgaatagccataattaaatagtgttctttgttgctttttatttttaaaaggcatgtaaaacttgaaatgtagttcactgtattttatatttgtaattttaataattttggtttagaatagggaattccaaactgatacttgagttctcaatcatggggtggagtttctgttaatggttatcttgttgaattagtttatctagtgtaaaaaaattgtcatcctcagtttatttttagtatatctcattgatatgagacataattgatttccagttttccttaaagatggttagagattaaaatttcttctgttaaaaaaattgttaatgctattggtcccagatttcccttctttgcatcctgccaaaggaaaaagtgctctgtacttattttgtgccctgtaatgttatagatgcttaataagatcccagattttaagtagcagctgtcattgatttgtttactgaatgaatttttcatgtttcattgtatttgtgcacagaactactctgatgactgtttacttaaataataatcatagtgcacataatttttttaaaaagcaacacagccaaatgaggaaattttctgggagtcttattagttcactcaaatgctgttattctttttattttttattgtttgataatttgataggaatcgcttggtcaaattgtatttgtctctctttatcccattttactgttagaaaatgtttcgatgaaagatcctccggacttattggacaggcagaaatgcctgaacgccttggcgtctcttcgacatgccaaatggtttcaggttggctttttcttactatcttattgttattaaagtttgtccaagtttcatttggaacacctgccacttaattggtttctgtgtactacataaaatgaggggtgctttctagctca

SEQ ID NO: 42716 - DNA, 2300 bp, Homo sapien
agacagatgatttttattgagaaaaagaaaagctttgtaatctattttagctctgtttttatataatgatagaggttttcaaatgattaccttttcaaccaaagttttctttgctttatagaggacagtgacactatagtgttaatttactgttatccaaaaataatgtgatttttaaacatagataaacaagaacaaaagaggcaagactgttcataaaaaattgagaatgttttagtttgcgatggacttcaaaacaaaatatttaccatgtactaacatataatttcatgtaagtaaagacagtataaccagcttttaaatggaatattttaggctttatggaaaactcactaagttatccttgttcattttgctgtgtattggtataagtgtcttcgtgatatttgtaaatttggaaaaatttaaaggtttttggatgtgtgactcatgagtgtatagaatctactctgttaaattttcatgaaattcattcattttctgggttctggtctgttccactgatctgatatttcattttagttagtggtaccacccttcgatctttgtagagtatttcttgatacccttatttatgtttttccccaaatgagctttaaaatgatttttgttgagatttaagtaaatcaatcctgaggagattttgattgagaatatatttgtaaattagcttgtcattttgcagtatgtatttttcccactctgcatttggaatgtctcccactagtctatttaaaaaattaaaggccttgcaccaaaggtttgaatgtcaaatagtgaacactattttaatgttttttatagttttcttatagtgttcacagataactttttatttcgtattattctatattatgaaatcctaaattctaaaatttaaatagagacctgggtcttactctgttgcccaggttggagtgcagtgacatagtggtagctcacttaacctcgaactcctgggctctaaggatcctcctgcctcagcctcctgagtggctaggactataggcacctgctaccacgtccggctaattttttttatgttttggagagattggatcttgctacattacccaggctggtctccaacttctggccttcaagcgatcctcccacctcagcctcccaaagtgctgggaattataggcatgagccaccatgcccagccctgaaatctcaattttctaaggttagaagtctttggcagtttggaaaggttagaagtctttggcagtttatgagtcactcaccatcctgcatttctgcgactctcttgaagctaagaagtatctaattcttgcagatgatgtgtgatgtggatgacatttgttgaagtagtattcagaatgtgtaggttcagctaaaagataactttattcatttatttatttatttagagacagagttcactctgttgcccaggctggaatgcagtggtgtgatctcggctcactgcaacctctgcctcctcagtagctgggactataggtgcatgccacgacacccagctaatttttttatttttagtagagacggggttttaccatgtcggccaggctggcctcaaactcctgacctcaagtgatctgcccacctcggtctcccaaagtgctgggattacaggcatgtgcccccgtgcctggccaggataacattatttataaataatgccaagagtgactgaagtgaaccttaccaaaacatgaatggaagagctcttgttttctggtgaggagttcagtagaatgggattttacttcccacgctggagcagttttttcttgtttcagtattaactgtttcacagtagacagtcagtgctatgggttggctaaagatatagttgtatatcatctttttcaggtgatgtttcttttgttgaagtaattgttttcgttctccttctaacagagatctattcgatcttttgctaatgatgatcgccatgttatggtgaaacattcaacaatctatccatctccggaggaacttgaagctgttcagaatatggtatctactgttgaatgtgctcttaaacatgtctcagattggttggatgaaacaaataaaggcacaaaaacagagggtgagacagaagtgaagaaagatgaggccggagaaaactattccaagtgagtgtggactgacctctgggacgctgtgctagagtgcacagcaaagctctaaggtctgctggattgagtgtgtgttatgctgttttttggattttgtcttatgcatatgtgagactataaccaaggaagtaaatgttacatgga

SEQ ID NO: 42717 - DNA, 2300 bp, Homo sapien
tttatgaggagagctcagtgattactcctgttctctgcctgaggacagtttgctgagctggaatgcaagcagagcatgtcacctaaccatgttgaggaggcagaggttggagtttggtacacttgagacagctaaagtgttcggggaagggaaccagacaagaagaagctgtacaagagaggttcccaaatgtttgtttgtgagtctcttgtgaattcttgtcagagtgttgggctgtccatgatggggaaagactggagggtttatcaggtggctgccacaggattggcagtggaacaaatactagaagtatgtggctaggggatgttaaaactttgtcccagccacaattgagagacctcccaggcatctggatgaaatgcaagaaagaccatgtggtaaagctggggtaagcaatactgttaaatcatagccatacttattcatgtatatgttgtttatggatgcttttatactacaatggcaaatgtcagcagttgccacagagactgtgtggcccaccagtctacaatatttactattttgcccctccccttaagaaaaagtttgctgactcctgcactagagtaagtcctactctaggaccctcttaacaacaaactgtgcgctagctaaggtctgtaagcaaatcctgatgaaatctgcggagaaagcagaacttggaggctgagttctgccaggttacaggacttgggaaacatcctgggctttccatagatctgtcctaacaaaagtattactggagttaaaattagaatgttttggggcagtattaccttctttggtgctttttgtaaccttcgttatagtgacagtgactttagccagcaccctcgaatactttgaatgtcttgtttactcccctagataattctatgttggaatatgtctcattccacttaaaaaaaaaaaaaaaacttacagtcttctttgatggagaactttcttgtaccttctactcaatatcaatatttagtttacattgaatacttattttgctagtaccggaaggctaaaaccaaagctaaagtagcttcttgctaaagaggatcaaagttccttttgtttctacgtatcttacgtgttcacataattttaaaaatattttgaaattagaaattgtttaaagcttatagacaaaaatagaatatgataaacaactgtgtgttcaccacaaatatctctctcatattctaatgttttaccaaacttgtttcagatttttttcctctaagaaatagtagctcagatatgtattatgtgtatatccctccctgatgtgttctttttttgaactttttattatactttaagttctgggatacatgtgcagaacgtgcaggtttgtgaataggtatacacatgccttggtggtttgctgcacccatcgacccgtcatgtacattaggtatttctccgaatgctatccctcccctagcccccgaccccgctttcctgatgtgttctaatcctacttttcccaaaggtaaccactctcctgaattttttgtcattactttgaatgttttttatactaaaaaagtatgtctgtatctctctccataaatgatatgtaacattatcttatgttttttcaagcttatattcagggcatcactttgttcatgctattctgcaactagctttttcctccaactttgtttttgactttagacatgatgaagtggatcactgtcattcataaactgtgcagtgtatatctttattctcttgttgatggacatttagattgccagtattttgtgataatgcacaaaatcagtgctacagtaaatgttggtgttgtctgtcttattgggtttctgtgttgaagttactctaggtgctgtaaatagaagtggtatcattgcttatagggtatccgcatctttgacgttatcagttactattaaattgctcctcgagctgttttttttattcttttatagtttcacctgctttggttttatgcaattagacataatggactttccaaagcagaaaatatgacatgaaaatctcattttaccacagaaaaacggaaagttggttgattagattcttgataaatttgttcatatttaaaaaatcttcttggctgggcgcggtggctcatgcctgtaattctagcactttgggaggccaaggtgggcggatcacctgaggtcagtagttcgagaccagcctgaccaacatggcgaaaccccgtctctactaaaaatacaaaattagctgagcgtggtggcgggtgcctgtaattccagctactcaggaggctg

SEQ ID NO: 42718 - DNA, 2300 bp, Homo sapien
taccagcgtgagccactgcgtctggcctaactttttactttctttccttttatataatttgcatgcttttgtctcagtgtttggagttacaaacccaataaagatattgaaacaagaaatactattgaatccttaatgccatgctgttcttctattttaaaaaaattaaaaatgtaaccaagtgctggacaccgtgctgagtgccttagatatacggttgcaatgaatccttctaacaaccctacaatatgcaatactattagtctcacttggcagatgagtaaacttagactagagagattgattttccaagatcacacagctagtgtgcagtgaatctggatctttacagtgtggcgcctcttctccctctgatacttatgggcatcctacaaaacccagctttaatgatctcatgtcatgtgcacgtgtagtcttccctaacacacttaggcaggaagatgaccctgtcctcaagggactgagagaccagggaggagacagacagctaaacaattacaatctagtgccatgagaatacatatagcttaacaggactatgttcaagccgagggagcttagaccatgtgtctgaggcagccaaggatctccagagaatatactctgagctgattgataaggatacccaggatttttttcaggagggtcaaggaaggtgtgagtggtcagaggtggggagagggtttagaaagggatttgcggcctggcatctgtctcaggagactcaggctcctacacacctgggcatactctggaaacaacagtactgtagttctgtgtggctggagggtcacattggcctgaaggaggggcaaagggaagggcgtgcaccttgaagcttaaggccagatcaccaaggccttttcagttgaaattgggttttttacactttattctgtgaatgaaacagagctgttaaaatatttgagcctggtgtgttagaaagatgaaaaggggccccaagggggctgttgtggggagtccctcctcaacccctgggctgttcaaggtcctctgtcttggcactgagtggtcaggtcgtttctgctccaggctgggaattgtcttagggcaaagacattgtctcatttgccagtgcatccctgcagcctgcaaaccccccggtatacagcagggactgtatactggcaagcagaatgctgggcaccaagaacttgaggccagggactgtagaatagaaagcgaacctttaattcttccccagcgccgcccctggcacagagctggtaggtgttcagccaaagtctgacccaaccataaggaggtcagagaggtcctgggcccaaactcaatcccagcgaggttcattataggcaggtgaaggagaggtgattgtagcagcttctgttcagcgactgctgtgtgccaggattcacacctattgtcttatgccatctccccaacagctcctaaattggaattattgtcccagttttcctgatgaggaaactgaggctcagaacggttcttggtaacttggccaaggtcacacagccagcaagtaggtgggcggtggcacaagtcaaagcctactggcctgcccctctacctcgggaggcagtgcgacgcctactccatttgtgtggctgctggggttggggggcatcccgcactggggtgcggggcccggggaaggcggctagccgccgcggctcggcgcagctcccaggttcggaagttacgaagtttccgtgcatttcgctagcctcccagcgcagctcgtctccgctccgccgcagttacgccgctagcgcagcggggctcaggtgctgcagcgagcgggggcctggggccgggaggaaggcggggacgcagtttacgtaagcgtccgctggcaggtgcataaggccgccggcggcgagtgctccctgcgcgctcccaggtgcgcacttggcgcaggcggcggcacagcaaggcggcggcgggcgctggccggcgctctcaggtgcggcaggacgcgcgtggagggggcgcgcggcgaacgagggggcgggctttccgttccccagcagccgcggggcccgccccctggcctggccaatgggcgcgctcgacggtgtcacgtgctcgctgccgccgctgccgccgccgaagcggagaccggagccgcgagcgccaccagggcagcagccgccgcagccgccgccgctgggcagaggagccggagacgcgagcgggcgaggtggcggcggcggcggagcgggagcgggtaccgggcgcgggcagagcgcggcggcgcgggtaggctccggcggcgg

SEQ ID NO: 42719 - DNA, 2300 bp, Homo sapien
ccagggagcggtcaagatggtgtgcccttgtctgacctccgtcctgcctgctgtccagcgactccctggcttcctccccgtcacgtgggactcctgtacccggtgctgtcgggggagcccccctccataccctccagacctcacaagacacttccaggtctggccacaaggtggagtgtggcggctgcaggacagtgctgggggccgggctgcagaggagactggacctgcgccgggtgacctccccgctctgtgaaagtgtgggagtttgtgtctgtgcatccagagaaccagagggtggtggttgacttgccgtgctccccccagccccccattgggattgcctgggtctctgggggatcactgagaagctggataaagagagctggcactgtcgccttggctcactaacgccaccattttacaggtgaggagactgaggcccagagaaggaagtcacgtgctgaggtcaccggctaatcagtggctgagctgggctcgaacccagatctcttacgctgtgaggcctctgcttttcctgtggcatggagaggggcttctcccacctggggagagggatcctgttgtattggagaggcaggggattaaagatggactgagagaggttagtgtcccagaaaccaaggggcaatccctgccctggagagaacaggcctcaagggcagggatggggcaggggcagtggataaggagtctacccaggcctttttgggttccctcctttggtccctggggacccagggctgtggcacttgccccgggctagagggtcggccagggcctgtgtggtgcccactgctccctcccctgcactgcaggggacccttgcccatccctctagctcatctggacctccctcaatggctcctgctgtctttccaggctgtgtcctcccgtgtcagggacacatcccagagcccagggcctgcgtgggctgtatccacggttactgaatagggacaaacaggcatgtattggcaggggccggtggctcatttcaggaaagtcccttcagcaagaggattctctccccactggggctgagggtggtagaagaaaggaatgttgttctatgttgtagtgtctctgagatgacctggcttcctgaaccaggtccccctgaagagctcctcctgtccaccccaacaagaggccagctggagagcaagcaaacatcgagtgcagcaggagactataaggttagacaacaagaaggacttcctggcaggggagagcaatgcttgcttggttagagctgcctttcagtagaatgggctgctttggattgcagtgaggtcgctggagttgcaaacagcagagccagagatcaaggtcaagtggaagaaagctgggaaaggttcagtttggctggtgaagggtggagagggtaaagggaggcagggaccaccgtggtgcaggggtgaggtgccctgcagggagctgatcctgaggccgatggtgggaggagctgtgtgtggtcgggtgggacggggtggggacagcaggagacactgagaaggtggcatggccaggagctaggggctgaccgagtgtggggaggggggagtggggagggggcgttgggctgcccgatgggaggtgccttggctccgatgggagcactggggagcagcaggtggggggacgagctgggtgggaggggctgcagcttcccagcagagacagggtctgggaggcgactggactcgaaggcctgggcttgggagagaggcccgggctggagaggtggggagggggatccaggagaggggataactaaggacttgggagtagctggcatcacctggtgagacgagagtcctgaacagccccctctccaaggacagaaatttctccaaggaggctgacctgagaggtgggaggagagtggggcagagggtcaggagggagaaaccagtgggtgccaagaccaggtcagccccacaggctagggggcttgaggacttggggctgatgtctagggacgtccacgaggtggagcagcccaggaggcctgggtgggaggaggaggcggtggcggggaggggagggaggggctgggcctctgtccacagcattagtgctggttggagggacgaggggggtgcggagccagccaggccgccctcccgttctcacagcagccgagcagagcgcagagcgggctgccatggcgctggccaggcctgggaccccggacccccaggccctggcctctgtcctgctactgctgctctgggcccctgccctttccctcctggctggtgagttggggccca

SEQ ID NO: 42720 - DNA, 2300 bp, Homo sapien
gcggtggctcaagcctgtaatcccagcactttgggaggctgaggcgggcggatcacgaggtcaggagttcaagaccagcctggccaacattgtgaaaccccatctctactaaaaatacaaaaattagccaagcatggtggcatgtacctgtagtcctagctactcaggaagctgaggcaggagaatcgcttgaacctgggaggtggaggtgagcagagatcatgccgctgcactccagcctgggcaacagagtgagattctatctcaaaaaaaaaaaaaaaaaattagtagtaagactagtaatagcagtaataggccactgctgctgaaggctgccgtggtcattcctgcggcccttagtgtgtccctccctcgccattcgtggcttattccgagctgcggtcccttgctggccctcgctagcctggtcatagtgaagaggtgctgcccggcaaccccgtgagacctgatgtccgcgtgtgtgtgcccccaggctacagcggcgagctgtgcgaggtggacgaggacgagtgtgcatcgagcccctgccagcatgggggccgatgcctgcagcgctctgacccggccctctacgggggtgtccaggccgccttccctggcgccttcagcttccgccatgctgcgggtttcctgtgccactgccctcctggctttgagggtgagcccctgctggggaagcggtcagcccatgtccagatgcccagggagggatcttgtgcccacccccccaccccccccacccccccaccccacaccccacacccgagtctgccctctctcttggactcagtctctctagctatagaatggaccctctcagcccctgcctggctctgagggtgcaggtgggacccacagctgggcctcttacaggagccgactgcggtgtggaggtggacgagtgtgcctcacggccatgcctcaacggaggccactgccaggacctgcccaatggcttccagtgtcactgcccagatggctacgcaggtgtctggggtggggtgggccctgggaccatcagaattggtggtcctcaggtgagaaggtcccttctgtctggatgtgtggattgatggggtcaaggagatcagggaggaggtgggtatggtggcccaggtgaccgctgagggtggctgaactgggactcgctttggaggtgagactggggctcaggagtgtagtcctggcagctggggccatagtgggctgaggttgtctgggagaacgtgtggagggatggtcttcagggaagacggaggtggttcagccaggacagagaaggaaaggggggctattgcagagagttagggggcagcatctgtagaaggatgactctgacctttggggagctggggcctgtcaggcaggagttgggggttcagaagtctgcccctgccttgggtacacgcagatgcacagacacaggaccccggtgagcccagggagctccaccgccaacactgaacgtccctgccccctctggaatgcctgcgacacctccctcacacccgcccgcattcctgctggggcacactgcctcctccccctggcaggctcctgggcacaggctcctccaccaggggaaagagatggtggtcacctcttcccctctctcactcgcctgaagatggtgggactcagtgtcccccagccctggatggctgacactcctgggggtcccgaaggcccatccactgcctccatgggccgaggttccccaagtcctgctccaagagccatggcctcctgggtacctggcacacagtgggcccacacagcacgtctggcctctgggaagcatttgctctgcattttgttttttccttgccacagccccatgaggcaggggtttaaaaccccatcttacagctgagaggatgagggggtgtcatcccccaggttcaccactatcagcgggaacccggctcctctcccagttgagctcactgttgggtgacagggagggcagacctctgaggtcagagccagggaggggggaccccagctgcagggctgggctctttgcccatcctccctccctttaggccatgctgggcatgggggaggccagtgcctggcattcctgagcaggctccgaaggaggcagctgggccaggcagggagctctgcctcctccccacttccccagcctcagtgcccgcccaccactctcaacctgtctggagggcatggcaatggagccgggggctctgtggaccttcctgggccacctgtggctcctggcaggtatggaggaatgtgggccctgggcaggggga

SEQ ID NO: 42721 - DNA, 2300 bp, Homo sapien
tgacctgcccagggtcccactacaggagggtggcagggcagatttacatctgtctcttcagcccagctgctcctaccctctggcggtccccgtgtctccccgagctagtcctggtgtgagagagacaccctgaccgagatagagagctgcctgagcctttctgcaggagctacttggggagcgggacacgcttttgatcatgaacagaattccaccaaccctggagttagaacagcttgggcatgaattctggttcctctctttactggctgggtgactcaggcaagtggctttgcatcactgagcctcagttttctcatctgtaaaatggggatcttagcgacttcctctcccctcgtttgtgaggagatactgtgtctgtagtaggtgctcagcgaagaagcactgcaatgccagttatggtgggtgatgctcactgcagtcctgagccaacccctgccctgcctctcccacagcctgacccctgtttcaatggtgggacttgcctcgtcacctggaatgacttccactgtacctgccctgccaatttcacggggcctacgtgtgcccagcagctgtggtgtcccggccagccctgtctcccacctgccacgtgtgaggaggtccctgatggctttgtgtgtgagtgtgtgtcctgggcagctcccgtgctgggtgctggacacctaagctggttagatcccatctgcactctcagggcttgtaggatactggtggaccaggcatgccaagccctagggcagtgtggcggggccaccgcatgtagagggacagagtttctggagaaggtgagcctgtactgggcttcagggccagactctgagagccacagggggaaggatattttatggagtggcatagcatgtgccaagtccctgaggtctgcaaggacagtggaagtgcaagggggtgagcaggaatggggtgggaaagttggtaggggctttgaggacacccagctaggcggctctgactttatcccaaggacagtggggagcctctggagggttttaaacaggagaggggcatgaccagatctgcattttacaaagatgactggctgcagtgaagggcaagcctcggccatgaggtggggcagcttcacggagaagggaaggggccagattctgccaggagttgctgttgcctggcttgtgacctggagggtcgcctaggcatcacgccccaccccccagcactggccgggaactgctcctccatgggtaggaaatacattgggagtagaagtgagggtggtgggggcggctgcagtttccaggattagatgataggtgggtgcgtgtgccccaccccaagtaagtggctgtctgccactcgctgggggaagtggggaggtggcatttctggagaaggctccgtgggctattccctgaggctccttctctccgcaggtgtggcggaggccacgttccgcgagggtccccccgccgcgttcagcgggcacaacgcgtcgtcagggcgcttgctcggcggcctgtcgctggcctttcgcacgcgcgactccgaggcctggctgctgcgtgccgcggcgggcgccctggaaggcgtgtggctggcggtgcgcaatggctcgctggcggggggcgtgcgcggaggccatggcctgcccggcgctgtgctgcccataccggggccgcgcgtggccgatggtgcctggcaccgcgtgcgtctggccatggagcgcccggcggccaccacctcgcgctggctgctgtggctggatggtgccgccaccccggtggcgctgcgcggcctggccagtgacctgggcttcctgcagggcccgggtgctgtgcgcatcctgctggctgagaacttcaccggctgcttgggccgcgtggcgctgggcggcctgcccctgcccttggcgcggccccggcccggcgcggcccctggcgcccgagagcacttcgcgtcttggcctgggacgccggccccgatcctcggctgccgcggcgcgcccgtgtgtgcgccctcgccctgtctgcacgacggtgcctgccgtgacctcttcgacgcctttgcctgcgcctgcggcccggggtgggaaggcccgcgctgcgaagcccacgtcgacccctgtcactccgccccctgcgcccgtggccgctgtcacacgcaccccgacggccgcttcgagtgccgctgcccgcctggcttcgggggcccgcgctgcaggtgggatggctgggcaggggggtgggctgcgaatgccccctggggctatggtggggcagagaagtctgccaggtctgtgg

SEQ ID NO: 42722 - DNA, 2300 bp, Homo sapien
ccaaagtaaatgctgtgcaaagtggcagcagtcatttgctatgtaatagtcaatatgcagctgccagggctgattgaaacatattaacataagtgataatactgtcatagaagtgaaaagttaagttgcttatcagtatattttgataagctacttaaattttacagtagcatgtgctggctttagacagacgttaatgacagaggactgtgcactttatctgttctctttgttgcctctcacttcatttattaccctcagtggcgcagccggtaatctgtacagggtgctgattcccctctccctggcaggatatcacatctgtgcgctacctcgtgtccatatctgtcggtattggactctgttagcacagcagggcagacatgaccaggccggcaagcgcttggtacaaccttcttctcgcttgctgttagatgtagctttggaaaatttccttctagagaacaaagccgttgaaagtaagtggcaaaactgcttgggggtgtggatacttttcaacaattccataggatgcgtgcacccttgccgtcagtctttgtctggctttatttgctcagtaaacgctgagcactgacggtgtgccaggtgccattcttggcaccggaaagacaaagtgaagaaagataggccccttcctctctgtttgcatgtggtctgttgagaaaacagacatgccattgaggactgcatcatgtggggaatgttctgagagcagcattctcatgaccagggcagcacagaaaagagagaattagggcacatgaagtggggatggggagggggtgagggacagttaggaggatgagtagaaatcagctagactagacccacagaggtctgggagaaaagggcccagtgtatgtaagcccaggcaggctcaaagataccaggacgttccggagtgagaggagtgaggggagcatatctatgaggaagtagacagaggacaaccagaaaagtgggcaagggcctggcagtgaagagccccagaagtccatcctaacaaatgtggactggatcctggagtgacggacatcattgcagcaattaagtacaatgtgcgatggagatttgcattttagaaaaaccattctaagagccgtggccaggtggctcacgcctataatcccagcagtttgggaggccgaggcaggcagataacctgagttcaggagttcgagaccagcctggccagtatggtgaaaccccgtctctattaaaaatacaaaaattagccaggcatggtggcgcacacctgtagtcccagctactcagaaggctgaggcaggagaatcacttgaaccagggaggcaggggttgcagtgagccgagatcatgccactgcactccggcctgggtgacagagtgagactccatctcaaaacaaacaaacaaacaaacaaaaaacaagccacacagagtggaccacaggactgaggtcagcagccagtctgctctgagtgaaggggagcaatggccaggacctggtggagggcagtggggatggggaagtggaactcatcttgaagtagatagagagatggtgtgtgatgggtagaatgtctgttgcagcaacatggatggctttgggctcatgggggcattgggaccctttgcagatgcctgcagtgggaatgctgtgtgtgtgtcagtgtgtgtgtctgtgtctgtgtctgtcccatcatgagaaactgaatagaagctttcctggaaagggtgggtgtgctgggagaggccaggggacttctcagagatggtgcctgattgtggagtcggctttgaatttcttctctgtgaactgttctagctctgaggcatgggaataatttataatggacatttaatcctctgccttgcacaggcaattttttaaactctcagaaataattagcatttcgccagtttgtgtttccaccagtctgtgacaggaagactcttcaggatgtagagcaaaactgaaatgtatcagtcttgaattagatcctggttaaagtttttgacctgcatactaatatttcatgtgtttcctcttcttcctccagctatctcccctggttcgaggtattttataagctgcttaacatcctggcagattacacgacaaaaagacaggtatttacctttttaaaataattcttttaaacaaataagctttaatttttatgatgaaaaagtaaaacatgccttatattttaccaaaaaagtgatgcatgcccattataggaattttgggaaattcagaaaataataggaaggaaaagaaaatcacttttaatttg

SEQ ID NO: 42723 - DNA, 2300 bp, Homo sapien
tgtattcttattgttgagtcacagtaatgactagaagacagatcaacaggaggatgtaaataaataaagccaaaaagaaaagccagtgttggattctttggggcctgatggattcaggctgaatcccagctctgttacttaactctgaatttgttcattgtgagcctcactcttcttatttattaaatagagagcttctacttacctggaagagtcattttgatgaaataggataaaaattaagccacctatggcaatggtatacctaagaggtagctggtagtattataattgttactgcaaaaatgtttagtgggactcttcctgaaacccagtatgcaaacttagaaagcaaaggaattagcagaagggtccttcaatttatacagattcacctcagggtttctgtaaatctgggggagtcccttgtgtatttgatgtttacagatcattagcaaaacagatgccaggaggcgaataaactgtagcttaaagattttggaactactgacaatgtagagaaaatcagtttctgataaagttatagtgtttctaagtaagcagtagaaggcaatgggaaaattttaattgggtttataaaagtttatttcaggaacacatgtatttccaatttgaggcacacctatacatctgtagtcattgaatttatagtgcttgcttatttctccattggggttaataatataacaacaactaatatttattgtgtgcttacgacatgtcagtgtgatctttaggaagtctgtagcattcaaaggcttgttttcatttggatatttggaaattggccttttatccacttggagacacagggtgtttaatgagttcattttgttctattaattctattacactccaaatatttgttcggtatttataacagttaagacattttgtaggagacaaagttaagtaagacatggaacttggcctcataacagacctattcactatattgtatatgcttcagaagtgggcgtgccgtgttatgggatgagccctgatctagtcctggactctacccctggctctactacttcttcgtggaacctttttctgcccccttaggacaaggccagatgcccctgtgctgattaactcctagtatcacacttaccaagccccatggtacctgcttgtttaattctgtgtgttctccattagggctagactgtaaactcctggagggtgaggactgtgtcttatttatcaacagggccagccacagcagagcatttgttccacgagtgactactaattttctaactttggacaagtgataacctattgctttaactatgataaaattgatttgatagtctctatagcatagctttgtcaggaaggtaaaatcagaaaatttctctaaaatgcctgtcacagtgcctggcaaatagtgggtgttccatcaaatagtttttttatatttgaataaataagttatctcttttcaccaaatttgacacatatgatacatctatttatgaagaccatatggagtgatgtcatatttgtaatacataaagggcacagctgtcgtttaggcaaagtataaagtaattattcatattggcataaaaatgtgacacttcaggttactcattcaaaaaagtgggataaaatgaatcctaactcatagagaaattacatggaagcctgagattataatcataaaaaaactcatctataattatctatcaatttgatagattttaggaattgtttccaataattttgaagtaattttaaaaaattccaaatatttaaatttaagtaataatgaaagttgaaaactaagatattcagtagagaaaaaggtaaatgtaagtgaacatatccttttgattttttttttttttttttttttttgcctccagcacaccctacccttccttttgcattttaaagctccctttggaatttcacttatgtttgatttttggattcacatagcataaatttgtttaaggatcagacttatattccttttgtagatgaagttataaaaaatatttcaaactatcagtaagtagtggcatttgctggttaaaatccttccatattctccagaaagaaagatgaaactccctagattttactgtataatgtcaatggactcattatttgtacaacagctgatgtatttaggacttgttgattcacttaattggtaactgtactacattcataacttcaacaactgaaaacaataggtcagtgtctgctgtttatgcataaatagtcacatcggagcaggatatgtctgaatggcagaatat

SEQ ID NO: 42724 - DNA, 2300 bp, Homo sapien
agagaacctgagacacacagagaaggaataattcacccaaggccatatatttagtaagaggtagagctgagatttaaaccctggcagtctggttctagagcctgtgctctttgctcctatgttacactcgctcttatgatggaagcttctcatcactctctctgcccattttacgggggaggaaactaaaacatacacttgtctaatcatttgcataaaatctgccagtcaatgctgaagccagaattagaagccacgttcctaactcccagtccagtgctctctcctcagaccaccctgctgtctctgaggccacctgagcagacacataatccccaccttctacctccctctccaacacacacacacacacacacacacacacacacacacacacacaccccacccagcaggcacccagacatatttgtggccaggatggctacaacctcctttgaaaagcagccagctttgccctccaccaataactttgttttatttatagtctcctgctcagagcttttgaactggctcccattccagggaagatcttgatagcaactgttccttggagaagtttcataggtgaataaacaccacagagctcctgcctgtctagcagagctttgctcctgggggtgtttacaagtcggtattggtgtctgggtgcataagactttaaattcaaaatgacagtttggacattttcactttttttttggttttcattttaaaaagtttaccctttgacttcaacaacctaaaggcagaggcaaaagggagaaactatctttattcagaaggtgactccaacagaagaagtcttctacgacttatcttctggctttctttcctcccatcctggccgggagctaggacgcaggaccagttacgtagaggctatggggtgggggtagggtggggaggcactccatgcatttataagaactaaaatggcagaagtgatgaatggcatttcgggacagaaaattggaaaaaaaaaaaaaaaaaggaaaaaaagcctaatattaaaaatgtctttggacttgtggccaaaggtgccaccttaaagcatgactatgtcacaggtgtctggaatgattcagtctggacactaatcttggcttcttcactcgttgctagttatgtgaccttgggaatgtggctcagtttcctctttgtaaattagggagatgaacacaggattattgtgaggattggcactaatgatgtacggaaatactgtgtctgatgcagaaagggcactcacccgctcattaaagggtggctaatggtagctgtgattattgcttcctttatgatccctctggccctagaggggatgaaattgaggtgttcatggaagtgaatcccaagggggagcaggggtaggtagcaggctggtgatctcggctctcaaatcctttcatttgcattgagttaatctctatcagggactgttgtgttaacaggaggcttcgatgttggagttcccaaaacggctgataaagggaggcagaggtcctcagcgggagggcagagctgagccaccacgtgggtccacgaagcccccaggtggctttcctgtaggtatgtggggtctccttcaagctctaaggggaaaggaagaggaaaggccttcagatggggaagtggacggtgtgatggagaagaggttctgcacggaacttactggaaggtgcgggatgttaaagggaaaacgtgttttcatggaggcctgggcgggggattagctctccgttagagaggctgggtgggaggcctccaatgggaggattggtggcggtttcatcgggagggcttggggtctccatgagaggattagggtctcttcagggcggctgtgagtggaggtttccagcggggcgcagtggggtgcagatgtgtaagggcctgcaacggaacgccagagtcctccggggcccgcgccctgggagacgtgcgggtgaccgcgctcccgccccgcccccaccggccacggccccgcccccgcgagcggactacacttcccagcagccccagcgggcagcggcggcggcagcgcgggcgggaggggcggtggtgagaggcggagggggcggcgcgcgccgggcacgcgcgccggcgaccatggcgttcgccgggctggagcgagtacattaacccctggaggcggcggcggcggcgagggagcgagcctcgagcgggcgggccccagcctgagggaagggaggaaggggcggggagagcgccagagggaggccggtcggccgcgggcgggcgggcagcgcagcgccgag

SEQ ID NO: 42725 - DNA, 2300 bp, Homo sapien
cgagatggtgggagctggtgggcgaggctggagggcgggggtgggggggaggcagggaggagggagagcgcggggtttggagtttttaagatacgaacagcttcctgcgatatcttcagaaaggaaaattaaaccctctatcctaagaaggcgcagcaaggggatgctcgtctcactgcggtctcccctcggcctggagccgcggcctcaggcacccgcctgggaggcccgggaaggcaggcctgtggcagagttgcaagagccttcggccggccgtttcccatcgagctccgccttcggcccgggctctgcacagcgggctgcaggcggccgtgcaagcctcctgggtacccggcagagcctgagtggcgagaccggcgagagctgtgactcccggggaggggggccagccagcatatccacgctccaagcccgctagggcccaatctgcagcccagcgtgtagcttctcgctcttcccggtctctccccagcctggaagagtgggggcgagcatggctttaggaactcagaaaggccagggttcgaatcctagctctgccatttacatgcactgtaaccttaggcagtgacttatcctcccttagcctgtttctgacctttataatgggcgacaagaagctctcctccgcatggacgtgttgattgaaagagactgtggatgtaaaatgcctggaacatagtaggcacttagcaaattatttcattactctctcttgctccttttccattaaaaactttctcactccaagacacattcgatatcagtgaggttcttaaaaaccacaggcctattctctgcccactgggcacaccatgtctcagaccccgctgatggcgcgagtcctccttacccgcctggctgcaccacctccccaggggccaacaaagtagcgtgctgggtaaatcccaactgctacccccagcctccaggtttcaggctcaccctagagtctcctggggactggagggaaatacccaggtgtctggtgggggagggatttaggaaataaaatgattgtagacaaaaactgaataagcacttcggttacagagtcccatctgggtctgcttcggaggcaggtttggctccgtctaatagggacaaggcgggtgtcagtctgaaatgacttgtttgccaggacaggtaaggggatagtcaggacctgcggtttacctcacagggtacagagttgaggcatgaaatcatgtttttcacgtgtgtaagtaactttcacacacaaatatatgtgtgcacaaatatatgtatgcgtgtaatgcccaagcacatgaacttgtgttcatgtgtgcaaatacacatgttcatctctgttggcaataacacagccagcacgaattttatctctgttggcaaaatcacagccagcaccactgaagagctagggtcttacacatgcgcatcaggtgtaagtgtctagagctgggaagaaggatgcaactgcaaaatggtaaattgcacgttatacctgcacttgcgtgctcaggcgattctacttaaatcactgcaagtgctcctacgaggtcgttttgcataattgaaaaaacttgaagttacaatcatatgtgtatattctgcatgtgtacagatgccccaacgcgagggaaggaccactaaacccaaagacgcgcgtgcccgtgtgttcacacagacgtgtgcttcggcgcctgcacacggccggcgcgcaggcatgcggacgcctacacgaatacataggcatgttttattgacgcatctggggcactttctttcaaagaaagtaaggaatgaaaatccaatctgagagtcaccagggttcatctggaggtcgcccaaggggcagaaaaaatttgtaatgacgctagagtgtttgtccttggtgcaactccactctcgggagggctggatacaatacgtttggaaagctcgaggggctgccttaggatctgggggcggggggtggggtactcagcaactcttgccgcgggctgctcaagaaacgtggaaacacaccctgcgactttccactcccccatacatataggcacgcgattccgtcgccacctctcggaccagcagcccacgtccaacgctgggccgaccccagatacacaggcagtcgggattcccgcccggtgcgcttgtctattcatccctctgcgtcaggctgggacgcgctccgtctgtaaaaggctcaaacgcatctcccgccgcggggcgggatctaggggcccaggccccggggtccagaggcgggtaactttgctaatctcccccagcgg

SEQ ID NO: 42726 - DNA, 2300 bp, Homo sapien
ccaaacgtattgtatccagccctcccgagagtggagttgcaccaaggacaaacactctagcgtcattacaaattttttctgccccttgggcgacctccagatgaaccctggtgactctcagattggattttcattccttactttctttgaaagaaagtgccccagatgcgtcaataaaacatgcctatgtattcgtgtaggcgtccgcatgcctgcgcgccggccgtgtgcaggcgccgaagcacacgtctgtgtgaacacacgggcacgcgcgtctttgggtttagtggtccttccctcgcgttggggcatctgtacacatgcagaatatacacatatgattgtaacttcaagttttttcaattatgcaaaacgacctcgtaggagcacttgcagtgatttaagtagaatcgcctgagcacgcaagtgcaggtataacgtgcaatttaccattttgcagttgcatccttcttcccagctctagacacttacacctgatgcgcatgtgtaagaccctagctcttcagtggtgctggctgtgattttgccaacagagataaaattcgtgctggctgtgttattgccaacagagatgaacatgtgtatttgcacacatgaacacaagttcatgtgcttgggcattacacgcatacatatatttgtgcacacatatatttgtgtgtgaaagttacttacacacgtgaaaaacatgatttcatgcctcaactctgtaccctgtgaggtaaaccgcaggtcctgactatccccttacctgtcctggcaaacaagtcatttcagactgacacccgccttgtccctattagacggagccaaacctgcctccgaagcagacccagatgggactctgtaaccgaagtgcttattcagtttttgtctacaatcattttatttcctaaatccctcccccaccagacacctgggtatttccctccagtccccaggagactctagggtgagcctgaaacctggaggctgggggtagcagttgggatttacccagcacgctactttgttggcccctggggaggtggtgcagccaggcgggtaaggaggactcgcgccatcagcggggtctgagacatggtgtgcccagtgggcagagaataggcctgtggtttttaagaacctcactgatatcgaatgtgtcttggagtgagaaagtttttaatggaaaaggagcaagagagagtaatgaaataatttgctaagtgcctactatgttccaggcattttacatccacagtctctttcaatcaacacgtccatgcggaggagagcttcttgtcgcccattataaaggtcagaaacaggctaagggaggataagtcactgcctaaggttacagtgcatgtaaatggcagagctaggattcgaaccctggcctttctgagttcctaaagccatgctcgcccccactcttccaggctggggagagaccgggaagagcgagaagctacacgctgggctgcagattgggccctagcgggcttggagcgtggatatgctggctggcccccctccccgggagtcacagctctcgccggtctcgccactcaggctctgccgggtacccaggaggcttgcacggccgcctgcagcccgctgtgcagagcccgggccgaaggcggagctcgatgggaaacggccggccgaaggctcttgcaactctgccacaggcctgccttcccgggcctcccaggcgggtgcctgaggccgcggctccaggccgaggggagaccgcagtgagacgagcatccccttgctgcgccttcttaggatagagggtttaattttcctttctgaagatatcgcaggaagctgttcgtatcttaaaaactccaaaccccgcgctctccctcctccctgcctcccccccacccccgccctccagcctcgcccaccagctcccaccatctcgactctcctctgctcctcttgcctctcccctccctcttgggtctcccgccttcccggagcacgcgctgccagggcctggggcgccgagcggccaatggcacggcggcaggacgtgatgtcaggcgcggctgtagaaaaggcgcggaggcttgcgctggcgcggactgcagagccggggctgggctaggcgcgcgcttggagagcattgcgcgcggctgggcccgcggccggcggctcctcctcccactctgctcctcctcttttttctcctcctccacctcctcctccgcctcctcctcctcctcttcctcctcctcttcaattctcccggtggctcgactcggctcgcaggcttcggagaa

SEQ ID NO: 42727 - DNA, 2300 bp, Homo sapien
tgtgcacacatatatttgtgtgtgaaagttacttacacacgtgaaaaacatgatttcatgcctcaactctgtaccctgtgaggtaaaccgcaggtcctgactatccccttacctgtcctggcaaacaagtcatttcagactgacacccgccttgtccctattagacggagccaaacctgcctccgaagcagacccagatgggactctgtaaccgaagtgcttattcagtttttgtctacaatcattttatttcctaaatccctcccccaccagacacctgggtatttccctccagtccccaggagactctagggtgagcctgaaacctggaggctgggggtagcagttgggatttacccagcacgctactttgttggcccctggggaggtggtgcagccaggcgggtaaggaggactcgcgccatcagcggggtctgagacatggtgtgcccagtgggcagagaataggcctgtggtttttaagaacctcactgatatcgaatgtgtcttggagtgagaaagtttttaatggaaaaggagcaagagagagtaatgaaataatttgctaagtgcctactatgttccaggcattttacatccacagtctctttcaatcaacacgtccatgcggaggagagcttcttgtcgcccattataaaggtcagaaacaggctaagggaggataagtcactgcctaaggttacagtgcatgtaaatggcagagctaggattcgaaccctggcctttctgagttcctaaagccatgctcgcccccactcttccaggctggggagagaccgggaagagcgagaagctacacgctgggctgcagattgggccctagcgggcttggagcgtggatatgctggctggcccccctccccgggagtcacagctctcgccggtctcgccactcaggctctgccgggtacccaggaggcttgcacggccgcctgcagcccgctgtgcagagcccgggccgaaggcggagctcgatgggaaacggccggccgaaggctcttgcaactctgccacaggcctgccttcccgggcctcccaggcgggtgcctgaggccgcggctccaggccgaggggagaccgcagtgagacgagcatccccttgctgcgccttcttaggatagagggtttaattttcctttctgaagatatcgcaggaagctgttcgtatcttaaaaactccaaaccccgcgctctccctcctccctgcctcccccccacccccgccctccagcctcgcccaccagctcccaccatctcgactctcctctgctcctcttgcctctcccctccctcttgggtctcccgccttcccggagcacgcgctgccagggcctggggcgccgagcggccaatggcacggcggcaggacgtgatgtcaggcgcggctgtagaaaaggcgcggaggcttgcgctggcgcggactgcagagccggggctgggctaggcgcgcgcttggagagcattgcgcgcggctgggcccgcggccggcggctcctcctcccactctgctcctcctcttttttctcctcctccacctcctcctccgcctcctcctcctcctcttcctcctcctcttcaattctcccggtggctcgactcggctcgcaggcttcggagaaacccctactccagtcgccgactcagcgcccaagagggtcgccttgggctgggggcgcaccccagggaggggaggggtccaggcagctgggccgccgcggacacctagcggcttcagggtgaaccccgaccgcagccgtcgccgcctcgggcagagtttgcgcccttgctttgcgccccgggcgctgaagccgggcgggcgatgcccgcggcgtgaaagcgcccgcggcgggcgccgacctctgtcctagtctcctgctccccccgccccgcttgtcccgtgcccttgtgaccctggctttggcgccgtcgcccaggcgccccgcaatgtagctgcccctgcgcctcggcgggaggcgtcctgccccgcgagcgcccggggcccggagcccggcctgggggctcagccgagctcgggcggggccggggccgcggtggcgatgcaccgggcccgttagcgccaggagcgccaggcagctgaggcggggggcaagccctccctcggaggagccgcgcccccggccccgccggtcccgccgcgatgctgttccacagtctgtcgggccccgaggtgcacggggtcatcgacgagatggaccgcagggccaagagcgaggctcccgccatcagctccgccatcgaccgcggcgacaccgagacgg

SEQ ID NO: 42728 - DNA, 2300 bp, Homo sapien
ggtgggggcagtcctttcctcccagtggcctggtgcggctctcaaagtttccttcaaaagggagtttctggttcttgctctgtagcttaactgaatagctgccagaacatgggacctgccctccacacagtgggcccctactgacttctcccactccctcattcaggcctctgctcagatgtcacctcatcagaaaggccttcttccagcaccccctataaaaaagcacccctgggtcctcctacccttccgagttatttctccaccaaacttcttttttttttttttttggagacagagtctcgctctgtcactgaggctggagtgtagtggcgcgatctcggctcactgcaaacttcgcctcccgggttcacgccattctcctgcctcagcctcccaagtagctgggactacaggcgcctgccaccatgcccggctatttttttgtatttttagtagagacagggtttcaccgtgttatccaggatggtctcgatctcctgaccttgtgatccgcctgcgtcggcctcccaaagtgctgggattacaggcgtgagccaccgcgcccggcccaaacttcttatccttgaaatggcagatattcagtgtcttcctcccaccccatccctcccccttgactgaagccccaagaaagggccatattttgttcactcctttatcccagtgcctagaaaagtacctggcccatggaaggtgctcatagatgtgtcgggtgaaccaatgactgaactaatgtttgctgcatgaatatggccagtatcacaaatcctctagtaacactgcaatacgctgtctcagaacttcgatttctttctattatttgttgcagtgtttatttcttctatttaacttttcaatctgtctgacatttattgtggtgtatatcatgggaggcaaggctgtaaacagatctccagctaaacggctaaacaatttgcagaacaatccatttcctccccattggtttgtgatgtctgcattttcatccacaagagctgggaccaggcccgctcctgtgggccagctgctgcctcgtctgccctcttgttccagaagcccagggctatgctgttcctgaggcagggctgcctagtgattggccacacaggcactggaattagacaatctgccgtgcactttccagctcaaccacttaccatctgggtgactttgaacaaaagaatttgctttttattgttgttgtccaggttggagtgcagtggtgcgatcatagctcactgcagctgctaactcctatgctcaagagaccctcccgcctcagcgtcccgagtagctgggactgcaggcaggcactaccacacccagctaattcttacatttttctgtagacatggggttttgctatattgcccaggctggcctcaaactcccagcctcaaggcatcctcccacctcagcctcccatagtactgggattacaggtgtgagccaccgcacccagcctgaaatttcatttctaagcctcaaagcccatctgtaaaatgggcacaagggtaacgttggcacacgtggtggacgctccgttggtgtcattattacagatcacggccagttgaagcacttccactcatttggcaaacagaagccagacgggcattcaccctgtgcccagtacagtgctgcgcccaagcaggcagtcagtgtccctggctccagccctcctggggtgcagcacagttttgaatgtggaggggaggcagcaggggtggaaacagcccagccaggagcggccgctctcggtgcggggaggaggtgaagtgagaactgagctgcttgggtctcagggaggctctgacttctagagggggcgttcaacattctttagtggggacttttactacttccagaaacctctgcacattggctcttgctggtcccccgggggccacaggaagtgggagctccagatgaagagtcgctggcactttgagggcagggggcagggccttcccctcatcggaatactcttggagcctacttcagtgcctgcattcagctggtgcacaataagtgcttgttactgtgccaatttcagtatgactagggctgtggtaggagcaatgctaggcgatggggaatccgaagacgcacaggagtccaagggttggctgactgcagaccctcatcataagtctagagccggagaagatggggagacgccggcctgcgccctgtgagtctgggcctcagtcttcccatctctgaaatggggaaggggttcctcggccgagcggatcggccgcagaactcggcggagt

SEQ ID NO: 42729 - DNA, 2300 bp, Homo sapien
tcgcctcccgggttcacgccattctcctgcctcagcctcccaagtagctgggactacaggcgcctgccaccatgcccggctatttttttgtatttttagtagagacagggtttcaccgtgttatccaggatggtctcgatctcctgaccttgtgatccgcctgcgtcggcctcccaaagtgctgggattacaggcgtgagccaccgcgcccggcccaaacttcttatccttgaaatggcagatattcagtgtcttcctcccaccccatccctcccccttgactgaagccccaagaaagggccatattttgttcactcctttatcccagtgcctagaaaagtacctggcccatggaaggtgctcatagatgtgtcgggtgaaccaatgactgaactaatgtttgctgcatgaatatggccagtatcacaaatcctctagtaacactgcaatacgctgtctcagaacttcgatttctttctattatttgttgcagtgtttatttcttctatttaacttttcaatctgtctgacatttattgtggtgtatatcatgggaggcaaggctgtaaacagatctccagctaaacggctaaacaatttgcagaacaatccatttcctccccattggtttgtgatgtctgcattttcatccacaagagctgggaccaggcccgctcctgtgggccagctgctgcctcgtctgccctcttgttccagaagcccagggctatgctgttcctgaggcagggctgcctagtgattggccacacaggcactggaattagacaatctgccgtgcactttccagctcaaccacttaccatctgggtgactttgaacaaaagaatttgctttttattgttgttgtccaggttggagtgcagtggtgcgatcatagctcactgcagctgctaactcctatgctcaagagaccctcccgcctcagcgtcccgagtagctgggactgcaggcaggcactaccacacccagctaattcttacatttttctgtagacatggggttttgctatattgcccaggctggcctcaaactcccagcctcaaggcatcctcccacctcagcctcccatagtactgggattacaggtgtgagccaccgcacccagcctgaaatttcatttctaagcctcaaagcccatctgtaaaatgggcacaagggtaacgttggcacacgtggtggacgctccgttggtgtcattattacagatcacggccagttgaagcacttccactcatttggcaaacagaagccagacgggcattcaccctgtgcccagtacagtgctgcgcccaagcaggcagtcagtgtccctggctccagccctcctggggtgcagcacagttttgaatgtggaggggaggcagcaggggtggaaacagcccagccaggagcggccgctctcggtgcggggaggaggtgaagtgagaactgagctgcttgggtctcagggaggctctgacttctagagggggcgttcaacattctttagtggggacttttactacttccagaaacctctgcacattggctcttgctggtcccccgggggccacaggaagtgggagctccagatgaagagtcgctggcactttgagggcagggggcagggccttcccctcatcggaatactcttggagcctacttcagtgcctgcattcagctggtgcacaataagtgcttgttactgtgccaatttcagtatgactagggctgtggtaggagcaatgctaggcgatggggaatccgaagacgcacaggagtccaagggttggctgactgcagaccctcatcataagtctagagccggagaagatggggagacgccggcctgcgccctgtgagtctgggcctcagtcttcccatctctgaaatggggaaggggttcctcggccgagcggatcggccgcagaactcggcggagtcgaggggtccaggcccaggaaggacgccgccggggcgccccccgcccctcaagcttgcgtggcggcagcgcgcacgagcgctgggggcggcgcggccccgcggcggggaggggcgggcgcgcgggcgcgcgggcccgcgcaggcggtggcggcggcggcggaaccgagctgacgggcgtgcggccgctgcgccgcaaactcgtgtgggacgcaccgctccagccgcccgcgggccagcgcaccggtcccccagcggcagccgagcccgcccgcgcgccggtgagtcgcctggggctggggccgggccggtggggccccgcggcccggagaagggcgggggccgggcggcggggccgt

SEQ ID NO: 42730 - DNA, 2300 bp, Homo sapien
gcccatggaaggtgctcatagatgtgtcgggtgaaccaatgactgaactaatgtttgctgcatgaatatggccagtatcacaaatcctctagtaacactgcaatacgctgtctcagaacttcgatttctttctattatttgttgcagtgtttatttcttctatttaacttttcaatctgtctgacatttattgtggtgtatatcatgggaggcaaggctgtaaacagatctccagctaaacggctaaacaatttgcagaacaatccatttcctccccattggtttgtgatgtctgcattttcatccacaagagctgggaccaggcccgctcctgtgggccagctgctgcctcgtctgccctcttgttccagaagcccagggctatgctgttcctgaggcagggctgcctagtgattggccacacaggcactggaattagacaatctgccgtgcactttccagctcaaccacttaccatctgggtgactttgaacaaaagaatttgctttttattgttgttgtccaggttggagtgcagtggtgcgatcatagctcactgcagctgctaactcctatgctcaagagaccctcccgcctcagcgtcccgagtagctgggactgcaggcaggcactaccacacccagctaattcttacatttttctgtagacatggggttttgctatattgcccaggctggcctcaaactcccagcctcaaggcatcctcccacctcagcctcccatagtactgggattacaggtgtgagccaccgcacccagcctgaaatttcatttctaagcctcaaagcccatctgtaaaatgggcacaagggtaacgttggcacacgtggtggacgctccgttggtgtcattattacagatcacggccagttgaagcacttccactcatttggcaaacagaagccagacgggcattcaccctgtgcccagtacagtgctgcgcccaagcaggcagtcagtgtccctggctccagccctcctggggtgcagcacagttttgaatgtggaggggaggcagcaggggtggaaacagcccagccaggagcggccgctctcggtgcggggaggaggtgaagtgagaactgagctgcttgggtctcagggaggctctgacttctagagggggcgttcaacattctttagtggggacttttactacttccagaaacctctgcacattggctcttgctggtcccccgggggccacaggaagtgggagctccagatgaagagtcgctggcactttgagggcagggggcagggccttcccctcatcggaatactcttggagcctacttcagtgcctgcattcagctggtgcacaataagtgcttgttactgtgccaatttcagtatgactagggctgtggtaggagcaatgctaggcgatggggaatccgaagacgcacaggagtccaagggttggctgactgcagaccctcatcataagtctagagccggagaagatggggagacgccggcctgcgccctgtgagtctgggcctcagtcttcccatctctgaaatggggaaggggttcctcggccgagcggatcggccgcagaactcggcggagtcgaggggtccaggcccaggaaggacgccgccggggcgccccccgcccctcaagcttgcgtggcggcagcgcgcacgagcgctgggggcggcgcggccccgcggcggggaggggcgggcgcgcgggcgcgcgggcccgcgcaggcggtggcggcggcggcggaaccgagctgacgggcgtgcggccgctgcgccgcaaactcgtgtgggacgcaccgctccagccgcccgcgggccagcgcaccggtcccccagcggcagccgagcccgcccgcgcgccggtgagtcgcctggggctggggccgggccggtggggccccgcggcccggagaagggcgggggccgggcggcggggccgtcacccccagccgggccgagggcgggcgcgcgcccacggctccgcgggggagagcgggaggcgggcgcgagtgtggccgcgcggggctgagcgtgtcggcggccgggcgggcgggggcggcgtgtccgcgtgtcccggggtgtgcgcgtccccggcgggtgtgcgtgtgcaccccggagcgtctggtggcgttgttggggtgagtgcgtgcggggacgcgggcatggctccccgctacccacttcccgagtggggacgacgggcggaggagtgtgccgggcgccgcagggagtacgtgcgggtctcagggagtgtgtgtgtgcacgtgtgtgcattccaaagtgatt

SEQ ID NO: 42731 - DNA, 2300 bp, Homo sapien
gcaagagtccttcagactccaaaagtccacaataaataaacccagtgctcgtctcaaccccagtgggtgtgtgcgaagctctctggattgggagcccagtgaattcctcatcagcagcttgattcattagagctgaaggtcatgtgcatccatccttttgcaggtgtcttcccaacaagcccaagtttcaaagacgttgaggacaaggaacaagagagggcaggcattcgagaaggggcctgtggactaattcccatactgccactcacctgcagtaagaacgcgcctctggaacatggagaagttcttcttaaagggatctctgttcacccaggtcaacatgacccaccccgcaagcctcagcctaattctgaagcatgagggttaaacaattcggggaaaatgcaggcactgcaggctctgaatggcaacttccctcccccttcccctgtccaaattccttcacactctatggaattcctacataaagccccttttttcttagaattctatgaggtcaccaccatgcagatgtctaagagaaagaaagaacggctccgtgcagatccaggccactgcaactgaatgcatttcagatctcggccaccccatctttcaattcccatggcccccccactcgcccagccacagctacagcggtggtggccagtcaggtctggtggggtgctgtgatcctgcccttgctggaggccaagaaggcctggctagaagacctgtgcctttaccaccagatcacccgagaagtcatctgtggaaaaatccagaattggagacaatggcgcagccatgtatgtgggggtctgtttccacacaagcaagtcctgttagagggacacatgtcaaaatgctagctcccactccaagttcaagttcccaaagttaacatcacaggaaattacaccaccaactgatttgccccaatgtcggctcctctgtctggaagtcgagtctgagaaggccattggtttagttcagctttggccaaaggaagggaccagctcagacaggaatgagtgaaagtgctggcctgattttttttctttttaaactaacattttccccaaaagttatcttgccattacccaagagtcataagtgaaaagacagccaaataccaaaaagccactgaggccctcaacagtgcctgctcatttcaaagccatttcacggacagccagggggtgcctgggccaccgcagaccacccctcactccaagagcactcctgctccccagagctccatgttccatgtaaagttccacggcatgtgcacaccacttcctaagaatgatgtcagcaaaaaaaaaaaaagataaaaatgtggaaaaaaggactatttttacctccccaaatcacaggccagacgggagaaaaatccatcaatgccagaaatgtggctgagccttcgcacaagatctattatttcacaccttaaattaacgcatctcaaagcaatttgcaaatgttcgtcaatttgcagaacatacatggaagggagagaaataccttttcctttcaacaccgaaggacactggcaggggggcacaacatggcccaaaccacacaggtcctcacacacaacattcatttcaagcacatgtagtagaagccgtgatcgaaatggaaatgagcagggaaaaaaggcaggcaggggacttaaatgacaagtgacaagaagcctacctacaagcgatctcgctgtcagatatttaggactgtgagtcaggcccgtgaaggtgacatcagggggccagaacaccggactcttcctgcgaacagtgtcccagcctcatctccacacaagcctggcagtgcctgcccgtatttaatcttggatgattcaccaggtccctccactctccaccctccaactcccttgcttggtctagcctgagaagaggaaggaaatattcttctccttttgacaattgttttgacacttcccttatgaaaagtatctggggcacttaaagaaaagaaaaaatgtgaacagcagccctttctctccagtagctctggccctgggcgaggaaggccagcagtgccttctggaagacctctcccaggtctcgggcaacccagccctgcaggaacctagcctgtcttaacctacttggctttgcagcatgcaacaggagcaaagcacgacaaaggcagccagatgtggtttaaggtgaggaactctggaatcagagacatgggttcgaatcccgactctgccatttgtgggtttatgaccctgcccaagttacttaacctccctctctgtaagatcagga

SEQ ID NO: 42732 - DNA, 2300 bp, Homo sapien
ccatgcagccctatgggagtctggcctgtatgagtcctgggccaccagaccacacacagcacagctcagagcacaagccactcctgcggagctaaaaatggccacatacttcctaagcccaactccagggttcagtgaggatcctggtaaggagagcgacacaggaaggtgcaggggttgccatggtgtggccccagatgctgtgattacgcgccagccccgtcacaccgtacgggtggtaggactgggcaaagaagacgccgccacctggatgcactgaggtgtgcacagccacgtggagatgatgctgggggctcacggtgactctcaggaggccctggcctggcctatctggagccttctctgtgaaatgaggctggtaacgcccactagcagggttgtaggggacatggatctgtggccacctcctcaaggggtgccacacgcaccaggtcctgactgggagtccggcccccagggcctgtggatggctggcctgggcccagcctccgcccccaagggtgctggcacctggcatgtgcccgacagttggggccggctggtgggaaggtgtgtgtcaggtggcggagcctcggtgccaggatctcactcacgcgtcctccagggcctcagctgctgtatgcctgtgtcagtcccagtggcgatgagctgcagatggggcacaggggtggtttgcccagggcagaagtggctcgttctgaaaaaggaagcaggtgctggccacggagagcccctcttggggaccaggggctggggctggcctgcagagcccagattcctctcacagactgggtggcggggggtctgtctggcctctgtgcccttgatcccacggtgtcctctactgggaatccccctcccctttagtccaaaccctgctggtccttctgggccacctcaggttttctacctgttgtccaaagctccccgtgacctggccccgccagaagcagcagccatgggtccttttcctgagcagcttcgtgctctttttagcttgtgggtagcagttccagggcctgctcctggggacctgtaagaacaggaactgtgtctgagtcattgcagggtcccgaagggaagacgaacactcctcatcctctgatcctggatccgcaccctcgttttggagaatgcagggcccgaataaagatgcaataacaatcaaataacaaccccactgatggggtatctgccttgtgccccgcctggccctaagctctttcaactcgtgcaatgtcatgtaacccaccagcaccccgggcagtagatactacccttgtccctgttttacccgtgagaatgcaggtgcacacaactgggacgtggctaagccagaacttgaaccaggactgccgcctgccagggctctcatctcatgggcaaccaaggatttgggcccagtttacaaaggagagaatagaaagggttaagcttttaaaggaacagcaagggccggtcacggtggctcacgcctgtaatcttaccactttgggaggccgaggtcagcagatcacctgaggttaggagttcgagaccagcctgaccaacatggagaaaccccatctctactaaaaatacaaaattagccgggcatggtggtgggtgtctgtaatcccaactgcttgggagcctgaggcaggagaatcgcttgaacctcggaggcggaggttgcggtgagccaagatcatgctgctgtactccagcctgggcaacaagagcgaaactccatctcaaataaataaataaataaacaaacagcaagaacagttatgcttttcagcattttgctgggccccagtgtggataggtggggagcgagcacaaggaccaaaggaaaggacccttgtccctccctgagcctacactggtctaatcgggtggtgctgccatcagattccagtccctggtaagcagggggctccgtggcggctgtgacaagttccattcactttggaggtggcagccggagctatttttagagcagcgcatggtgggggagtttccttttggcggtgtctggggaccggagtcttgggaaggggaagtcccatgcggagacagaggcccttcttcctgcacccaccccagcccagagaggcgacccagctccctggaggcccaggcacctcatgtctgccctcaacccagagtggagcagaccttccctggagcttctcaggagccacttcaaaaggtaccctgactttctctgcctcctgctgtgggaaccgcttgctcttaggggtgtgtccagcgagggatggggaaccaggccc

SEQ ID NO: 42733 - DNA, 2300 bp, Homo sapien
cttcatgacagtctggccctccagacaagagcagcgctggcatcgggcaggtgattcctgacacctgctgcctgcaggcattcactgaccaggcctttcctggaggaaacacccagggccgggcggctgctgtttccacacgtggactcggatctgctgtgacaccgtcagcccgacagtctctccatatgcagcctttcctctgtacttttctccatggttgaaataaaacagggtgactgggagttacttagaattcatgaagattttaaaatggctttggagattttgcttttaaaccagtagattcaaaacttaaacagcgtctgcagcacaatttcttgaggaaccttgaaaaacacaacttcccaggccccattcagtaatcccaggatttctttaagctccccaaataattttgaaactcatcatcagccgagtttctgccctcatgaggtaattccatcgttctccccagcctgcccctggcagctgtaacacaggagctggcctgagagcagattcaccctggaatgttctctccacagaacaatcaagtccctgtcgcctgcctagtgcttaccactgaagatttttctgattccagaccaactttttgccaacattctgcttccagctctctgagcccctgccgtgtctccccaacactgccagccccagcacgcaatcaacctactttgtgcatgccacccgctttccacactgtgagaacaatctgcccaactggaccctctggaggcgcacgatctcagccactcaccaggcctgagtgtttgtgaaatgatcatgtcctacttattacaaaaccgtaaccccaaaacattccttttatttctgtgaaaccggccaaagtgaggtccacccaccttcacacagctctggcggtgcacctgctcaccttctcttggttctcagaactgagctgggcttgagaacacagctttggctttgccatttttttcctacttggctgctgaggtggagggtgtgctgcacttatcaccccatttcaaaaccaaaccaaacctgaggccaccccaaacaaattcagccagcaaaaagggtaggtatcgatggtcacctgaagcctcaagggagtccactctgacttctgacagcagacagaacctatctgtcctcaggaggggcgcatggctcctacgctctcctctgagcctaggccagtgctcaaggaggatcagcaccctgaagggccaggccaatggccttagcagccccctactgcccccaaaaacaccacacagtgcccagacctcagctgcccaatttggtttttgttttttattgagttgagtttcattcggcaaacactagccacatgagtgtcttactgggcctcaatgctcaccaccttccagaaccgcggccagccacccactgatgccattcaggaagtgtccattgtttggactgtttcttccagcacctcaatctccagaggagtgattttctcagtgaggactgcagtagtccctttctcacacctgtaccggccaagcctagtaagagaaaaacaaaagcacagagttaggattctcctcaaggtgccagagggcagaagacagtgaaaataaatattcaggcaacgcagtgagcaggctggactggaatcttggctctcccgatcccagctctgtgatcttgggggattcaacttcctcagttctcaagtgctgcaaaatgggggtgcctgggaggcaaagagtgtcattagtgaacacggcacctggcccttggtggacacgtgactctccccccaccccaccatccccacaagtgctgggaagcacttggtcccttgacatcaatcttcaacctccctacaatactgttcagggacagcaggaagcaaatcccatcattacacaagagaagggcatgattgctcttccgtgcagcaacaagaatgacttaactgttaccttagacactgcacaaacatctggaagcataaacagtgtaaaaaaaatgtgcagccagactctgggcttgtcatttcagaccactctcaagtctcaagaaaagttaactgtccctttcagggacacagtgggtccccactaggacacacccaacaccttcttcctggagtgaatctggcagaggtttctttgagcaccagactgtctagaagatatgtatttgggctgttaatgctcacagtgggtcaggaattaggatactgtcaaatggcagcacacaaccaactgttcctctgctctagccccagctggggtaatatctctgtcaaacttgct

SEQ ID NO: 42734 - DNA, 2300 bp, Homo sapien
taatattccattaaatgaatttaccatattttgtttatccattcatcagtggatggacatttgtttccattatttggctattgtgaataatgagacccccccctcgcttttttttttgagacggagtctctgctctgttgcccaggctggagtgcagtggcgtgatctcagctcactgcaacttctgcctccctggttcgagctattctcctgcctcggcctcctgactagctgggactacaggtgcccaccaccacgtctggctaagtttttgtatttttagtaaagacggagtttcaccgtgttagccaggatggtctcaatctcctgacctcatgatccgcccacctcggcctcccaaagtgctgggattacaggcgtgagacaccgcgcccagccaatgagaccccttttgacgcagggcaggtaagccccaaagtgcggctgagcccacaagggttcttggctttgcccaagaaagaattcaagggcaagttagaggcagaagaaaacggctttattgaagtggcggcgttacagctccatgactgctcctgcagagcagggttaccctcttaggcagagtgtcagggcagttttgctgtcatatttatacacacttttaattacatgcagattaaggggtggtttatgcaggcatttctagggaaggggtagtaacttttggtttatggtgccactgccatggaaaggggcggtaactcacgagtgttgccatggcaacggtaaactgacttggctggctggtgagcgagtcttagggaagacagcttccgtccaggccctgttttagctagtcctcaatttggtcaggtatctcagccccatctctgaatggaggcctgccttctacctcacctttgtagaagtttttgtgaatacatgtcttcaaccctctcgggtgcgtatctaagaggataatactttttggggaactgccaaattgttttccggagcagccgcaccgttttgcattctcaccagccgtgtattcgggttccaatttctccacactctcgcaacccttgcgcttttctgtctttttgtttatggccatcctagcgggtgcgaagtgggatctcactgtggtcgtgctttgcattcaccctatgactaatcatgttgagcctcttttcacagacttaatggccattctacagcagccttttgagctaggttgtaatctccatctgatagcggaggaaacagattcagagagttgaagagacttgcttaacgcaagggggtggtggggctgtgcctgggacttgggtctgtctgtctctgaagcaccgcagaaccaaattaacggtagaaacaagtccagtctgagcggcaggagacctggtcgctggtgcgttcaccttggacaagtcctttcccggttccgggtgtcactttctcctccgtgccacttggggcgatatacttcaaacatctctggcctctctaggaaccagaatctctaagatcaatcgttctagtgcggcgtttgccccgccccttcagcccccgttgccagcgacgccggaagtgctcggctctttttgtttgcacccgcctccgacccggaactgctttcttgggaagatggcggctgtgtcggtgtatgctccaccagttggaggcttctcttttgataactgccgcaggtgccgccttgcttggggcttggttcagggagggagaagagtgcggtgctcgggtgggagctgggccaaggtgtgatacgagaattctgagggaagaattcatggcggggcctgtggcccgcggctagtgtgactcaggggaatcagggcctgggcgtgggtttctcctgaagccgggtctgctctcccaccttcccagcgcactcggccaccgtttatctccgtctcctaaggcacgtcacggcccctttgtaagactgtcttcgttggaaaacgggagaacagtgctgatggtgggaggattcattaaacagatgggcgtgaaaacaagtagcagctttcctgagttctctgttaggcacttttcatgccagtgctgtgcgatgtggtcctgcccttcaacacttgattctctcatttgctcttaggaatgccgtcttggaagccgattttgcaaagaggggatacaagcttccaaaggtccggaaaactggcacgaccatcgctggggtggtctataaggtaagccgggttaggctaagagcagcagtgactgaaccggcaacaggaatcagaacacttggcttccggtgtctctcccggctcggtctggaaaggcaaatgcta

SEQ ID NO: 42735 - DNA, 2300 bp, Homo sapien
ttgggaggctgaggcatgagaatcacttgaacccaggaggtggaggttgcagtgagctgagatcatgccactgcactccagcctgggtgatagagggagaccgagtctcaaaaaaataaataaataaataaaataaaataaaataaaataaaattcacctaacgtagaagtcaccattttaaccattttaaagtgtgcaactcagtggtttttagtgtattcataatatcgtgcaaccaataccactatgtaattccagaatattttcatcattttccaaaaactctgcgcccactaaacagtcctatccattctctcctcctcccctaacccttagcaaccaaacatctactttctgtctgtggatttgcctattaagaacacttcacatacatggaatgatacactatgtggccttttgtgcctggcttctttccctcagtatatttttaaggtccatccctgttgtaacatgtatctgtgcttcagacttctttatggtctaataatattccattaaatgaatttaccatattttgtttatccattcatcagtggatggacatttgtttccattatttggctattgtgaataatgagacccccccctcgcttttttttttgagacggagtctctgctctgttgcccaggctggagtgcagtggcgtgatctcagctcactgcaacttctgcctccctggttcgagctattctcctgcctcggcctcctgactagctgggactacaggtgcccaccaccacgtctggctaagtttttgtatttttagtaaagacggagtttcaccgtgttagccaggatggtctcaatctcctgacctcatgatccgcccacctcggcctcccaaagtgctgggattacaggcgtgagacaccgcgcccagccaatgagaccccttttgacgcagggcaggtaagccccaaagtgcggctgagcccacaagggttcttggctttgcccaagaaagaattcaagggcaagttagaggcagaagaaaacggctttattgaagtggcggcgttacagctccatgactgctcctgcagagcagggttaccctcttaggcagagtgtcagggcagttttgctgtcatatttatacacacttttaattacatgcagattaaggggtggtttatgcaggcatttctagggaaggggtagtaacttttggtttatggtgccactgccatggaaaggggcggtaactcacgagtgttgccatggcaacggtaaactgacttggctggctggtgagcgagtcttagggaagacagcttccgtccaggccctgttttagctagtcctcaatttggtcaggtatctcagccccatctctgaatggaggcctgccttctacctcacctttgtagaagtttttgtgaatacatgtcttcaaccctctcgggtgcgtatctaagaggataatactttttggggaactgccaaattgttttccggagcagccgcaccgttttgcattctcaccagccgtgtattcgggttccaatttctccacactctcgcaacccttgcgcttttctgtctttttgtttatggccatcctagcgggtgcgaagtgggatctcactgtggtcgtgctttgcattcaccctatgactaatcatgttgagcctcttttcacagacttaatggccattctacagcagccttttgagctaggttgtaatctccatctgatagcggaggaaacagattcagagagttgaagagacttgcttaacgcaagggggtggtggggctgtgcctgggacttgggtctgtctgtctctgaagcaccgcagaaccaaattaacggtagaaacaagtccagtctgagcggcaggagacctggtcgctggtgcgttcaccttggacaagtcctttcccggttccgggtgtcactttctcctccgtgccacttggggcgatatacttcaaacatctctggcctctctaggaaccagaatctctaagatcaatcgttctagtgcggcgtttgccccgccccttcagcccccgttgccagcgacgccggaagtgctcggctctttttgtttgcacccgcctccgacccggaactgctttcttgggaagatggcggctgtgtcggtgtatgctccaccagttggaggcttctcttttgataactgccgcaggtgccgccttgcttggggcttggttcagggagggagaagagtgcggtgctcgggtgggagctgggccaaggtgtgatacgagaattctgagggaagaattcatggcggggcctgtggcccg

SEQ ID NO: 42736 - DNA, 2300 bp, Homo sapien
aaaccatcataagaccaagaccctgtctctctctatatatatataataaaagtaaaataaaaattgttgccagcaggctttttttaggggggaggacagagtctcgctgtgtcacccaggctggaatgcagtgggatggtcatggctcactgcattctcaactttccaggctcaagcgatcctcacactgcagcctcccaagtagctgggactccaggtgtgcaccaccacacccagctaatttttaaatttttgtacagacagagcagggtctcccagtgttgcccaggttggtctcaaactcctggcctcaaactatcctcccatctcagcctcccaaagtgctatgactacaggcatgagccattgcacccggcctggcaggctaccttttaagtgagttttgacaagaatgctaagtggactgtgtgccaggcaccatgtattagctacgggcttggtacatgttaagtcaaagtcacttaaatctcacagcaactccatgagttatgcactattcatcatccacacattacagatgaggaaactggcttggagaaattaggtgtcatgccttaggtcagagtcaacatgaacttggatgaacttggatggatctatctgcccccaaagcctgagccctggggtcattcagtctaacctccctcctaaccaggcatccctgctactgagaccaggaaggtatgcccacagtccctactccacacttgcatggaggatctttgcctctgcatccccccaacccctcagcctccctctgcagccctggccctggctctgcccctattcccttcccccagacaggccctctctgccatccctgcagtacctttagaatggcctggatgaagatccagaaagccaggttcaaggcccggctctgcctccggccactggcctaacccggggtgagagccttcagttctcctctggaaaatgggtacgcctgcccccagcccttcctcgcagcaggtggaaggtacaggagaagcgtcctgtagggagccggctcagggcaggcagtaggccaggcactgagcgctccctcctccacgaccatcccggcctccgagaggcctgggaagccccaagacccttcagcttccgctagtttgctttggatccaagtctcacaggtggccccttctaatcgggtgactttaaccaatgtgtttgggggaggtagtgacaacaggcccggggcgagggactgaaggtctcctcccacccacctggaggcaggtctctgtctggctgggccgggtggggggcccaagagggcggggtggggagcggaaaggggcgtggccgaggggcggggtctcccgggccgaggggcgggatctcctggtatctgccagagcccgccgctgcctccccgacttcagtccccgcagatgcctcgcagacggtgaacggccacaggcgccaggccagccatagcgggtgaggaactggagctgggaacaggggagggaccagcggatgaaggggaggcccctgactcaggcccattggcgcctcgcggaggagggacgcgcagtggtgggcaaacttcgcatctccctctcgggcctcaacgagtgtttggagagcaagaaaagtgggcgccagggggcttgagggcgcgaatccaggcagacgtgaacgagggagtgcttttcagaatccaaaacgcgggagcctcccagtcctccggtgaggggcgtgttggattttcgtgctgtctggaaaagggaaaaggggtgaatgatcactggtgatggctcagatgccgtcaccaggtggcatgaggccaggtgtcaggacaccgtgttttctcaggcacatttgtgtaaagccagggctggagcagagacccaggaggctcttccctgcctgcagagccccccaggttgacgggagtgaccccagatcacccagggttagggtatccccgctgagcacagcgtctggctgtggcacacccaccagccggaaccacaagctgaacctggaggtggtactactgagagactgggaggcagtccaggcaggagggatggcatggtcacaggtccagaggagggaaactcagaaatggacgcaccttggggagcaggggaaaggtggctgcacggagcagcggtggacaggtgaggccagagaactcggcagaggcctgatgaagcagaaccttggcggagaacctcaaggaacacaaagcccacctggacctgagcttcccccacccgctgcagggaccctgagctctgtttcgcccctctctggccagcgac

SEQ ID NO: 42737 - DNA, 2300 bp, Homo sapien
gggtggcggattcctcagctgaaaaatagggattggggccaggggatccctggctctgcttctgagtcctgcagagtcaaaggacactccaaacaggggctggccctgcccctgcaccgagtgtctctggccgcagcctgggcattcggaatcagccccttgttgctgttcgtttctgcttcatgtgccaggccattgccgcccccctgctcatgccctgggcctgacctcaggccaggtgggacctccctcctcctcctgagcctgagagctctgcgtaggcccgggggggaagcccttggtttctccctcatggctcctgtttgagcagttggggctgccagaggtgtgaccgaccacaggcttttaaatgtggacaaggttaaaattaataataaccttgccaggcatttgtaggagtcctttgcagagcacctgcatggacattagtcactaacatgtatggcatacctaacatgtactggactgtccgctcagtactttgcccactttacagatgagaaaactgaggcacagaaaggttaccaggacttacgtaaagtcatacaaaagacagaggtggggcctgaagcctggcccattcaacccccaaacatccctttgttaactggccagacctctgttgcactttgatagcctagacatctgggtagatgggcacagagaggttagcttgcccaggctgcacgcctagttgggtctcagtgggaggagaaggggtgagaggaaggtccctggaccctggctggagcccggccccccgcgtgcctcttccttccaggtggccgaccagatgacgctgctgcagaactgctggagcgagctgctggtgttcgaccacatctaccgccaggtccagcacggcaaggagggcagcatcctgctggtcaccgggcaggaggtgaccagtccctcggccccgcccctgggccccgccctggccccgctgtgcacttccaggattcagggccccggagaggaggacccaggcctctcggggctggctctgggcaccctaattatcagccctttccccacgttcatggaacacccactggcccaaaccctctgtgagcagccctggcccaggcttgagaggcgccggcccctgggagccctgctcttggggagcagctcagggggtgtgggcatggtgaggagaggctcatggaggaggaggtgatggtggccctgggtctggaaataacacactggagttggctggggaatgagggatgaggggggcagtccccacgtctaccgcaggctcagagagggtggaagtgtggagcccccgggccctgctggtgccggtgtgggggtggcatgaggtgagagatgagggaggctagggggttgctagtgctggcttagcaggcaaaccttgcaggccctaaatctcgaatgaatgaatgaatgaatgaatgggcaaagggctccagagagctcagagtcggaatttgggcccccttagagcagggaatgaggatctggggagtagaaagtccagatgcagcaggggtccggggagagctttaggaggaggagggacatggccaggtggtatctgaggaggcaggcggaggggtcaggatgggaggtggggggccagggtggggacacgggggcacagccacggaggaagactcacctggagagatgggctgtagggaaagagagggagggggggaggcagagaagggggttgatggccagggtccagcctgctggcaggagtgccactctcaggtggggacacaggaagggccgtggggtcggtgggtgctgtggggtggggaagacagactctgctcccagctccagccctcccaggcccccactgctcatctccagctctctcctcggtgtcacaggccatcggggcaggaggacgggacgggcagcactggtcccaggggggtgtctttggggctccctgtgagcgcaggtgcctgcagtctgcatgaagtgtgggtgtccgcaggctggctgagtctctgtggccatgggaatgcctgtttgtgtgtgtgtgtgtgtgtgcctgcctgtgttttattgtgcaaaatctccacacacatcagtgtgtgggtgtcactgtcttcccatcaacccgtaaatgtgatcacatacatgggtgtatgtgttgccgtgagtgtgagcgtacaagggcgggtgtggccgtgtgcacacgtgtgtgccttcacttcacagagtgggcgaccccatgactgtgctcgtgtgtgtgtgtgtgtgactctgagctgagctgtgacccagcg

SEQ ID NO: 42738 - DNA, 2300 bp, Homo sapien
acagtgagctatgatggtaccactgcactccagtctgagtaacagagcaagaccctgtctcaaaagacataaaacaaaatagggacactaaaaaaagaatattaaaatagggagactagttaggttcagccatatgcaagagaagtatatcttgtaagaacttctctaggtgaaaaagacataattacaaggtcatgcacattgaggaataagttgtctgttacgttgtaggtggaatatattcgatcagttagctatgactgttggtgaaattatattataaaaattattattattgaattaatgattattaattattaaaaccctattgcccgggctagagtgcagtggcacaatcatagctcactgcagctccaactcctgggttcaaaccatcctcctgcctcagcctcccgagtagccgggactacagtctatcagtattattgttgtatgttcacacacaattttaagtggcataatgaggaaaacacacactaggttttattttattttattttattttattttattttattttattttatttgagacggagtctcactctgtcgcccaggctggactgcagtagcacaatcttggctcactgcaacctctgcctcccaggttcaagcgatcctcctgcctcagcttcccaagtagctgggactacaggcacaagccaccacaccaggtgaatttttctattttttagtagagatggcgttttgccatgttggccaggcttgtcttgaacttcttgacctcaggtgatccgcccaccttggcctcccaaagtgctgggattacaggcatgagccacagtgactggctggaaaacacataggttttaaatatagttggcgtttctactttttcagtggccttccatgaaaaaatatatatagggagagttggcttcacttcacttatccagaaaagtccctcttgttccagataagtgaggtgttgggtgtgatttatttatttcctccaatgaagggatatgtgggaggaggggtggttctcaacagtgactgccccatagtcaccctgtgcccctccctgctctcccaagatgaaaggcacggaggtaaatcctctgaggacagagacttttcttctctttcctatgggatccctggtgcctggaacagtgcctgacccctaagtgtgcgctcagtaaatgtgagacaaacagaggaacacacaaaagatccagtcaccgtgggagcggcacaacaccctgcaacccgggccctacaggaacaggatatttcagagcccatctgggcccagagattggatggggacgtcccaggttgtctagggaggcctagccttctagataagggccccttcctgctaccctgtcctatcctggactagcttcatacttggttcaacctggggccactatagccaccacttggcctcagaggcagtctcagcccagcctcagtttttccagccatcgactgggaacatcagcagcccacagcagatgaggacattcagaggccaccgtggcatgcacgcaccaggtgtccaggccgctcacctgctccccttccggcccccctcttcttccacctgatggaagaggaaaaagaggtggaagcagcaggccgcctagtcaagtcgccatggccttgcctccgcactggcctgtcctgactctactccaatgtccgggctgggccagaccatgccaggccaggccccagggaggtagccattcacaaggagagaggagcaggcggcaggccgggtgggggagcagcccataaatcaagccccactcccacccggtttctaacaagcggggctgcctacccgcctctgtggggtccctgcctctgggctcccacagcgggcctggaacagccagctggccaaggcctctgcagtgccttggcctccgcccccaccctcagcccccagatagataggggtattttttttcttttaggagaagaagaaaaaatagacgtaaatgaagagaaacaccaacaaagaaggcgagaggcctgcagagtcacgtgggggcagagaccaattgggcctccggtggcccccccaccagggcggggaggaggaggaggacggacggacagggccagcctgctgtccggctgccgcccgccgtggtgtgagggggtttctgcgcacccacagtcgccaccgtcccacctgggctgccggagcctccccctggacccctggtgcccactgccaccctcatccggtgtgagagcgctgcttccgcttcgtaagtgagggccttggcccaggcctct

SEQ ID NO: 42739 - DNA, 2300 bp, Homo sapien
taaattacccagcctcaggtattcctttacagcaacactaaagggactaagacagtagtatacacatgcaatggtatattattcagccttaaaacgtaaggaaattctgacatgcgacaacatgcatgaaccttgaggacaccatgctaagtgaaataagcctgtcaaaagggaacacatcttgtattattccacttatatgaggtatctagagtagtcaaaaagcaaacagacagaggctaggcacggtgggctcatgcctgtaattctaggattttgggaggccaaggtgggtggatcacttgagatcacgagttcgagaccagcctggccaacatggtgaaaccccgtgtctactaaaaatacaaaaactagccaggcgtggtggtgggcacctgtagtcccagctactcaggaggctgaggaaggagaattgcttgaacccaggaggcggaagttgcagtgagccaagacagtgccattgcatcccagcttgggcaacaagagtaaaattccgtctccaaaaacaaaaaacaaaaaatcaaagagaaagtagaatgatggttgtccccagggcctgggggagggaagaatggcaagttagtgtttaacaggtaggtagagaatttcagttttgcaagaggagaagagttctgtggtggatggatggtggtgaaggctgcaaaacaacgtgaatgcacttaacaccacagaactatacacttaaaaattattacaacagtcaattttatgttacatataccttaccacaacttagaaaaaaaaaagattgtcttgtggcttacaaaaagcaagagagtgctcatctcctcttctttcgaacattcttatatctaatagtgcatcaaaacagcttttctcgggttaagacaagagaataattctggggtagtcctcatatggaaggtgctgcataatatagtcaacatctaaaaaattccaagtacaaacatccaaacccaaaatttacagcaaaagagacagatggaattatttcaacaactgtgagaaaggcaagaaataaacagaactattggtatgtttaagtatcaatttaggactctataagctaatttctaaagagacaagaaagtccacggaaaaaaatgattggtccatgtagagtagatttcatatatcagagtcaaggtctcacaaaacaactttactgttttgaaactttaaagaagtgtcaacttgcattaaataaacaaagcaactgccatgtactaaacaaaaatgtcacaaatgacagtcctgtataatgacctggtttcccagtggctcagaaagatggaaaataaaccccaaggaccctagttcagacagactgaagagagcagaccgtggctgtcttgcatgattaaaggctatgtcacagctcagtagggtccatgctttcatagcttcccccccccagcaacccctaatgtgactaggactgggacaagagtgacagtctcacaaaggggataaaaagacataaagcttcttcctcatacatccaaacactccagaatctaaaacttcacttctctgttgtccatctatccaattttcattaagagcaatttatatcatatagaggcttcaaagtcaaatatgccacttttatttttaccttatcaaacctataaaatcaagaccaagggttggtctggatatgaagcttggttaggatcacaataaattttcaaatcaaataattggtttcagttagagccaagtttatcaacaatagggtgatttaggattcaggaaaaatcggctgcctatttgtatttcagaaagactagtatttcttctgacacaagtagagaggtgtaagcaacctctgggtgggtaatgccaccaaacaaaagcaacaccttcaaagtctctcagtgactagaggcagccagacactcaaactgccagtcctgaattacggcctctgaatggtgagggcttcacatttcaccgatcagggcacagcccaatcagaagacaaacccctgcactgccagggaccagcaaatccgctttcttccagtgtgcacatgactaaatgtgcttctgtccatcatctgggtcatatatagttcaatgcgagctgagcagacagggctgcaaggaaatctggcgcggttcaatacctcgtctagcctgggttccagtatctaattttttttttgttttaactgacaaactcatttctctactgggacaggatgctgtgctggctggaagttccatttctacagcaagaatcctatctggaaacacagaagttgtcctct

SEQ ID NO: 42740 - DNA, 2300 bp, Homo sapien
acttaggctctgatggcatctccagggacagagaactcactaccaccagaacctgtgacaaaaaggtagattcctgagaaaggccagatggtcctgactttttttttctttctttttttttttgagacggagttttgctcttgttgcccaggctggagtgcaattgcgccatctcggcttaccgcagtctccgcctcctgggttcaaacgattctcctgccccagcctcctgagtagctgggattactggcatgcgccaccacgcctggctaattttgtatttttagtagagacgggttttctccatattggtcaggctggtctcgaactcctgacttcaggtgatccgcccgcctcagtctcccaaagtgtggggattacaggcatgaaccacggcgcccagcaaggtcctaaagtattttagaacccacagctgagggaatggcaggccgtcctctcttagtcacagggtttagctcctgaaacactgctacctagcagaggggatctagttgtccctcggtggaaggtattaaggaagatgccactgaagaaacatttgaacaggatcttgaaagatgaataggagtttgggagtgggtcaggtgaagtcagccgcgttccagcttgaaggagccaaggattaaggttctggtgtgtgacagaatggagctggaatccccatcacttctggtggacttcatcagtgctggaaagggacaatattgttgctatctcatagagcaggtatgaggtttagacggcagagcgttaatgtaagtctcccagattacgtatgaaatacagtttcaccagggttggtaaggtccagttgcccccaagtgcagagaagcgttgcaactttcgtagcaggtgagggacggggtatggtgcgaaatgtgggcaagggtcaggccaagcagggatgcgaatgccaggacgaggacttaaaattaggcaaaaaaaaaataaaagggctaagggattggtggggcgggtggggcaggagagggcgaatgagcggccaccgaggaagctgcagcataatccggcagagcagaagtgggcaaagcaccaacgttctcgttctttgtcttcaagtgggccaggtaggccttagacccttggcggcagcagcgaaatcctttcccgatggggtcgccgaagacggacaccccggcgggcctagtgaccggtggccgcgcgccacctggtggccgcagcgggtggattcggccgggagccgctgcaaaattcgggattttgcttccggaaagcttcgggaaactgaggtgggaggggcaggggtttgcgatcttccaacttgatcctgtccttattccaacccccttttacagatagggaaactgaggaaaggggaaggcaaacaaggctgggcaagggatccctcttaaacggaaggtttcaagacacctggggtcaagagcctagggctttctttaatagccccaatggcccggagcttagtttgcccatctgttctatgggcagggggaaaatgaaaggggaggaggggaaactttagtctttgccgcccacccggaggtaaaaagtctttaaagactaccccggaaagaagagttttatatattccatttgcatacgaacgcagtcacctcgagttaaactccggtcctttaatctccggtccaatttgtcccgcagcggcagggagaggcccacgtgagtaccttcaagccccgcctccagggccccgcccacagggctgggcttcgttgcacgtgctcacccggctgcctcgcgatccacctcctcgcaaagactcattgttggggtggggggttacgaggactcttagggaactttgatcaggtagaaatcacaatcaagacaaggcccggaagtatccgcttactacatagacatcaaacgctttgtcatggttcttgatattgacagactttagctttcccttctcaggacttcttatccctccttccaccccttcagttggtgcggtcggcgtggccggcctcgctgagcggactccaacttccagcgtgccccgcagggccttgcgcggcagcggcgtgtgacgtcaggggagggagctggccagtgctgagggggcgcggcgcggaggggcgcggagcggcgcggagccgggcggctcggggcccagagagagccgcggccgggagctcgcgggctcctgacaacctcctcccctcggcggacgacgaccacggcgactagggcgccggtcatggcggagcaacaaacccggcgcggaccctaggcaccaccgcatggagcgg

SEQ ID NO: 42741 - DNA, 2300 bp, Homo sapien
atacaaaaaattagctgggcgtggcggcaggcacctgtaatcccagctacttgggaggctgaggcaggagaattgcttgaagccgggaggcggacattgcagtgagccgagattgcgccactgcactccagcccgggcgacagtgcaagactctgtctcaagaaaaaaaaaaaaaaaaagaagcagcagcagcttatttgtactcagtgtgtgctttgcacagggttctttaattcagctgagagttgtagagcaccgtaccttgtgccaggtcagtggttctcaaaccctaagccccctggagccctggagggtgtgttaaaacacagattgctggactccatgcccagagtttctgattttgtgagtctgtagtggggcctaagaatttgcatttctttttcttttttttttctttgagaaggtctcgctctgtcacccaggctggagtacagtgtcacgatcttggctcactacagcctctgcctcctgggttcaagtgatttttgtgcctcagcctcccaagtagctgggactacaggcatgtgccaccacgcccagctaagttttgttttttgggtttgtttgtttgtttttgagacagagtgtcactcttgcccaggctggagtgcagtggtgccatctcggctcactgcaacctctgcctcccgggttcacaagcgattctcctgccccagcctcccgagtagctgggattataggcatgcaccaccacatcagcctaatttttgtatttttagtagaggcgagttttcaccatgttgcccaggctgggagagtttgcatttttaacaagttatccgatgatgcggaggctgagaccaaggaccacactttgagaaccactgagttcaatgttcatggggagaaactaagaatgtgccctaggaagtcatgctccaacacaaggaaacaaacacaccaacaagaaagacagtcccattgagcaataaattctatgaagaaaatgagaccaagcatggtggctcacacttgtaatcccaacactttgagagactagggtggctggattgcttgagcccgggagtttgagagcctgggcaacacagaagaccccatccctaaaataaatacagaaattagccagcatggtggcacatgcctgtagtccaagttattcagaaggctgagggaggaggatagcttgagctggaaagttgacgatacagtgagctgtattcgcaacacagcactccagcctgggtgacaaaggaagacccagtcaaaaaaaaaaaaggaaatgctgggtgcagtggctcatgcctgtaatctcaacactttcggaggccaaggtgggaggattgcttgagcccagaagttcaagaccagtctaggcaacagagtgagaccccgtctctgcaaaaaaaaaaaaaactttaaattagccaggtgtagtggtgcacacctgtagtttcagctactcaggaggctgaggtgggaggatcacttgagctgggaaggtcaaggctgtagtgagctgggatcgcaccactgcactacggcctgggcaacagagtgagaaaaataaaaatttaaaagccggaagctactggagtttgggagccgacaggagggattccagagggaaggagaaatgaaagacggaagacaggttggggttgctgagccttgggaaggcttacagcagtcaggtccctgtccagaagtgggtgaaatcggagagcgcaagggctcacgtgccctgggaacatccgtctctcatgcgaactttacaaacactccaaaaggaaagcacgagtcccccatcttacagatgaggaaactgaggcacacaggtgaagggacacgcccaaggtcccacgactcacaggacaggacctgagtccgtgagaggagcccacgcgcctcgccctggccccgttgctcctgccggctgcgatcgagacccaccctggcgcgcgggcagggatgcccttgggagagccgcccgacgacggggaggccccgcgaacggcgggcggggcggggcggggtgccccctccgccctagctccgcccctggcggcgctggaagacccgcggggctggcagcagggtgcaggcgcggggcgcggggcaggcagagcgggcgaaggcgcggagctcgcagtgcagcccgcgcttcccagcgtccgtgcccggccgcctgtgcctaccgtgcccgtggcgccatggccgctgccgccctcccgccccggccgctgctccttctgccgctagtgctgctgctgagcggccgccccacgcgcgccgacagt

SEQ ID NO: 42742 - DNA, 2300 bp, Homo sapien
accctcggggccaaagccaggttgtgggaaagcagagaagccactgagcctatctttgcttccagcacagcctcccgcccccgtctctgttttagagatcagcttctgctcaaagaaaagctccctggcttaaaacagtttgagaccccctgggaaggtgggagtaaaactgttttggaaacagccagccaggaccaggcaggagcactggcctgtgcaggccctgggaaatgccggagggctcagggtggggctgtgcgtgagggtgggcccgaggaactgcccttcccaagaagccagggaaggctggtttcccaaccagccccttgtgccaatgtctccctgacactctggcattttggccatctggagggagtgttatatcctgatgaggcgtgacagaggagagggagagggggagctgtagggcagagccctgggctgggcaagggaggcccagcagctgctccaggtcctgctgctgacctgttgtgcaaggccctccctctctcggctgccatttccccgtctgaccatgacacaggagccataaagcatgataggaaagagacggtgattcatgatatctcccctgccgaatgttgggaaagagacgtggatttatatgaatttgggttctgctcctggttctaccgttgaacagctgggtggccttgggcaagtcacttgccccctctgaactgcatccatctgtaaaatgagggtgaaagttgtccatacctggtgttagtttgggccaccagaagcaggctctgaagccagagattcatgtgcaagtgatttattttgaaaatattcctgagctgggcgtggtggctcatccctctaatcccagtgctttgggaggctgaggcaggaggatcacttgaggccaaggtgggaagatcattgttcaagaccagctggaataacgtagtaagatcccatctctacaaaacataaaacacttaactaggcaggatggtgcacacctgtagtcctagctactccagaggctgaggtgggaggattgcttgagctcagtagttcgaggctgcagtgagctaggatcatgccactgcactctttcctgggtgacagagtctctgaaaaacaaacaaacaagaaaagaaaatactccccagagaaactggaaatgaagtgggagacgcagggtggggagaagagggtatccaagtgagggtgtggtcttgggaaaagtgccagcctcagtcacatccccagaggatctctggagtggggacaacagctcaattcatccccactggggctagtgagttgggattatagatgtccatgtcactagatcattgcctcaaggcagctgcaagaggacgtatactccctggcactttgggggcgaagcaactctaaagagagtcacagatgcaggcacatggaagccagggacgggcacaaaatctagtaagagggatctcagaagatccggacaaactcctccagtgcccactacacacctcacgaggttgttacaatgattaattggtataactccttaaagcccctagcacagcgcctggcacgtggtaagggctcagaagatggaacctgtggtttttcttgtgattattagcaggctggggctggtgagtgctcagggcccatgccagccactctgaggctctggggttgtggagttctttttaattttaattattattattattcttttttttggaagagagcctcactctgtcacccaggctggagtgcagtggcgtgatctcggctcactgcaacccccaccttctgggttcaagcaattctcctgcctcagcctcccaagtagctgggactacaggcacacaccactgtgcctggctaatttttgtatttttagtagagatggtgtttcaccatgttggccagactggtcttgaacttctgacctcaggtgatccacccgcctgggcctcccaaagtgctgggattacaggcgtgagccacagcgcctggcccaggttctggagttctcaattgcagcagggttccttttaccctctgtgtctggccggccatgtgctgcactctttgcctaaccatcccccttccccgggcagctgcagtccatggtggatctcctggagggcaccctgtacagcatggacttgatgaaggtgcacgcctacgtccacaaggtggcctcccagatgaacacactggaagaggtaagggcggggctgccgccagaggccaggctgctctggtgctgggggccaagggcactgtccgaaggggccccggcaatccaggcttca

SEQ ID NO: 42743 - DNA, 2300 bp, Homo sapien
actgggtaaataaattatggcctttaagcaatggtgtactgtgtggccatgagaaggaacggagcactatatatgcagatatgcatcagttcccaaaataggctgttcagcaaaaaagaaaagtggtaaaaatatgtgtgtatgtatacatgtgttcccgtaaatatacagactctctttagaaggatatacaaggaacctataataactgttggcactgagaaataaaggtgggagggtgactttttatagccgttgatatcttttacatttagtaccatgcacatgtattatctatttttttaattccttcactttttaaatttaaaaagttcataaacacagggtctcttggagcctatttttcctgctcatgctcactgcggccgcccctagcccgttcgggggactgggcagcaaagcctaatgaccaaagctggggtgtccctccaggctaggggttcagaggaagctggcccaggaaagacctccaatcctgccccctccgcagagcatcaaggccaacctgagccgggagaatgaggtggtgaaggacagcgtgcgccacctcagtgagcagttgaggcactatgagaatcactctgccatcatgctgggcatcaagaaggagctgtcccgcctgggcctccagctgctgcagaaggatgccgccgccgcccctgccacccctgccacgggcactggtagcaaggcccaggtgaggccccagctctgatcatggggccggagctggctgaacttgggagctcagtgtgccaggacgttggccctgtggatcagctcgatgggggtttggggctgtaagatggggttgaggactggcacagccagagagtccctggcagggtgaggtgcaggggatacctgctgtacagcaagcacagtcagcacagggaatgggggataggcctggggatcctgccaagggggctggtccctaagccaggtgtttggcatccttctcattcccaagcttgaaactagtagggacaagcttgtggaggtggtgccccctgcctggccctcagagaccaggttggctgcagcaaaaccacttctagcctcccctgctgtggctgggttgagcctgctcagagggaggtgggcaatgcctcagggacccctgcagactgatacccattcatccaacccaccctggggtacagaacccctgcagccaatacccaggcactcgacctccaagctcagagcagagtgagcagaggcactggttctgtcactaggcagagccacccatgacagataacacacctgcgtgcaaatgtgataaacgtcctctctgtaggcagatgaactgtgaagctggttctccctctgagcagatcaattagaaggaacaaccacttttgggtgagccggttgcacagaggctcctgcctttgctgggtatgtggcttggcaaatggagtgcagactggattcaaccccattcaggctcctctggccagtcacccttgggcaagacacaagccacaccattgttcacactggccttgtgttttggtgagtggctgaagaagggagctgacatttgtggaattcctactttaaacttgactttctcacagacattgtcagtgaaccccatagtcacctgggaggaggggcgacccctgcccatttggcagatgaggcatggagagaggtcacatggagaggcggtggcggagctgggactggcagccaggtctgcgtgactgccaagcccaccctcttcctctcttcttctccacatctcggtctcctttgctgacattgtgataatgcggccatttgtgtctgcaactgggactgcctagatgccgataaagcagctaggaagcctgtgccttggcccccagctggcttcctgctcattcccgtgccaattccgcaggcgagaatgaagcgtgttttggcaatggtgcagaaggcacccagctactgtacttgccgtatctgctggagcttctgcctaacgatgagtgatgtcacaggccctgtgttcttgtgccaagccagcatcggaggcatttaaataggaagtgaaaataacaaaacacaaaaagttagaaatggcatatcctagaggttgggtgaccaaccctgtcccagtttgcctgggacttgagggtttttccaggatgcagcactttcagtgctaaaactaggaatgttccaggcactctgggatgagttggtcaccttgcctaggtgcctaagaacctctcccctgcccacgtactaagaccaatgagtaagagagacaaggctgggaa

SEQ ID NO: 42744 - DNA, 2300 bp, Homo sapien
acactggtagaagagtgagcccagcaacaaattgggaaggctaaccactctcagcccacgcaccaagaaaaacctctttaccatgtccccggccagggacggctagcacttggcttcctgcagccaaccctccctatgtccaggcagactcaccttgtagaatttcctgaggttttctttctgagtctggttaataactgtgagaacacgggcaatggatttccggacgactcggctacaaaacagagatgtcagtgaagatagggaagacacatagcactacccaagactcaggactcacacatagggcagcaatagctgcagcctcccccatcaacccatccatattcactcaggaggaaggcgttctgggagtgaggtctgaggagggaagagaggggcatgggagagacagcagaggctttatgaggaagtgcaggctggataaatgaggcagatcagaaaaagaccttcaatcccagaacacgaatttatcctgagggctaagacccaaccaatgccaatttcaatgagctgatgggaaggaatcatgccacaaaccaggcaatcaggctagcttagggaactgcaggagagagaaacaagacatttgcaaagtggagtcactacaagccaggagactgaagcaaacaacgagccagggagaagttatttgtagtcatgtcaggatgagggagtcacctagtagacagctggtcaacatggtttttgaggattcagtgtgcaactgtgcttgtccaatcctcccacccctgcctctactaaggttgtttgggggcaaagagggcaaccaccattttttttttttggagacagggtctcacctgtcaaccagactgaagagcagtggccccatcatagcctcccaactcctgggctcaagtgatcctcctgcctcagcctccagagtagctgggactacaggcctgtaccaccacacccatctaatttttttttgagaagtggactttgtacccaggttgatgaactccaaacccatgttcctttcacaagtctcccgcactcttagccatgtaaaataacttacgctgccactccagggtgcaagccacccacctgccaagggggttaaaaactcaagtgttggtgggaagcggaaggaaggggtccgggtaggctttgaaggcagcattaagatgggtctccggggatgcattccaggcacaaggaccgcaaggtcaaggcaggtaagaggctaagcacacaacgggtctcccatgcgcgccaggatgcacggagtgggcatctaagcggccagctccttaagccaactttgaaatcctccgacgatcccgatgcacacgtgctccccacccacgagggctgtgatccggccgcctcacttacatcttagagagcttggaggccgcaccgcctgtcactttggcgacgcgcagctgggacagctccaccttcaggtcgtccagctgtttcagcagctcctccttcttcttcccgcgaagatctcgagccttgatcttggcctgcgcgcaagagagagtgtgcctcagccaggccgcggggccatatccccttcacctgcgtggccagcccccaaaggcgcgcgactcgccatcgactacgagtgcgccggagccccaaccagggctcaggacagtctccctcgccggccgtgccttgggcagagtaacccaggcccgggccgcgcgcctctcccggcgccaagcgaagaggcgggttgtggtggcgccagaccattctgcgcggcgccccacaggcctaggtggcagatagaatccgcgggctcagcccgcaccgccttccccaacccccgcgcctcacagcgctcggatggcgcccgattccgcagctctcaccattgctgcacaagccgccaacgccgccgcccgctccgagggaaagaggaagtaggcggggctgacctccgcaactactgccgggtggcggcgggcgcggccaatggcgccgcagcgggggagccccggctccgcctcatctcccccgcccccgaggaacgccgtggtactgcccgccccgcctggtagggccggagccccgccttgtagtgctcgcctcattcacggcacccctgatagcgaggtcggcgtcacggtgtaggcgcgcagttggggaaaccgaggcccaacgtgggcggcagctaccagagatggcacacggaggactcaaattcgtccattcagtcattcgttcattcattccttcgggaaaccttgcagatctcccaatctgggcaactctgagctgggcgccagtag

SEQ ID NO: 42745 - DNA, 2300 bp, Homo sapien
tactgggcctggagactagaacaattaattcagttgtccgccaaggttctgtccccagagaacttctaggttggctgtggaaatagacacataaatgcatcattttatttcagcctgtttggggctaaggaaaggattgcacagaggttgctactcataggagatgggagaagtctccttgtgggtggttacagctggtagtaacaagaggacaatctggcttcaaccataactctaagaggtggcatgtctttattaagggcaagggagtggcactggagtgctgattaatgcctactggttggcagacattaatcagaaagcctaaacatgccctgccttgtgaattcccgtttcactttccgggctctactgaagtgttccttcctctgggaacatgaacaccaatgatattttgagccattgttatgcgtcagatttcgggttaacagctttacagatatctcctctaattctcataaatgcctcatttcacatgtgagcaaactgagactcaagaaaggggaagagatttcccaagagtctcaactactaccttggcagcagagcaagaatttgaaacctggtcaggttcactttaaaaaaggctgtactagccgggcgcagtggctcacacctgtaatcccagtattttgggaggctgaggcgggtggatcacttgaggtcaggggtttgagaccagcctggctaaaccttgtctctactaaaaatacaaaaatttagctgggtgtagtggcacacacctgtagtcccagttactggggaggccaaggcaggagaatctcttgaacccgggaggtggaggttgcagtgagccgagatcgcgccactgcactccagcctaggcgacagagccagactccatctcaaaaaatatataaaaaataaaataaaaataaaaaaggctgtatggccaggcgaggtggctaacccctgtaatcctaggcactctgggaggccgaggagggcggattgcttgagcccaggagaccaccctgggcaacagctctacaaaaaataaacaaattagccaggcctggtggcttgtgcctgtagtttcagctactcgggagactgaggtgggagggctgcttgaacccgggaagcggaggttttggtgggcggagagcgcgccatgccttccagccagggtgacagagcgagaccctgtctgaaaaaaaaaattaaaaaataaaaaaaataaataaaggctggggccaggcgtggtggctcacgcctgtaatcccagcactttgggaggccgaggcgaggggatcacctgagctgaggagttcaagatcagcctgggcaacatggcgaaaccccgtctctactaaaaatacaaaaaattagccaggcgtggtggtgcatgcctgtaatcccagctactcagctactcgggaggctggggcaggagaatcgctgaacccgggaggcggaggttgcagtaagccgagatcgcgacactgcactccagcctggcaccctgggcgacagaatgaagctctgtctcaaaaaaaaaaaaaaaaaaaaaggtgtaaatgctctttgcagttccatatactgcctccccagaacctttatggagttggattataactgcctgagcccgcccctcccgtccatctcgcgctttaaattcctccgcgacgtgagcctcggttaatcgtctttgaaaactctggcccctcctcccgtcagcacccccagactactggcgcccagctcagagttgcccagattgggagatctgcaaggtttcccgaaggaatgaatgaacgaatgactgaatggacgaatttgagtcctccgtgtgccatctctggtagctgccgcccacgttgggcctcggtttccccaactgcgcgcctacaccgtgacgccgacctcgctatcaggggtgccgtgaatgaggcgagcactacaaggcggggctccggccctaccaggcggggcgggcagtaccacggcgttcctcgggggcgggggagatgaggcggagccggggctcccccgctgcggcgccattggccgcgcccgccgccacccggcagtagttgcggaggtcagccccgcctacttcctctttccctcggagcgggcggcggcgttggcggcttgtgcagcaatggtgagagctgcggaatcgggcgccatccgagcgctgtgaggcgcgggggttggggaaggcggtgcgggctgagcccgcggattctatctgccacctaggcctgtggggcgccgcgcagaatggtctggcgccaccacaacccgcctct

SEQ ID NO: 42746 - DNA, 2300 bp, Homo sapien
tccagtctctgtctagtgtcacctcctcagggacaccttttttttttttttttttgagatggtatctcactccatcgcccaggctggagtgcaatggtgtgatctcagctcactgcaacctctgcctcctgggttcaagcgattctccccgctcagcttcccgagtagctgggattacaggtgtgcgccatcatgcctagctaattgttgtgtttttgtagagatgggttttcaccatgttggccaggctggtctcgaattcctgacctcaggtgatctgccccctgggcctcccaaagtgctgggattacaggtgtgagccactgcgcccggccaggacacctcctttgatcactttatctaaggcacactcaggcactgcatggtttttttccctctcaacactgtcagccctgacatcgtataatatggatttttaaattgtgtctccctggctggaatgaaagtccatgaccatgagctgggacattattccatttactagtttctttgggggctgtttctttacttgtaaaatgggcatttctgggttcaagttccttctgaccaggatgttctggggatatgaatttctgctgtctcgtggcagacctgaatcacaaatattttttcccagatatggaactgtattgcaggtgggctttgcatgtttccaggacccctgagacttttcttttcttttcttttttttttttttttttgagacggagttttgctcttgtcgctcaggctggagcgtaatggcgcgatctcagctcagtgcaacctctacctaccggtttcaagcgattctcctgcctcagcctcccgagtagctgggattacaggcatgcgccagcacgcccggctaattttgtatttctagtagacacggggtttcagcattttggtcaggctggtctcaaacttctgacctcaggtgatccgcccacctcggctcccaaagtgctgaggattacaggcagagacttcttcaccactagtttcccactatgggagtctgtatccttaccaccgaagataaggttgcatcatagtctggcaatattttttttatctttagacacagttcaatgagaggtattcgaagcagcaaaaatgaatcacattccaactactgacttttattaaaaagagtactattagatgaaaatagttttcacactattatataaaaagacccattttacttaccctaaggctaagatcaattaacagaacccctgggataacagcccaggcaccaaatctggcacctcagagtcgtccttgacttccctaaaccgctttcccccatctcagattctgagaatttggtttctgtcaagatgtgcctctccagccaggcctctcctgccaggacggtggccacagggccatctccctctcctggcgcccccaactgcctggccaaggtgactgctacacacgtggggtcgcagaatccctcgagtcacaacgtcttcaacgtcttgtcagtcccgtgatcgcactaaacgtatttaaagccccctactcctttaagagggtcacctctgtgtacaggcggcctcctcgtactaagtgtggtggcgttcaaggctccgagacacaggcgcctcccgcgccactccccgggcacaggaactcctactcatccctcagtcatcagctcgaaggtttcttctccaagaagcctgcccggcactcgagaagtagagccgcgagccttctcccgggggcccagccttccccagtaccggcagggatcaccccgggagcacgcgcccggccccgctgaggccaggggctcctcggaggcgcgggaaagccggggaaccagcgcagttacggcacacacgaggcggggcctgcacagatgccgggcgcccgatcctcagtgacaaaatagagactccgtggaagggacactgaggtgggggaggctgcggtgatcccataccgcactccaggtgccaggctccgccccgcccctgacggcgcttccggatccggcgggtgccggaagtgggcgggcggcggcggctgcgcgcggaggcggtggaggaggtgctgggagcagccgggcagccgcttcccgcccccgagcaggagccggtgcgagcggagcagagccgaggtcgggccgcgagcggagccggctgagcgggcgccgagctcccgccatggcccggaacacgctgtcctcgcgcttccgccgggtggacatcgacgaatttgacgagaacaaatttgtggacgagcaggaggaggcggcggcggcggcggcggagccaggc

SEQ ID NO: 42747 - DNA, 2300 bp, Homo sapien
cactttatctaaggcacactcaggcactgcatggtttttttccctctcaacactgtcagccctgacatcgtataatatggatttttaaattgtgtctccctggctggaatgaaagtccatgaccatgagctgggacattattccatttactagtttctttgggggctgtttctttacttgtaaaatgggcatttctgggttcaagttccttctgaccaggatgttctggggatatgaatttctgctgtctcgtggcagacctgaatcacaaatattttttcccagatatggaactgtattgcaggtgggctttgcatgtttccaggacccctgagacttttcttttcttttcttttttttttttttttttgagacggagttttgctcttgtcgctcaggctggagcgtaatggcgcgatctcagctcagtgcaacctctacctaccggtttcaagcgattctcctgcctcagcctcccgagtagctgggattacaggcatgcgccagcacgcccggctaattttgtatttctagtagacacggggtttcagcattttggtcaggctggtctcaaacttctgacctcaggtgatccgcccacctcggctcccaaagtgctgaggattacaggcagagacttcttcaccactagtttcccactatgggagtctgtatccttaccaccgaagataaggttgcatcatagtctggcaatattttttttatctttagacacagttcaatgagaggtattcgaagcagcaaaaatgaatcacattccaactactgacttttattaaaaagagtactattagatgaaaatagttttcacactattatataaaaagacccattttacttaccctaaggctaagatcaattaacagaacccctgggataacagcccaggcaccaaatctggcacctcagagtcgtccttgacttccctaaaccgctttcccccatctcagattctgagaatttggtttctgtcaagatgtgcctctccagccaggcctctcctgccaggacggtggccacagggccatctccctctcctggcgcccccaactgcctggccaaggtgactgctacacacgtggggtcgcagaatccctcgagtcacaacgtcttcaacgtcttgtcagtcccgtgatcgcactaaacgtatttaaagccccctactcctttaagagggtcacctctgtgtacaggcggcctcctcgtactaagtgtggtggcgttcaaggctccgagacacaggcgcctcccgcgccactccccgggcacaggaactcctactcatccctcagtcatcagctcgaaggtttcttctccaagaagcctgcccggcactcgagaagtagagccgcgagccttctcccgggggcccagccttccccagtaccggcagggatcaccccgggagcacgcgcccggccccgctgaggccaggggctcctcggaggcgcgggaaagccggggaaccagcgcagttacggcacacacgaggcggggcctgcacagatgccgggcgcccgatcctcagtgacaaaatagagactccgtggaagggacactgaggtgggggaggctgcggtgatcccataccgcactccaggtgccaggctccgccccgcccctgacggcgcttccggatccggcgggtgccggaagtgggcgggcggcggcggctgcgcgcggaggcggtggaggaggtgctgggagcagccgggcagccgcttcccgcccccgagcaggagccggtgcgagcggagcagagccgaggtcgggccgcgagcggagccggctgagcgggcgccgagctcccgccatggcccggaacacgctgtcctcgcgcttccgccgggtggacatcgacgaatttgacgagaacaaatttgtggacgagcaggaggaggcggcggcggcggcggcggagccaggcccggacccgagcgaggtggacgggctcctgcggcaatatccttccctgacgcggcgtccgggcctgcgcgcggccttctcaccttcccaccttcccaccttctcgggccctttcgggcgggcctcccctgtctccgacccttggccccctcaggtcagcctccagctccctgccgacccggcttccctgggccgtgctcccttgagtcccagtctccctgggtccctcgtccccagccctggcgccttcttctgcagcgccgtcccgcaggcccctggacccggtggacgggctccctcggcacccccgcaggtcccgcgccctcttccctccttgcctcctcgtcccctca

SEQ ID NO: 42748 - DNA, 2300 bp, Homo sapien
ggaaagtggggcctgctgctttagggggagcccggcagtgctcctgagtgtgcctttaaaccgaaaaccttcagacttgatttgaacaggaatgtgttttccgaagtggagattcaagcttgtaattcctgccccatcaggatctcccaatccaccctccttatgaaatggggtcaagggaagggtccccaggagggaaggttggttgtagtctggtgtagggcctagttcatggacagtcagtgctgaaaggggctccagggtcaggcctttggcccaggactctcattgaacagatgagatcaagcctgtcagctgctgccttggtctgggtgcagaaccttgttgaaggtcatgtcttgggactcccctgcctggtgacaggttccttgaggctgcttagaggcctgggcttagcacatccaggggatggtcgtttctccattcatggcagcgtcagaagcgtcagaaaccttgttaccatggagagtgctccacttggggttggggaaagggaggttaacggataaaggtaactgaaaccctggcaaatacggggcccaggtggaggagaatggaactgatatttattgagtctctatcatgtaccaagaatcggacttatattagaccattgaggacaggggagcagggagagggatagatggattggggttggggagggcagagaggggccctgtcctggggctgtatagggaagtgtgtgtggcaggagatgacacagatggagtagaaggaacccggctgtgcatctgcgcacaccctgcactaccatgctctggctctgtgacctcggataggtcgcataccctttcacaactcagcatcttctgttacgtggcggacagccatgctggcttcctagattccgtgggagcctcatgggctaacatcagcatcactgggcacacagcaagtgtcctggacatgcagctcgggtctgcagatagagcggcagcatgggattgtgggaggagcttgggtgtgagggccgtgtagacagcttagttttgtgaccttgcgcaggtaatttctgttctctgagcctcaattccattgcctttaaaatgagataatgattattgtcacaaggatttttggaatgagatggcgtgtgaaagcacctggcacaggatccgagaccttgtggcgatttaaaagtatgagttcctttccccttcagtgaagcagcttctatacttctggatcagggctctgtccagagcagtggttgtgagcgattttgcacccttcccctccacccccaggaaactggagacattttgatggttacagcttggggatgccactggaatccagtgggcagaggcctatgacacacagctaagatcccacgtcagagaatcctgggtccacagtgtcagttgtgccgtgattgaggaagatctagaggagatcaagggctgggcaggattccctcagcaccacagcctgttctctgaaaaggcctaaagccagccaagtatgacagccggcttcacaaatgataggtgacttcagggaggtcctccctgcgccccacatctcccaactgctgaaggccctcacccatcaatgggccgagtgattgctggacgcgtggtgctgagttaacgccacagcagtagctttttgcccccgtggactagttttatacctgcccttccccatccatcatttgaatgatgtcatttgttagttgtgccaggtttacatgaagagcaagtgagcctatgttttctgttcagcctatgggatcctgcttattgctttggggacaccacattagaaaagagttacaagggctgggcgcggtggctcacacctgtaatcccagcactttggggaggccgaggcggacagatcacgaggtcaggagatcgagaccatcctggctaacacagtgaaaccccgcctctactaaaaatacaaaaaaaattagctgggcgtgctggcgggcgcctgtcgtcccagctactcaggaggctgaggcaggagaatggcatgaacctgggaggcggagcttgcagtgaggcaatattgcgccactgcactccagcctgggcgacagagcgagactccgtctcaaaaaaaaaaaggagttacaaagtagaggttatcagtggctgatatcaggctggccttgtttggatggggaaaaggaactccagaactgaaagacagagggactggactgcctcttgagtgtggaaggtggatcagagccaagcagggagctggggaaccagcgctgggagtggcttgcctggtggcgcaga

SEQ ID NO: 42749 - DNA, 2300 bp, Homo sapien
ttgacttgaacatttgtggtattgtaaaagtcttgtcagttgtgttctaaattgcttaagccatacgttctcttaaacaggatgtttttttcttcctttccagcagcctttttcttctttgtctgttatggttaatactccatagattttagaaattgagaagttcttgaaacattttattttcttgagttcatcacttttgactcttgtatgagatgtgatttgtcataaaagatagccttccactacttcactaaatgaatttcagagtaaacactgtgattctgcagagcggattcagtaggctttccaatgttttctcctgctatacagtgcctaccaccttgagggcacttcagtactagaggatgaaaactgaaacgttgttttgatgtttattgaataacgagattagagaatatttgatttttgttgtcagtgtattaaagaaattttcacattgataaatgttctctaggaatgtgtctacattcatcaggtgtgaactcttgtacatgaattttgtaccttgaatccacatatatattaagtgtatcatcaatataaaaataaacattatttgcttaaagtttttggtactttttcggtattgacagctgaactgttagggtttgcttcattcaaatatctcagaggctttgaactatcttggggttgatgcttcttgttagtttgtcaatgtttgaatcctggttttggttttttccctgccctgctcctgcaggtcagaactggaacacgcgagggaagggactgttgaagaattgggtggaatctgcttattcttgggcttgtgttgagtctggggatggaaccagagttccttaaggtggaatggctggcttggcattgacgagttcagggacctgacttagggtactgatttggaccgtgactttttgtttgagatagagtttcgctcttgttgcccaggctggagtgcaatggcgcgatcttgactcactgcaacctacacctcccgggttcaagcgattatcctgcctcagcctcccaagtaattgggattacaggcatgggccaccatgcccggctaattttgtatttttagtagagacgaggtttcgctatgttaggctggtctgaactcctgacctcgggtgaaccacccgcctcggcttctcaaagtgtggggattacaggagtgagccaccgcgcccggcctggactgtgacttggaacaagatagtttttcctcttttgtttattttcctactgcctgcatgattgctatttatttaaagagacggagtctcgccacggtgcccaggctggtctggaagccctggtctcaagagatcctcccacctcggtcttccgagtagctgggaccacagaagcgcgcgccgtgcacttttgatgttttcaacttccttcctaagcagaaaggagacggcccagcagcggatggtgaagctaatccaatatagtgagctgccaccagcgtttttaagtgcattacatagtaagaacgtggttctgctggacgttatgtactcggttgcgatataaaacgcatcatctacagtaggtgacaggcgccaaagtctaaaaactggtctcaaggtgtaaggtcccaggactagtttctggagctactggcttgtgagtgaagctggaggcgcagacttcccgggtcacacggtggcaaggcagctgcctagggtgcggcgggaccgggcggcgcgggggggcgcctggccaagcagtgcagccccggccgggtttgtagccagcacagcacagcggggcctgtggcaccgactgggttcttttacttttgacacgaagcccctcccacttaccacgctctgcacgcgcccctgttaaaatagaaaaagaccgagaggcctcggagactcagtcatcatctgtggctctggccgctcgctgacgtggcgaactgggctgagggagcgcccggctgggcacccgagaactccagccgttccggcccagtcgccgctcagaggtggtaacagtagccgccaaggccgcgcacgggcgcatgcgcgcgtcggaccaaccccctccccccaccgcgcagtcacttccggcgcgctgggagacgtgcggttccgggtcgctgctcggctcgccggctgggcggtgggggttggtgacgcgggccggggctcacgagaggcccgggaggcggggctttgctggcttcccagagagaggcaggtgcgcgggccaggactccgggaatgcgagcaggccccttattctcccagtggcctcggtctgtccccacagcg

SEQ ID NO: 42750 - DNA, 2300 bp, Homo sapien
gtggttccctcccctccaacttctggctactgccctttatttcctttgtgcaatagaattccctgaaacagattatgtcgtaattatactgatttagtcaggataatgggaaaagcgacaaatcggatttatgtattaggtattatggagctttctttagcactctcctccaagtttaatctctgacatgtgtgatatagtaactttctgtctctgagaagcagtttggacccagctgaaaaattttatttatggagacttgtaatcagcctgatatacagagaacactctggactggaaatatagtcaggtaccaaggtctgctaatttggccattgccagtgattcaaaaccacctccccaccctgagtaaaagatttgatatgaatatgaatgctatgagtctcctggtgatgttttgggtgtatatgttcctgtgtgtgtttggaaatcatagagggtatttaccttgagggctcttttgttgaccttatttatttgaaattcttattttatttgtaatggcatatgtatatttttgtgatgctacatgcaatctctgtgtatactttttgtatatatgtatacatatttgtaaatatattggtatgcagtgatacagtatgtgtatattatgtacccatacccattgtgggctgaatttatttaagttctgtgaggacatcctagtggcattgttcatgctgctgtaattaggttgtggctgtatctcattcataagcctctattttgagaggcttgtgtttggataaaatgggctaatttggagttgaaattaggatatgaagatcttaacagaaagctagatatttattcttagctttaaaatcacctgcaaatttttatttaaactgatgataaattagtgatataacctgaaaaacctaagtatgtgaaactgagacaccagcagattcttaggctgtagtagtcctttattttcttgatccatatttaagtattattactgagtagtaaattatgtatattggggcttaatagagaggctgtggaaaaaaattgctttaatcacatttaaaaacataggaaaatgtccattaaataggggaaatatattcccagttgtcatttttatgcctcatactgaattttgattttggaacaattcttttttcatcagtgttttatgtgtctctatgaggcagaaaagggggcattagctaagggatggcctaacctaagtaggataggatttagtgaggaacgggaggttgttaatttgtatatttgcagcagctatgattaatttagtcctgtcttggcatttccggctacagattttttcttactggacttgcatatcaaaggtgagtaggctcatctgagaaaatgcttccactgaataaaatgccttcactcgtattgctgtgtctctatgagaccacttgtgttctgcaagttgatgatatattcgcacatgaagtagagtttttaatattagatgcatggtgtgctataaaaatctgggccttcaaacctctcccaaggatgatagggttggggaggataagaggatagtaaatacgtgcaatgccaatttgtgaacctatagaatgttgccaagtatcaatgtttggttacttcagttgacatatttatttgcatgaaagagtgtaggagatgtttaatatacacttaaatacattcactgcagaaattaagtagaggttatttttgcatgataaaatataactgcaaagcaactttttacaccgtattctttggaagattaaatctatctgatccaatattatcttaaaatagagaaattatctcaggagtctgttttaccacccaaaaaaatgttacatttgctgattcattatattttaaataaaacagccaactattcataagacttttcaattatagtattaaattcagaaataattataacagcatttttcttgaataaatattaaaatttggtaatttattatttctgaaaaatcagtgaaaacatccataggatctgatggtttgttgtttgaataaccaaatcattgtttttgcactggagagtagtagagcagatattataccatttaaaattcatggaactgactcaggctccttgtggatattaatttgaggacagtagtggtaatcaaaagtacagtagaaaacacttgacattgtgaatgtgacctctgaccccaaccgttgtaaagccaataactttgagggtgaataaggtaacacttgcttagaaaacccagccctttcccccagtctcctgcgctcttatacattgatac

SEQ ID NO: 42751 - DNA, 2300 bp, Homo sapien
gtatggcatgatcacttatatgtggaatctgaaaaagttgcactcagaagcagagtgcaacggtagttctgaggagctgaggattggggaaaatagggagatgttggttaaagggtgcagcctctcagttgtaagataaatatcatttaaagtacagcatggtggtgataattaaaaatactatattggctgggtgcagtggctcaggcctgtaatgtcagcactttgggaggccgaagtgggcggatcacttgaggtcaggagttcgaaaacagcctggcaacatggtgaaatcccatctctactaaaaatacaaaaaattagccgggtgtggtggcatgtgcctgtaatcccagctacttgggaggctgaggcaggagaattgcctgaacgtgggaggcggaggttgcagtgagccgagatcataccactgcactccagtctgtgtgacagagcgagactccatctcaaaataaataaataaaaaaaaataaatgaaaatactgtattgttggaccgagcatggtggctcattcccgtaatctcagcactttgggaggctgagatgggaagattgcttgagttcaggagttcaagaccagccttggcaacataagaggatcttgtctctactaaaaatgtaaaaaatgagccaggcgttgaggtgcacgcccatggtcccagctacttgggagactgaggcaggagtatcacttgagcctgggagatcgaggctgcagttagctatgatcttgccactgtactccagtcttggtgacaaagtgagaccccatctcaaacaacaacaataacaaaaattgttgtttactcgaaattttctgaaagagtaaagcttatgtgtcctctctgcccactgcccccagcaccacccccccacccccgccccaccgcccacacacacgaagggtaacggtgtgggaatggaggtgttgattaatttgatcgtggtaatcactatacatgtatgcattaacaagtcatcacattgtataccttgaatatatacaatttttatttgtcaataaaagaaaaacttttatttgaaatataatgaagtttgatgatattgctcagtgaaacattcataaatttacatttacattagtatctatccacatatgcacatcgtgtactcagtcatcggaaagagcacgcacaccaagattctgaccttacgcattggctctcacatgcatgttactggatttccgcctttgggttcagtagctcttctgtgggccagtcaaactgcatgtttaacaagcccttgatgcaaatgtttagaggaaacatatggtaaaaagtagctgggcacagtgactcatgcccataatcctagcactttgggaagctgaggtgggcagattgcttgagctcaggagttcgagaccagcctgggcaatatggagaaaccccatctctactaaaaagagaaaaattagctggttgtgttggtacatgtctgcagtcccagctactcaaggaggctgaggtgggaggatcacctgagcccgggacatggaggttgctgtgagctgcgattgcacaacaccactgtactccagcctgggccacggagcaagacggtgtctttaaaaaaaaaaatagtgatagtaaaaagattttcctacttactacctgcagtattaagatgtagcctgaaatattaaaaatctttaaaatagaaattttgaagactcattgaaatacaaatctggttttgttattacatcttgtttccagatgttcttacaaggagcttttaaatatgaaacaggtatctgtttgccagcttctgaggttttcatgctgtgtgtttagtcatctttaaatacacagacttcactttagcttagatattcttgaataacaattgtctctgaacttttttttttttctccaaatagaactatcttggctatcctagtaaatacaggctttttttcccctttgcttaactagtctttgtttttctctcagtgctatgatgcaaaggagatatgagcagaccaaactgaagaataagatttctgagatgtggctgacacagtttaacagttcttcgttgttgttttcccagccttcatcccggggatctctatcctttcaccaggaagccactgttcatcattgtggattcgtctaatagtgttgcgtataaggtgagttccatgagagctattgcacaggtagacattgtggcaccaacccaagggtacccactcttaatgtgtgcctttttattttgctttattttatttaattttacacagtttgta

SEQ ID NO: 42752 - DNA, 2300 bp, Homo sapien
tgagatactgggagttagaggttgaatgtacgagttttgggaataacaattcagcccataacccttggttttattgaaatgttaccagtgggttttgctttattatctgtttgttctgcctgtgttgggaaggtatctgaatagattcaatactatgctgtcaccatttccccagaatctagaaaattagctatttaaatgctatgctaaaatattaaacaataaaatagatgaatatattctattataatataatatattctatcaaagtccatataaccaggtcttatatgttagctccctctaagatcttgtcaggtcttactagaaacatagagcatcttcccctttaaagttgctggtagaagctggatcgggaattggttaggggagaggtagttgtagttagtttttttttttttttaaatttcagtagttttttggggaacaggtgtgtttggttacatgaataagttctttagtagtgatttatgagattttgatgcacccatcacccaagcaatatacactgtacccaatgtgtagtcttgttcctcacgcccctcctaccctatcgtgagagtcccaaaagtccatgtgtcattcttatgtctttgtatcctcatactttagcttccacctatgactgagaacacatgatgtttggttttccattcgtgagttacttaacttagaataatggtctccaattccttccaggttgctgcaaatgccattatttcattccttttatggcctatctcatatatatatacacacacacacatatatatatgtgtgtgtgtgtgtgtatatatatatgagataggccataaaaggaatgaaatatatatatgtgtgtgtgtatatatgtgtatatatatgtatatatatgtgtgtgtgcatatatatatatatatatatatatatatctcacaatttctttattcacttgttgattgatgggcacttgggctggttccatatttttgcaattgcaaattgtgccattataaccatgtgtgtgcaggtatcttttttatataaatgacttcttttcctctgggtagatacccagtagtgggattgctggatcaaatggtagttttacttttagtcatttaaggaatctccacactgttttccatagtggttgtactagtttacattcccaccagcagtgtaaaagtgttcacttttaaccacattcaatagtggttagtttttaagattcttcaggaggggtatagagagaaaattaaaaagatatgttaagaaccctgaagaattcattaaatcctcaaaacaatgtcattagtgtctattattttggttctacagatgagaaaaacaaagctttgccagttaaagtcatagcctatgttaatgtgatagattataatttgagaagtgctacttccgagaagtttttcctcaatttaggagtaaggattccaaacacagacgaatgtttgactctaagaatagaggcaggccaggcacagcgactcatgcctgtaattccagcactttgggaggccaaggccagaggattgcctgagctcaggaatttaagaccagcctgggcaacaaagtgagaccccgtctacaaaataaaaaatatagctgggtgtggtagtgcatgcctgtagtccagctgctcaagaggttgaggtgagaggattgcttgaagccaggagttcaagaccagcctgagcaacacagtgagacctcatctctatagaaaattttaaaaattagctggccagatgcagtggctcatgcctataatcccagcactttgggaggctgaggtaggcagatcacttgaggccaggagtttgagatcatcctggccaacatggcgaaaccccatctctactaaaaacacaaaaattagccaggcatggtggtgcatgtctaaaaatgtcacaggatccttagggtgttatttttccagccagaaacctctgtggctagtggcacctttgcccgagttttgcttgggctcactgggcttgttcccgctactcagcctggcaggttgtgcttgacttatgctactggctcagatcccacacctgccaagggtaggccaggtatggagcagcgaggggtgtgttagcgaatgggcatggggtctggccactgtgcacagccaagcaagctagctgccgtggtggggcaggcatctccaggcactggcgccatgcaaggttgcagctggattagatgtgcctcaagcagcttccactgcaggcacccacatctggacgaggggaacatggtggtggtgccca

SEQ ID NO: 42753 - DNA, 2300 bp, Homo sapien
cctagagggcacaccagagtatttctttagcgctctattttaagcaatattggttattgtagttgtgtgaccctgaacagattgaattttctgaatcttaagtttctgtgtctaaaataagagaatatcaggcagggttaatctcactattaaaaatagcacacacaaagcacccagtatctggtccaaagctgccttttattaagggctcatactcataggccatttgttcaaattcattgtagttgggaagaataatccaaggcaatgtataattgctaacatagtgtagattttgtaagtacaacacatctggacaaggaaatgtttgatgtaggatggagtaattggggaagataaagaggaagtgtgaattaagtgtggactggaatgatgggatttgtatgtcttacagagttaaaataagcagagatcacttggacacaatgtgaagactcgaggatcctttttgggaaggcgtaagaaatgaataggtcctgttttattgacaatatctgccatatatcagtgaggattggtcaattatggaagatgctaaaaagcaggcaatggatttttaataaggaatataataaatgtatttcaagattacttccctagtgagttgatgatcccccttcgtctgacacaaattattctcgagttctttcctctctctggcttgataatatgggtggaaactgttagttgagattgaggtgatttgtggttctgtgactttaggattacgtgaaatactaatttgggggaccaacagagatttgacattttttcaaagcaatttttcaattcctactacaatttaccgtcagtattacttcataaatggaaagtcattttaccattaaagatgtaggtaggaccatctcagaagaaaagacaactctttacaccaaatacatttggttttgtgaaaaactagtatcctaatttttgccgcttatggagatcaatgagagattttccccaccccaatgttgacatgtactactcgacgctgtcatattattgaggcataaaagatgttctaataaaatggaagtgacttaagagaaagttttatgcctcctcccaactctgaacagatgctgagaatataccaaacaagttcacacaggagtagagatttagagaggccttcccaccttcaagaattttataatacgttaatgagctgagtcttattttcaaggatggctttgttaaagcagaagaagggtaactatgcttatgaaaggcagttttgcatgcctgtttgtcaaaaaatacagtacaatttattttaaaattgattaattggtgtagaacttgcaatggtcacacaatcaggatggtcagcttccattcagggatcaaatttgtccaggcctttcaaaatggaacacgttgcttttagtatggcattggttctgtttgtagtgctgatttttctttcatggtaattaaaaaaaaatcttactttcttaaaagcctgcacccaagctagtgagcttttctgcagaggattgagcatccaaaccatgctttattttggtggattcttagagttttctggctgggtcctttttgaggggtagctgtgagctgtgagacaatttcagcaagatgtagggacaaggatcgcattcgaggtggcttaaaaggaaacacgtttgtgagagttgcctcactgtctcacctgctagaagaaattgggagatttcagggcttgttttcggtcctggcgtggtgcagaggtggaggggcgccagcaggtgtgtggtatgcaggacgcagagccaggagaacctggggcaggtgtctggagccgggggtgcagttcctacttttagacgcatggtggcgctagggtctcctccggccctgctagcaatctctaaggcacctccgccgccacctgcagtctcaaccaaacctctgggtgggcagcgcgggatgtgacgggccgagcgtccaatcgactgacagatttccgtccacactactgctctagccaatgggagccgaggagaggcgcggaggaggcgggccccgcggcaagcctggcagaggcgcgaggccctcctcccgcctctccgcctactccagcctccgccgcctcagcttcccgagcgagccctgcggccgccggagcagctcccgcggcggagcaggagccggatggtcagaggagcccggcagccccagcagccgcggagtcgcctggcccccaggtgcgggggctgggtggaggccggggttggggatggggtgggggccagggagcgggcccaggggca

SEQ ID NO: 42754 - DNA, 2300 bp, Homo sapien
gtggcacgacctcagctccctgtaacccccacctcaaagcaattttcatgcctcagactccggagtagctgggattacaggcatgtgctacaatgcccagctaatttttgtatttttagtagagatcaggtttcaccatgttggccaggatggtcttgaattcctagcctcaagatatctgctcaccttggcttcactactgggattacaagtttgagccactgcacccggcctcaacaaaaacaaaaattttaattacctcaccctatgcatctcttcatttgtatcctttgtaatatcctttatattaataataaaccagtaaatgtaaataaataaataaatactgtttgtctcttcccagcagattgtaagcctgattagggcagggatcatatctgttttattcacatcataagcactgtgtaacctctggtttcttttctctttgagatggagtttcactctgtggcccaggctggagtacagtggcgccatctcagctcactgcaacctctgcctcaagcaattcaagtgatcctcctgcctcagcctccccagtattttgtatttttagtagagatggggtttcggcatgttggccaggctggtcttgaactcctgacgtcaggtgatctgcctgccttggcctcccaaagtgctgagattacaggcattagccaccgcggcctggccaataggcactatgtaactattagtttaatgaatgaagaaatgaatgcttgtgggcatcattcattctgcaacaaacttctaaaaattaattttactttgaaacaatttcatactttcagaggagttacaagaataatacaaagaagttcacccagatatctcattcagggttagccaattgtccacaaaatatactttagagagcaagaggattaattccagggtctcttgagcaacaaatatttattgagcgcctgctactattggattacataacagtctcttaactggtctcttagctataggcattgcacccccacccctagtcccatacagcagctccttttactaatttatttttgaggaggatctcgctctgtcgcccaagctggagtgcagtgccgcgatctcagctcactgcaacctccgcctcccaactcaagcggttctcctgcctcagcctccagagtagctgggaccacaagcacgcactaccgcgccaggctaattttggtactttttgtagctacagatagaatagagatctttgtctattttgttcacgaagtactgcaagcgccttgagctgtacctggcacatctttgttgctcagcaaagagtggttggataaacgaacgctgaaggtatgctagtaccaggtactgttctcggtgctggagttacagcaaaaaactccctgccctcgtgggattctcactggaagcatgcttaagcttaagccatttttcaatcttgaccccaccattttgttccctgtgagatttggggtgaactgcagtttcctagcctcactttcctatcaatcgttacgaagattaaaaggaaaaatatcatttgtatcgcatttagcatcagaaatgctttaataatattcgtttcccttcctttcaggctggaagactggggcctgacatctctgccacaggcttaggcgaggttttcacagggacttggaaaggtgcaaacggttactacggccaggcttacccaattgttaagtgaagatattctggagagtgcttaaaagggttggaaaaacaaaccagtgagtggctaggaccacctactccgctgttttgcctcggaaaagcctcgccggctgccgggaggtgaaagtctggaggaacgggaggaaaagagaggggtggctgtccacaacagaaaactacacatcccagcacccccgcggcagacgactacgggtcccagcaggtttcgcggggtggaccgaagcgggctctcttggggcctgcagtcggggttcagccagagggggcgccgggcgtaccgacgtagcggggagaaacgggtcgcgctttaacggcgctgcgcaggcgccactcacgggccggacgtgacgcagggaaagttccggcttcggcctccgccgctgccgccgccgctgctacagccgccgccgccgctgttgccgcggcttgttattcttaaaatggcgccgctagacctggacaagtatgtggaaatagcgcggctgtgcaagtacctgccagagaacgacctgaaggtgagccctatttgcgggctcgccccttccggctgtggggcgcccgccggccggccc

SEQ ID NO: 42755 - DNA, 2300 bp, Homo sapien
tgagtagctgggattacaggcaaacgcctggctgatttttttttagacagagtcttgctctgttgcccaagctggagtgcagtggcatgatcttggctcaccacaacctctgcctcccgattcaagcaattctcctgcctcagcctcccgagtagctgggactataggtgcgcatcaccgtgcctggctaatttttgtatttttagtagagatggggtttcactatgttggccaggctggtcttgaactcctgacctcgtgatctgccctccttggcctcccatagtgctgggattacaggcatgagccaccacacccagcctggagcttggattttaacccaagtatgtttgatctcttcccactaagctaccatagctctatactccaggagctcctgtttctaacctgagctgttttctctattttctaggacacagcgacagtttcagagactggagttctttgaaacagacataagagagcaagccacctctctattttcaggaaagacacagagaacctatggttatgaactaaaacaaagataatgtagattctgaatatgtctagagacattgttcatttatagtcaggaatagctttacccttgacagagaactctgtgccagctgctgggtgctgagcacttttatttacattatgtcatgtattccccaccacaactactacatacatctctcttttttttttttttttcttgagacggagtctggctctgtcacccaggctggagtgcagtggcactatctcggctcactgcaacctccgcctcccagattcaagcaattttcctgcctcagcctcctgagtagcagggattacaggcgcccaccaccacgcctagctaatttttgtgtttttagttgggggggggggcgggggcgttcaccatgtaggccaggctggtctcgaactcctgacctcgtgatccgcccgcctcggcctcccaaagtgctggacttataggcgtgagccaccgcgcccagcctatgatagaaatcttattagctccatggttacaaacagacaaccctgaggcctggaggaaagtaacttcagaacagatactctcctggctgaactttatatttattgcactcttggcagtcgtccctagttgtctttttctttgatctctctctagttaagacttgctcctggaggcaaagcgtggtggtgtctggctcagcatagcacctgccataattacaaatggcaattatggaatgaatcagctgtttaaagcaccaaatcttgagctggcccgaagactgcgcaggaggattgcatgctcaactctcccctttagaaactgttaacaatcgttgtggccgggcgcggtggctcacgcctgtaatcccagcactttgggaggccgaggcgggtggatcatgaggtcaggagatcgagaccatcctggctaacaaggtgaaaccccgtctctactaaaaatacaaaaaaaattagccgggcgcggtggcgggcgcctgtagtcccagctactcgggaggctgaggcaggagaatggcgtgaacccgggaagcggagcttgcagtgagccgagattgcgccactgcagtccgcagtcccgcctgggcgacagagcgagactccgtctcaaaaaaaaaaaaaaaaaacaatcgttgtaactggaaatgtaactgttataccctcccccccttttatttatttatttttttgagagggagtttttgcgctgttgcccaagctggagtgtggtggcgcccagccctgttagccccttacagagtagatcagctgccgcaggcatctgagttccccaaacggacgcccgaacccggcattgcgcaaatcgtttccaagtagccccggcttatttatcccgtccgggagggagggacccagggaaggcccaccccacttggttcccgagaaatgcagagcctggcgtccactcccggtctgggggacccctccaccgccagcccaggaagtcagcgccgggccctcggggcggagcagggaagagggagcggttggcccggacgctcttccgggtcctgggaggagggcccggacctaagccccgcccctccggggtggagtcacggctcgcgactggcctaagtcgccgcaggtattgcagtccggggctggagggtaggggcgagggtccccggataccgggtctatcacggtctcgggcagggagtctgaatcttttaggggagtgggcccaagccgggtgcaaagaacggggaagggccttccctggctccgtcccggccactttg

SEQ ID NO: 42756 - DNA, 2300 bp, Homo sapien
gcgcgggccgaggaggaggacaagaaggaggacgtgggcacggtggtcggcatcgacctggggaccacctactcctggtaagtggggttgcggatgcagggggacggggcgtggccgcctggcctggcgtgagaagtgcggtgctgatgtccctctgtcgggtttttctgccagcgtcggcgtgttcaagaacggccgcgtggagatcatcgccaacgatcagggcaaccgcatcacgccgtcctatgtcgccttcactcctgaaggggaacgtctgattggcgatgccgccaagaaccagctcacctccaaccccgagaacacggtctttgacgccaagcggctcatcggccgcacgtggaatgacccgtctgtgcagcaggacatcaagttcttgccgttcaaggttcgaccgggtttttctcatccagttagagaacgggtgggtggtgggagtatttagagttataagtctctggaaaagtgttgagacaacagttgaaggttatagacatgatgtatgtaataactttaatactattagtatgttacaaaacttaagacagttgctgtcgtactgtctacgatagtttaggaataaaagaccgattaaaactgaactttgtaagacacctatactccctgaagtatttctagtcaatttgcagccccaagggaccaaaataaaccaaattgtggggatggtagtgggtcttttaaactttgagatgtcattgtatctgtgtctgaaaacaataattctttaaaataggtggttgaaaagaaaactaaaccatacattcaagttgatattggaggtgggcaaacaaagacatttgctcctgaagaaatttctgccatggttctcactaaaatgaaagaaaccgctgaggcttatttgggaaagaaggtaaatatttctagaacaatgttaagtattttttgatcattagtattctcggttggctgttatgtatagaagccttcgtgaagggtttcaaaaattttaatcagaatggtattcatgcttgtcaggtttaattattgagtcccttactataagccaaacaaaatagacttttcatgtattatttaatgcttacaattccagggacataaaattttatatgttgtattcatcaataagttggcttaaaaactaaagtgatggtttgactgtaattttttttttttgagatggagtcttgctctgttgcccaggctggactgcagtggcacgatctcagctcactgcaacctctgcctcccgggttcaagcagctctcctgcctcagcctcccaagtaactggaactacaggcacaccaccacacctggctaatttttttttttttttttaattttcagtagagacagggtttctccacattgcccaggctggtcttgaaatcctgccctcaggtgatcctcctgcctcagcctcccaaagtgctgggattataggcagaagccaccgcctggccagactgtaatttaaataagggttaaactatgtgacaatacacttaattatcttttatccttttaggttacccatgcagttgttactgtaccagcctattttaatgatgcccaacgccaagcaaccaaagacgctggaactattgctggcctaaatgttatgaggatcatcaacgagccgtaagtatgaaattcagggatacggcatatttgccaaatagtggaaatgtgaagtactgacaaaacttttccctttttcaatctaatagtacggcagctgctattgcttatggcctggataagagggagggggagaagaacatcctggtgtttgacctgggtggcggaaccttcgatgtgtctcttctcaccattgacaatggtgtcttcgaagttgtggccactaatggagatactcatctgggtggagaagactttgaccagcgtgtcatggaacacttcatcaaactgtacaaaaagaagacgggcaaagatgtcaggaaagacaatagagctgtgcagaaactccggcgcgaggtagaaaaggccaaacgggccctgtcttctcagcatcaagcaagaattgaaattgagtccttctatgaaggagaagacttttctgagaccctgactcgggccaaatttgaagagctcaacatggtatgttccttgttttctgctttgctaatgagatctccttagactctgaattcaggacattgcatctagatacttagataacagacatcacagtaaccatgtcttttttctaggatctgttccggtctactatgaagcccgtccagaaagtgttggaag

SEQ ID NO: 42757 - DNA, 2300 bp, Homo sapien
actcttgagtcaccagtctaacctttgagaagcactaaggaaaaagaaaattcttgagtactgagtcacaggctcaacatcttaataaagtgtgtttaggatgttttagtggtatctggacacagtatacccatgaatctcaaatatttcatatcagagctttgccctttccatagtaggtcctccaaaaacattcctcaaacaaatgaattttttttttttttttgagatggagtctagctctgctgcccaggctggagtgtagtgacgtgatctcggctcactgcaacctccacctcccgggttcaagcgattctcctgcctcagcctcccgagtagctgggactacaggcatgcaccaccacgcccagctaatttttggatttttatagagatggggtttcatcgtgttaccccggatggtcttgatctcctgaccccgtgatccgcccacctcggcctcccaaagtgttgggattacaggcgtgagccaccacgcccggccacagatgaattttttgttttaaagttaagagatcaggcacagtgtctcacacctgtaatcccagcactttgggaggccgaggtgggcagatcgcttgaggttgggagttcgaaaccagcctggctaaaatggtgaaacctcatctccacaaaaaaaaaaaaaaaaaaattagccaggcatggtggtgcgtgcctgtaatcccagctactcaggaggctgaggcaggagaatcgcttgaaccccggaagcggaggttgcagtgagctgagattgcactactgaactccagcctgggcgtgacagagtgatactccgtcttgaaaaaaaaaaaagtattggcaatagagtgaactccacctggttatcaatcctaactccatcactcaccagctctgtgacttgtttagttatttaatctttttcagtttcaatgtcctcatctggaaaacgggaaatgcctaccgagtattgaactgtcaagactaaatgacacatgaaaagcacactgaacaatgcttaatccacggtaggctttcagcaaatagtggtctctattattttttgcaacaggatgttatataagaataaggcattatcaagacgattttcgcctatcaaatgtgttgtctgcgtgtacatcagaccttttcctggaatgaaggtagaaaagtatcaacaataaaggatggagaaagccccgtaaatgataacctttgccccagagggaaaggatgggcagcggaggggaaagtaaagggtggcaagctagaaaaattagacatccagtgtgggagggctggcactggagtgggttgccacagtagggaggggactcagagctggaggcaattcctttggccgggcttgtcctgcgacttaccgtggggcagcgcaatgtggagaggcctggtaaaatggctgggcaagggtgcggaggggacataactggcaggaaggagtcatgattcgtggtcgaacagagtccagaccagctcgacctgtgagcaacgaacggccctgagactcgcataccccaataccggtagtggccgtgaagggcaaagaaatgtgttctgaggcgatcccagcatctaagctgcgactggtctactcagagactggatggaagctgggaagagaaagctgcttcccgcttcggggtgagggatggaggaagggagaacaagcagtagagaagaaaaagtttcagatcccacagccccggggggtcactcctgctggacctactccgaccccctagggccgggagtgaaggcgggacttgtgcggttaccagcggaaatgcctcggggtcagaagtcgcaggagagatagacagctgctgaaccaatgggaccagcggatggggcggatgttatctaccattggtgaacgttagaaacgaatagcagccaatgaatcagctggggggggcggagcagtgacgtttattgcggagggggccgcttcgaatcggcggcggccagcttggtggcctgggccaatgaacggcctccaacgagcagggccttcaccaatcggcggcctccacgacggggctgggggagggtatataagccgagtaggcgacggtgaggtcgacgccggccaagacagcacagacagattgacctattggggtgtttcgcgagtgtgagagggaagcgccgcggcctgtatttctagacctgcccttcgcctggttcgtggcgccttgtgaccccgggcccctgccgcctgcaagtcggaaattgcgctgtgctcctgtgctacggcctgtggctggactgcctgc

SEQ ID NO: 42758 - DNA, 2300 bp, Homo sapien
gcccaggctggagtgcagtggcacgatctccactcactgcaagctccgtctcccgggttcacgccattctcctgcctcagcctcccgtgtagctgggactacaggcgcctgccaccatgcccggctaattttttgtatttttagtagagacaggtttctaccgtgttagccaggatggtctcgatctcctgacctcatgatccgcccacctcggcctcccaaagtgctgggattacaggcgtgagccactgcgcccggcctcctcttgcttatttcatgccagcggtgcattgagtaatgtcttgtaacagagctgattgaattcctgaatgagttgaatggcagcacgatagcaataacatctgaccagcctaccataggtggttctattactacctatgtagtcataaaacaaggcaataaatatgaagcaattctgtcaatgttgttgttgctgttttgttttgagacaggtttcactctgctgcccaggatggagttcagtggcatgatcacagctcactgcagccttgacctttttgggcttggtgatcctcccacttcagcctccctagtagctgggactacaggtgcaagccaccatgcctcgctgatttttgtattttttgtagagttggggtttcactatgttgctcaggctggtcttgaacttctgggctcaagcaatcctcctgccttggcctcgcaaagtgctaggattataggcatatgccaccatgcccctaaaggtgacatcaagagaggtgagtagatagaaagcagtttgggagttgattgacatttgaaatagctggggaaatgattattacttttttcctttttttgcctggagactcccagtattggaggatataatcattgttctcaattttttgaagatctgtcaagtggaagacattctgtattgctccaggcagcctaactaccagcaatggaaggaaataaagggaaacagatttcagctcagcaggaggcagaactttctaacatttagagctgtccaacagtggagcaggctgcattacttgagggagtgagctccctgaaatttgaactgttgaacaggaagatgaccatctggctgaatgtacaggagggaattcctgcctgggcaacagttgcactagtgacctttaagcaggtatcttccaattttaaggtttctagactgttcaactcagctaacttgacctctgaatatatgagttatggtgttacaaaaattattagacagttcatttattgacttacctaaaataactgcatggtgaagtttatgataagcaagattttagaaactgagaagtgggaaggcaggttttacactgaaaatccagataccatccaaaccaattaatggcacttagaacaaaagggaagggaggggccggcagcggtggctcacgcctgtaatcccagcactttgggaggccgaggcgggcggatcacgaggtcaggagatcgagaccatcctggctaacacggtgaaacctcgtctctactaaaaatcaaaaaattagccgggcgtggtggcgggcgcttgtagttccagctacttgggaggctgaggcgggagaatggcgtgaacccgggaggcggagcttgcagtgagccgagattgagccactgcactccagcctgggcgacagagccagactccgtctcgaaaaaaaaaaaaaaagggaagggaggtttgtaagtagtgtgtgcgtacgtgtgagagagaaacagagaagagagagagtcattcatgcgaataatgtgtcctgggcaactgagcgttgtcacagaaagcataaaacgctctacatttttgctttacacatacttgctcagtcggattcttcacgtccagcattactgcaggcggaaaccagggcccaggcctggtgaacagccttccggaagacgattccggacccggacacccacgacagcctcagggggcagctgacctagggctgcctaaggcggaagtgggagcccctagccgcccgggcggaactacagctcccagaggcccccgcggcgctgcgcacgcgcgctggcgtggcggcagcgccgctgcaggacgcagggaagccaacaggcgagtggcgaaggtggcggcagcggcggcgggggcagtcaccggctagggcgacggctccgaggccgagtggcggtccgacagagtcctccgtgtcctcccccgcatgacccccttggtgagtacgcgtcccgatttagtccgcgggctgtgagcggctccctgcctcgcggccgggttgctccggcct

SEQ ID NO: 42759 - DNA, 2300 bp, Homo sapien
tagctgggattgcagccacctgccaccacgcctggtgaatttttgtatttttagtagagacagggtctcaccatgttggccaggctggtctcaaactcctgacctcaagtgagccacctgccttggcctcccagagtgctaggattacaggtgtgagccaccgtgcccaacccaagaaattttttgctaacttgatgactgtctgctgcccagacacacaatattatgttttgttatctgtgccacaggtatttctgttgttgatttaacatttgtgatctggcacaaattctagattcaagggcatagcttaaataataatgctttaaaatatgtgtgctatttgtatcagtttgtttagctgctagataaataagagtagtgagatttcatttattcctttggcaaatatttattcaactcctgctgtgaactaggccgtctcctagtccctgaaattacagctgtgaatgaacaaagcaaacaaggcttggccctgctgtcacttaccttctagtggggaagcctcacaataagcacgattaacatgcaggtagatatctgtaatataatgctagataggggcagtgcttttttaaaaggccagaagagggattaggaagttatattttctattttagaaggagttgtctgagaaggcctttctaaatacacgtttgagtggagagatctgaatggaatgaagatactggataaccttccagacagagaggtcagcaaatgtggacactttgagagagggacatgcttggcctgttcaaggaacagcaagaaggcagatgttctggagctgtgtgaactagggtgggattgtaggagaggaaattggagaagtagccaggggtagatcatataggaccttcagatttcattctatcatgaaataaagcctgtggatggtttccagtaggggaatgaagtgatctgacttaagttttgttttgttttgttttttgagatagagtctcactctattgcccaggctggagtgcagtggcatgatctcacctcactgcaacctccgcctaccaggttcaaacaattctcctgcctcagcctcccgagtagctaggactacaggtgtacaccaccacacccaactaatttttgtatttttagtagaaacggggtttcatcatgttaaccaggctggtctcgaactcctgacctcaggtgatccacctgccttggcctcccaaagtgctgggattacatgcgtgagccaccgcgcccggctgtgatctgactttttaattcactatgctatgtagagaacagactctagaagtacaagaaaggaagcagcgagatcacttaggatgtggtgattatgcacctcctagtgagaattgatgtgattagcaatggaggggggaataagtagtcagattttaaatatattttgaagatagaatcaacaggatattttgattgtgattagaaagagcacagtcaaggataactctggggttaacaaatagacattgtatttgaggatatacacagggtttacagcacctgtctctaagcggtggccttagcagtgagcttttttttctttttgcttatctgtatttaccaatttttctatgctgaacctgtaatacttctgtaataaaaagatagagattatttgaaaattagagttaaaagtggcatcaaatgtaacctaattttttttttttttttttttttttttgagaacgattcttgctctgttatcaggctggggtgcagtgatgcaatctcagctcactgcaacctctgtctcccgggttcaaggaatccccctgcctcagccttctgagtagccgggactacaggcgcgccccaccgcacctggctaattttttgtgttttagtagagacaggggtttcaccatgttggccagggtggtctcgatctcttgatcttgtaatccgcccgccttggcctcccaaagtgctgggattataggcatgagccaccgcgcctgcccaaatgtaactgaattcttaaagtattctcctgtcccttttgattttagaaaagaacttaagtgacatacataaactttaaatctttatctttttactcttagtgatcagcctttgagcctttcccacattgaagatggtgaaactagatattcatactctggctcatcacctcaagcaggaacgcttatatgtaaactctgagaaacagctcattcagaggctcaatgcagatgtacttaagacagctgaaaagttgtatcgtacagcatggattgcgaagcaacagagaatcaatttgg

SEQ ID NO: 42760 - DNA, 2300 bp, Homo sapien
actctgtctcaaaagaaaaaaaaaaaaaaaatatatatatatatatatatatatatatatatatatatatatatatatatatatatgtatttccatgttttgatattgtatagctatttttcgggtttagaaaccacattttattgtcttaatacctacgaagaacatttattttatttttttttttttttgagttggagtctcgctctgtcccccaggctggagtgcagtggcacaatctcagctcactgcaacctctgcctcctgggttcaagagattctcctgcctcagcctcctgagtagctgggattacagacttgtgccaccatgcctggctaatttttgtatttttagtagagacggggtttcaccatgttggtcagactggtcttgaacttctgacctcgcagtctgccccctcggcctcccaaagtgctgggattataggtatgagccaccctgcctggccaagaacagtttttaactctaagaatatcagtgctgttgagaatataagccagatgcaaaagaatacatactgtatgattctatttgtatgaagttcaaaaagagacaggactgatctttgatgacagaaatcagaataatggttactttttgggcttgagagggtggtattgactgggaaagggcacgtgaaagcgttcttgggtttttaaaatgttccatgtcttaatctgagtggtgattactgggtgcatgtatgtgtaaaaattgttcaagctgaacacttgacatttgtgcactttactgtattttacctcaataaaaatgagtttaaaaaaaaaaaagaacagtgctgttgtgggcattgtggttttttccccacatcttttaggcttattttatttggatttgtttccagaagcaaaaagcctagttaaaggatgtgattctgcaggtcattacatactggcatgttgctgttgagaatggttgagcaatatgctgatatcgacttcatttttattattttttagtacttgagtatttgtaaactttcttatgtccataaataagcataagcagtttaactgtagctgatttttttttttttcagacaggatctggctgtgtcgcccaggctgaaatgcagtggtatgatcttgagtcactgctgtctcaagctcctgagctcaagcgattttcccacctcagcctcctgagtgctgggcctacaggcacacgccaccacatctagctaattttcatatttttttgtagagatggggtttcaccatattttccaggctggtcttgaactcctgggctcaagtgatcctcccaccttggcctcccaaagtctgggattacaggtgtgagccactgtgtccttcctgtagctaattttaatttaatccataagagggcagctctggacagtttttaggatctacaaactgataattttctttctttctttctttttttttttccagacagagtcttgctttgttggccagggtggagtgcggtggcatgattgcagctcactgcaacctctaccttctgggttcaagtgattctcctgcctcaattttccaagtagctgggattataggtgcctgccaccatgcctggctaatttttgtatttttagaagaaatgggagtttcgccgtgttggccaggctggtctcgacctcctggcctcaagtgatttgcccgcctcggcctcacaaagtgctgggattacaggtctgagccaccgcacccagccccaatacttttcattgattctgatttgataagaggaaattgtcctttgtactttttagttttgttgtcctttactcattgagttgctgttagtttaaaaaattttagcaattcagagtgacctcattgttgggaccataatcaactcacatatccatgtttggatatagtatatgtgttattattattaatactattattttgcttgtttgctctttttttttttttttttagtgctgaagcttcccctgctgaatgttgccaacatgccaaaattttggaagatacacaatttgttgatgggtataagcaattgggatttcaggagactgcttatggagaattcttgagtcgattgagggaaaatcctcgtcttattgcctcctctttggttgctggagagaaacttaatcaggagaacacacaaagtgttatttacacagtttttacctccctgtatggcaattgcatcatgcaagaagatgaaagctacctccttcaggttttgcgatacttgattgaatttgaacttaaagaaagtgacaaccctaggcgacttt

SEQ ID NO: 42761 - DNA, 2300 bp, Homo sapien
aaagggcacgtgaaagcgttcttgggtttttaaaatgttccatgtcttaatctgagtggtgattactgggtgcatgtatgtgtaaaaattgttcaagctgaacacttgacatttgtgcactttactgtattttacctcaataaaaatgagtttaaaaaaaaaaaagaacagtgctgttgtgggcattgtggttttttccccacatcttttaggcttattttatttggatttgtttccagaagcaaaaagcctagttaaaggatgtgattctgcaggtcattacatactggcatgttgctgttgagaatggttgagcaatatgctgatatcgacttcatttttattattttttagtacttgagtatttgtaaactttcttatgtccataaataagcataagcagtttaactgtagctgatttttttttttttcagacaggatctggctgtgtcgcccaggctgaaatgcagtggtatgatcttgagtcactgctgtctcaagctcctgagctcaagcgattttcccacctcagcctcctgagtgctgggcctacaggcacacgccaccacatctagctaattttcatatttttttgtagagatggggtttcaccatattttccaggctggtcttgaactcctgggctcaagtgatcctcccaccttggcctcccaaagtctgggattacaggtgtgagccactgtgtccttcctgtagctaattttaatttaatccataagagggcagctctggacagtttttaggatctacaaactgataattttctttctttctttctttttttttttccagacagagtcttgctttgttggccagggtggagtgcggtggcatgattgcagctcactgcaacctctaccttctgggttcaagtgattctcctgcctcaattttccaagtagctgggattataggtgcctgccaccatgcctggctaatttttgtatttttagaagaaatgggagtttcgccgtgttggccaggctggtctcgacctcctggcctcaagtgatttgcccgcctcggcctcacaaagtgctgggattacaggtctgagccaccgcacccagccccaatacttttcattgattctgatttgataagaggaaattgtcctttgtactttttagttttgttgtcctttactcattgagttgctgttagtttaaaaaattttagcaattcagagtgacctcattgttgggaccataatcaactcacatatccatgtttggatatagtatatgtgttattattattaatactattattttgcttgtttgctctttttttttttttttttagtgctgaagcttcccctgctgaatgttgccaacatgccaaaattttggaagatacacaatttgttgatgggtataagcaattgggatttcaggagactgcttatggagaattcttgagtcgattgagggaaaatcctcgtcttattgcctcctctttggttgctggagagaaacttaatcaggagaacacacaaagtgttatttacacagtttttacctccctgtatggcaattgcatcatgcaagaagatgaaagctacctccttcaggttttgcgatacttgattgaatttgaacttaaagaaagtgacaaccctaggcgacttttgaggagaggaacttgtgccttcagcatcttatttaaacttttttctgaaggactgttttctgccaaacttttcctcacagccactttacatgagccaattatgcaactgcttgttgaagatgaagatcacctggaaacagatccaaacaagctaattgagaggttctctccatctcagcaggaaaaactctttggagagaagggctcagatagattcaggcaaaaagttcaagaaatggtggagtccaatgaagcaaagctagtggctttggtgaacaaatttattggttatctcaaacagaacacatattgttttccacatagtttaaggtggatcgtgtctcagatgtacaaaaccctctcctgtgtagataggctggaagttggggaggtcagggcaatgtgtactgatctcctgttggcctgcttcatttgtcctgcagttgtcaatccagaacaatatggaataatttccgatgctcctattaatgaagtagcacgatttaatctgatgcaggtatgcttttgctattattattaacgtggcatttagtttaaaattcagttgattgggctgtgggggtgggaacaaataatacgatgacagtatttgtatattcttacaactttttctcaaccagtcctaa

SEQ ID NO: 42762 - DNA, 2300 bp, Homo sapien
tttttgagatggaatctccctctgtcacccaggctggagtgcagtggtgcaatcacagctcactgcaacctccacttcccaggttcaagtgattctccagcctcctgagcagctgggattacaggtgtgtgccacgacgcctggcctatgtctattaatttcaagcaaatagggaaaaaaaaacttttttttttttttttttgagatgcagtcttgctctgtcacccaggctggagtgcagtggtgcaatctcagctcattgcaacctccacctcccgggttcaagcgattctcctgtctcagcctcccaagtagctggaattacaggcgtacaccaccacacctggttgattttgtatttttagtagagatgggattttgccacgttgcccaggttgaactcctgacctcaggtgatccaccggccttgacctcccagagtgctggggttacaggcatgagccgccaccgctcccagccaaaaaacctgtatttaaaggcatcatgtgtaaatgtataaaaccatttcaaaacctttaatttactcagagccaaaacagcaaccaagaattttttttttctttctgtttaaaaatcatttatcttttagctgacaaaattgtatctatttatggtatacatgttttgatatacattgtggaatggctgaatcaagctaaataacctgtatcgcctcacatatttttcattttttgtggtaagtttttttctttgtaagtgagggtactattcttccttcatatttcagcaacagccaagggagccaaggcctctgagttcaagtccaaggtgtacctaaaacatgctatgtgactttcaacaaagcacttaattcttcattaaggtggagatatacacacaaagctgagttgtgaggcttgtagggagtagtgagatgtagttatgttatttggaagtcatctggcaaatggaaagcatataaaaaggccatcagtctaagctggagatgtctgtgaagtcatactttagtttctggtgtggacttttgtggccctgtatgtatgttgtgatcaagtggacgttcagactagatggattaaatcttgatgcctacaaaataacatgattacacgttttcttctagttgaatttatttacttttatttactttaaattttatttaaattttgcaaatttagtatgtttaaaaattttatttattgattttttatttttatttttttgagatggagtctcactgtatcgcccaggctagagtgcagtggcgcgatctcggctcactgcaagctccgcctcccaggttcacgccattcttctgcctcagcctcccgagtagctgggactacaggcacccaccaccaagcccggctaattttttttgtagtttagtagagatggggtttcaccatgttagccagcatggtctcgatctcctgacctcgtgatctgcctgccctggcctcccaaagtgctgagattacaggcgtgatcctctgcgcccagccttgttgatttactttctttaaattttgcaaatttaatacgtgacatgacaactgttttatgtgcatctttttacttaattctcaacaattacatggcatacatactgttactgtcaccattttatagatgaagaaactgaggcttagagaatttcaataacttgcctatccaaggttacatagttgacacatgacagaattagaaggaccagcgtgctgacaccaaagacttctgatttgtataattctcaccactactcatctggtagtctggttgcctgttctatctgtaacactcgtagggtaatggaaaggcatggcttcagctgctttaatttatatacttttattccacaggtatttaaaagcttgacagaccttctaaataggtttgtagttaaaaattgataatttaagattaaggagttaaatatgcatttgctgtggtttgtttccttatcagtaatctttccattgataaaccaaaattgacattttattttttaggtcctaaacatgcagctttcggatggaggacaaggagatgtccctgttgatgaaaacaaactccatggtaaacctgataaaaccttgcgcttttccctctgcagtgataatctggaaggaatatctgaaggtgaagggttacttcattcaaggagttgtgtggttcaattaatagtttgttttgtgttttttaaaggagcttataaattataattataccatctgtgcttctcactgaggagactaatgaagatttcctctaatgagcctgaacagttggctgta

SEQ ID NO: 42763 - DNA, 2300 bp, Homo sapien
ttaaaaatacttgcaaaaaatgtgtcattctcttcattttttattttggaaaataatagttatttatttatttatttttaatgcttttttgtgttaccattaaaattttttctttttttttttaaaaatggggctgggcgcggtggctcacgcccataatcccagcactttgggaggccgaggcaggcggattacgaggtcaggagatcgagaccatcctggccaacatggtgaaaccccatctctactaaaaatacaaaaaattagctgggtgtggtggcgtgtgcctgtaatgccagctactcgggaggctgaggcaggagaatcgcttgaacccaggaggtggaggttgcagtgagctgagatcacaccactgcactccaccctggtgacagagtgagactctgtctcaaaaaagcaaaaaatggacagcctcccaaaccagagtaggttcagagagactcttgtattaccatttaatgggtatatttaaatgaattaataaatatttaaacttcagttttctaatatagaatatcaatagatataaccaccataaacaaaagctattagggtcagtaattttttaagttgtaaagatatcttggccaggcatggtagctcatgcctgtaatcccagcactttgagaggcagaggcaggaggagtgcttgagcctaggagttcaagaccagcctgggcaacatggtgagaccctgtctctacaaaaaataacataaaaattagctgggtgtggtgtgctcacagctatttgggaggctaaggcaggaggatcactcgagcccaagagattgaggctgcagtgagctatgtttgcaccactgcactccagccagggtgacagagcaagactttgtctccaaaaaaaaaaaaaaaagcctgagaccaaaatttgagaactgctgttttagtccatcttttataatgatctaactatagaacaaaagtaaaaatcaaaaggcataatagtactctcattcattatcaaaagatatagcttgagaccaaaaaaaaaaaaaaacaaaaaacaaaaaatagcttcagactaaaaacatttagattaataatttttttatgtttgaaatttccatcctctgcatacttatctattttaaagttatttgctgagagcagtgttagaacttcaagatttacagccttttatttgtacgctgtctgtacagagtattgcccctatgtttataatttatttattttttaatttttagttcttgtaaatttttgtagagaccaggtctcaccatcttgcccagactggtcttgaactcctgggctcaagcggtcctccctccttggcctcccaaagcactgggattaaaggcatgagcccctacacctggcctgccccctatattttcaggtgaggggaaggcgaggctcagggaagctgtgacattctcaaaacattgatggtttaggtcttccggctttgttctctttgcatgaaccatactagcatttggccattagaagtaacaggcatgtagatgccagaccacttaaatgtaaagaaaatctgtgtatgaagatactcataaaaacagaaaatgaattggaagtaatcataatttgattttttttttctggtatgcctctcaagttctaatggatcaaaaaaggaaccgtcaaagaatacttaaaaccctttaaactgtgttgagaccgtctgtcctgcgtcctggcttggtctcacagtttccctcctgttttaggtgcccaccagctgacctctcctccttctcagtcagagtctctgctggccatgtttgatccactgtcttcacatgaaggtaaaccagtgaaatgaactttttcacttatgtcacagacaggaggaggaaaccaaatccccttgttaatgcctttgttagatatgttgtgtctcagttacaaaactttttttcctgtgttgcaggggcttctgctgtggtaaggccaaaggttcactatgctaggccatcgcatccaccaccagatcccccaatcctggaaggagctgtgggaggaaatgaggccaggttgccaaactttggttcccatgttttaactccagctgaaatggaggcattcaagcaaaggcattcttaccctgagagactagttcgaagcaggagctctgatatagtatcttctgtccggagacccatgagtgaccccagctggaaccggcgtccaggaaatgaagagcgagaactccctccagctgcagccattggtgctacttctttggtggctgcacctcattcatcatcttcatcc

SEQ ID NO: 42764 - DNA, 2300 bp, Homo sapien
ccttttggcaaagtatttctgtatccttacgacatgttcctaatgttagaagaacactagcgtttacaaagtgaattactcttaatgacatctcatgtttttaaaatgttgaatcaacaattctgaagaagttataaattattattatggtttgtttgtttgaaggagttatattttacttatcctctttaggcaatatatttttcttggttcttgatactggaactagaagctaagtagagtagaataagtctttttcataaagtaatttattttctttggctgtgattcaagcagattagcttccttactggtccagaaatttctacccagtccttattaatgactcattgaaagttttcattaaaccaatttaaaaatgttataggaggaaatttcctagcagtctgttcataattctgtgaccctaactactgttcttttcctgttatctcctaatctttttccatatttgtacgtggctttttcttgactgaattagattatgcatgtgactttgtattcttcttttaccaagttattttataaaacctcccccaatttttagacatagttgggttttatatcatttttattagctataaaataatctgtcatggttttactgcagtgtaaacgttctcttactaatggctatttaaattgttcccaattttttattatgaaaatattacagatttatataaattgcattttttgtttaattattctctgggggtaaaatttttaagaacagtgttaatagaaataaagattataagcaacattgtggctctcactgtgtttggccataatgtattgtattgtccctttttcagacctctcaacagcactgaaaagtaataaccaactgagtgaggtggagcatgcctattatcccagctctttttgggaggccaaagtgagaggattgctggaggccaagagtttggggttacattaagctatgtgccactgcactccagcctgggtgacagagcaagaccttgtttctattaaaaaaaaaaaaaaaggcagtagccacaacgtacttccccttcaaaacaagattctgtaatgataaatgctttatcagtttacatttggagacagatcagattttattaagaatctcttatgaattcaaatactgttatagcaaaaatactaaattactttgggaatcctgtctatatacaattgtccttcagcatactcagggaattggttccaggactcttgcccccccacttcataccctaatccgtgcatactggagtcctgcagttggccctgtggaaactgtgtatgtgaaaagttggccttccctatatgcttgtttcacagctctgtgtgaaatgtagtgttttctttttcttttctctctctcttttttttttttttcttttgagacagtatcttgccctgctgcccaggatggagtgcagtggcgcgatctcagctcactgcaatctctatctcctgggttcaagtgattcttctgcctcagcctcccgagtagctgggattataggcatgcgccaccatgtccagctaatttttgtatttttagtagagttggggtttcgccatgttggccaggctggtctcgaactcctgaccgtgggtgatctgcccgcatcggcctccaaagtgctaggattacaggcgtgagccaccgtgcccagcctaatacagtatcttcaatctgcatttgattgcaaaaaactgtgtataaatggacctgtgcagttcaaacccatgttgttcaagggtcaactgcagtttactacaatttcacggagacatgaataccatgtgtttgtttcatgagaacaaaagaagagccgatgagcatgctacttaagctgtctatgtcttgatttcgtcttctgtaaaatgaggatgataacaacgtttctctgtaaggttgtttgatcagtagttgagataatctctgtaaggtacttagcacagttcctggcatgtggtaagtgctcaataaatgttagctgctattagctgctggaaacacaacacacacacacaaaatacgtatatgtatatatacacataagtgtgtgtgtgtgtgtgtatatatatatataaaatctagtgatttcgatgtgtttgtataatttttagaaaatgggattctaccagaatgtgaacatttatggtcacctgcctggcctaggactaacccaggagtttgtgtttcactatggaactttgtcctgtagatctatagcaatcccttgctttaacaacccagttgactactattttagattccagga

SEQ ID NO: 42765 - DNA, 2300 bp, Homo sapien
tacctcccactgggtccctcccacaacacatgggaattcaagatgagattcgggtggggacacagccaaaccatatctttctgccccttgcttctcccaactcatgttctcacatttcaaaaccaatcatgccttcccaacagttgcccaaagtcttaactcattttagcattaactcaaaagtccacagtcaaaaatttcatctgagacaaggcaagtcctttctgcctatgaacctgtaaaatcaaaatcaagttagttacttcctagatacaatggaggtgcaggcattgggtaaatacagccattccaaatgagaaaaattggcagaaacaaaggggctacaggccccatccaagtctgaaatccagcagggcagtcaaatcttaaagcttcaaaatgaactcctttgactccgtggctcacatccaggtcacgctgatgcaagaggtgggttcccatggtctttcttttttttttttcccccgagatggaatttcgctcttgttgcccaggctggagtgcaatggtgcgatcttggctcactgcaacctctgcctcctgggttcaagcagttcccctgcctcagcctcccaagtagctgggattacaggcatgcgccaccacgcctggctaattttgtattttttagtagagatgggatgtcaccatattagccaggctggtcttgaactcctgacctcaagtgatccacctaactcagcctcccaaagtgctgggattacaggtgtcagccaccacacccagccagggttcccatggtcttaggcagctccgctcctgtggctttgcagggtatagccacttttctggctgctttcatgggctggtgtggagttgctggcttttctaggtgcacggtgcaaactgtcagtggatctgccattctgaattctggaagacagtggctctcttctcacagctctactaggcagtgccccagtagggactctttgtgggggctccgatcccacatttcctttccgcactgcccttgcagaggttccccatgaggaccctgcccctgcggcaaacttctgcctgggcatccaggcgtttctatacatcttttgaaatctaggtggaggttcccaaaccccattcttgacttctgtgcacccacaggctcaacacctcatggaatctgccgaggcttggggcttgcactctctgaagccacagcctgagctctgtgttggcccctttcagccatggctagagcggccggagggcagggcaccaagtccctaggctgcacacagcatggggaccctgggcctggcccatgaaaccatttttcctcctaggcctctgggcctgtgatgagagggtctgccatggagacctctgacatgccctggagacattttccccattgtcttgggaattaatattcagctcctcattacttatgcaaatttctatagccagcgtgaatttcttctcagaaaatgggattttgttttctatcgcattgtcaggctgcaaagtttctgaacgtttatgctctgtttcccttataaaactgtatgctggccagcatggtagctcatgcctgtaatcctagcactttgggaggccaaggcaggtggatcacccgaggtcaggagttcaagaccagcctggctgacatggtgaaactctgtctctcctaaaaatacaaaaaattagctaggtatggtggtgggttcctgtaatcctagctacttgggaggctgagacaggagaatcgcttgaacctggaagcggaggttacagtgagctgagatcacgccactgcactccaggctgggcaacaagagtgaaactctgtctcaagaaaaaaaaaaaaatgaatacctttaatagcacccaagtcacctcttgaatgctttgctgcttagaaatttcttctgccagatactctaaatcatctttctcaagttcaaagttccacaaatctctagggcaagggcaaaatgccaccagtgtctttgctaaaacataacaagagtcacctttgcaccagttcccaacaagttcctcatctccacctcagcctggaccttatcgttcatatcactgtcagcattttcgtcaaagccattcaacaaatctctaggaagttccatactttcccacattttcctgtcttcttctgagccctccaaactgttccatcctctgcctgttacccagttccaaagctgctttcacattttcgggtgtctttttagcagtaccccactctcggtaccaatttactgtatttgtctgttattatgctgctgataaagaca

SEQ ID NO: 42766 - DNA, 2300 bp, Homo sapien
tcaggcacaattccaagcccttgtcatgccttatttcacctaatcctcacaacaagcacttgaggtatctattattatgtgtattattatcatctccgttttatagaagtttttcccaagtcacgtagttaggaagtaggaaggctgacatttgaacagaggactttctgactccagatttcctacccctaagccccctctttaaatgtaagataggctaatagtgccttcctgattagaggtgttctaagctctcaataagcctctgtacacaaaaggacctagtgtgggggctacccagagtgggcgctcagtctgtgttagaagaagatgctacgcggtgctaatttccttttatggaaatcttggttagctaaagcagacaagggtctccttgtgataactctaaaggcttgcacaaatagtttccccagagagctgtatacacattagagttgcgtttttgtttattttgagctgtcttgttaaggaaggatttatatgctggcgttgatgtaggacagcaatcaggcaatgttttctgcctttgacagttggtgtgatagtttgcttccagtgaagtttgactcactgtatctggaagctgtcagaagtgggagcatgaaaaggtcatgacggatggctgtggataagtggttaggggagggagctggtaagggagacaaactgcctcccttgtttccaagagaaggggctgaccctggctgctcccggccagcccccgtgctcttttcttccccacctgcctgagctggaaagaagcctgccgggctccagttttgagaggggcaccaggttgggtgtagtgtagctcatgagcccttcccagcagcgcaacccctggcataccactagaactgctagaagttctgttaaagaaattctgctaaaaaaaaaaaaaaaaaagttctgctgaagaactgctagaaggaagcattctttcactgaggatcacttcaccattatcaagacttcagcatacttatccttccccacattttaacagtcgagaaaggatactgaattctgaagtggaaatcaaaaagtgtcagctttcaaagtgatgtttgtttttatttttcgtgaaatgtttatcttggaaaaaatacagaaaaggaaaggatataattctactaaccagagttggccactggcaccagtttttggagcacgtccttttgacatctttttttataaatggttttcctgtccttttcacttactattgtgttataaggatttttctagtcaaaacttttcgtggttatcttgtatttcatcattgttggatcaactattcctctattactggccacttaagttggagaaatgtcaatgtaacaaaagccagtttctcttatttccttggaaatacatttataatttgaattacttaaaacagtgcatacgtgacactgtaaggagtgcctctgccattccttaaatgactttacgcaaaaactttagccgaggaaatcaaaactatgctcggtggtcagaaagaatattgatcggatttcatgctccaatttgccatgtatgaacaaaaaatagatgtgtgcatttattggcatttgtgaacatttatttgttccttggtgaaaattgagagaggagatggaggactgcttgggcagagctccttattattaatacatcttctgacacggctgaggctgtgcagagcagcagaaagaacagggacttgagacccaggcagctctgggtttgaacagtggctgttccacttagatgctccctgacctaggcaagcaccttcccctctcctgggatatgttatatgaaacatttagcacagttcttgcagaatagtgtagtggctgaggggacacattctggaaccagacttcctgagttcaaattgcagctttgccacttctgagctgggtgatcttaggcaagttacttgacctcactgtgtttctgtttcctcgtcagtagaataggatgaacatactagccaacttcatgaggttattaagagatctgagtccatgcacacagtggatttctaaccatgctggcacattgttgatggcagttaatgttagctgttatgttaatactggaggtgctcagtgaatggtgtctataactggcgtcatgcctgttgggcctaaggagaaaattgtactgaatgatcgctggtgcccgagcctgccgaagcagaaacggcagtgagcctaccagggttgcacctttgctcttggcctaggcctttgccttaaggagtctgagctacagggaccgtgtgtgca

SEQ ID NO: 42767 - DNA, 2300 bp, Homo sapien
tttagtagagacagggtttcaccatgttaagacaggatggtcttgatcttctgaccttgtgatccgcaccccttggcctcccaaagtgctgggattacaggcatgagccaccgtgcccggcctatatagagataaattttttaaggtagtgatggggtctcaccatgttgcctaggctggtcttgaactcctgggctcagatgatcttcctgccttggtctctcaaagtgctaggaaatatttactctttagaatctataactgcttagcagttttagataggtcgagttttatgtgtctaggagacagtcaggcagctgtgcttcagattggaactcgagagagagagagaggaaaatggagagtaagatttaggaaggaacagataacctggtgacctcagaaaatcaaatatccaaacttgttcacacctgctgctttgttagagtgcctctgacaggtccctgatggaactgtggtggtgtgtgtgcaagagtgtgtctgggtgctgaggtgcactattcccccagtatagatatgtggtaagataccaattacataaagtaatgggatgtagtaagagatcaatcacatatggtcatgcgtggaatgaggatgttttggtcaatgacagagtgcatatgatggtggtcccctaagattataacatggtcttttaattgtaccttttctgcatttagagatgtttagatacacaaataccattgtgttagaattgcctacagtatatggtacagtaacatgctgtacaggtgtgcagcctagaagcaataggctaataccaaacagcctaggtgtgtagtaggctctgacattgtgtaagtacagtctatgatgtttacacaaccacaaaatcagctaacgatgcatttcttgtgtcctcatcattaagtgatggatgaccatatttgaaatacatgggtagacccaccgtgttttttgtttttttgttttgagacagagtctctgtcacccaggctggagtgcagtggcctgatcttgggtcactgcaacctctgcctcccgggttcaagccattctcctgcctcagtctcctgagtagctgggactacaggtgcacaccaccacgccagactaatttttgtatttttagtagagacagggtttcaccatgttggccaggctggtctcgaactcctgatctcaagtgatctgccctcctcggcctcccaaagtgctgggattacaggtgtgagccaccgtgcctggccccatggcatatttattaataagtttaaaattgggcaggggtccctcagggctgaaattcaaccttgagttttttcttttgctaaggtgcgtttttgagagacttccccaagcatctttcaggtgggagaaccactctcactgcactccctgaatcctttttcccccttcatcgtggctttctctactgatttcctccgtgagagaggaagggagcagcatgagacacactgaacttctgccctgtgccagtcctcctacatctcctggaaacctcccagcagggcttgaggaagattattgtcacctccatattacagatattataataagagaaataactaacattgactgcatgtttactatgtgtcaggcactatgctgggtgtttttcaagcatcatcccattcgattcccacagcaatatactctaaagttgaaactattgccctggatgggaaaacccgaggctcagagagaagtgtcacatcctaggacacacagcaagttataagagctggcatttgaacccaggtctttctcagagaggctgagctgcctcatcactcatttctggacgaactaagggcttttctccgtggaaatggggagaaagaagattcgatggagaagcctaacactgattcctgctcaaggcaagtccaggcactggcgcatcttgccagaactcagtctccgacccaggcctttccctgcactggagaagcggcgcgcatgcgcccggcctccctcccggccccgccccgcgggaagctaccgctccttgctttcagctctggggcttgcgcactacgtccccagccagaggctccttcccggtcggggacttccggaacgccggggtgtggttccgggtcgtgtgcggctcggggtaatagggctgctgctcggccggccggcggcggcgagcagcaggggcatgagggctaacccgggaagcggcagctgagcgggccgggaggagcgccggtccccgtggatcccgagagtgcagagctcggggcaggggccgggaggcgtgggggagc

SEQ ID NO: 42768 - DNA, 2300 bp, Homo sapien
agtatttaaaagtacacacaacatatgaaggaaagaacctggaaccgagtagcctgcttcattccaagaatccatctggcatttaaagaactgcttgtcctacattaaaccctgcagagtaagagccatttttcatatcctcatacccctatttttggtttcaggtaagacagcttactgagtttggagaaggaacaaagagacttttccgaaccaccgaaccaaaggactcatctagggtgagctcaatgaatctaaaatcgggaacacacattgcagcccctgtttgggaaatcagcttaagagcaatctcaagtctccacaagaggcggaggtccatattccaaaataatgtgagccttcagttatttgtaggtagaattcaatggaagaaggggtgttatagatacgaaaaatcgtggctggcgttaccaacattaaatgactcgtggtgatggggtaagttgacaagtgaaatccagtctcttcctaaacaaacgtatctttgtaatgaagagctcgtttttgcagcttcagtacatctggaggcatcgaatagcaaacgctgccaaaggagtagtccctggattatcaggagttgcagagtgtgtaaagtgttgtaaaccttgaaattagtcctggactgaaggcactttccctcctcccagactcgcttctctctgacacatttcccctttcaatggaaagtctatggcagtcaggtccactcagctcagacttcaagtatgtgagaccacaggttcccaccttaactggtcacccattgagggacagcacaagaccccggtgctggcgccaacgctgagctgcgccctctcggttaccatggcgaccgcaggcggggcgaggcccccactcgccgcttccccgcctctgcccagaacctttcgaacgctccaattgggacgaccctttcttgcctctgtcccgccccattcggctctaagcgctttgcgattggcccgggacgagcggcctggtacccagagggcaccacctcctgacaggaagagcgggaaagtgcaccaggagctgtccgaggcgtgaagctcacgggcgcggcgggggagcacacggttggctttgcagcgagttgcccactgtcccatacacaaccccccgctcccatgactgccaaaagcatggagcaggagtcggggtgcgggcacaccgtttgtgggccggcccggtctatcccggggggctaggacgcgacgaggttggagcgaggatccggcggcacactccggagcgcggagtatcagaggccagagggaacgggccgggccccgggggcggtgccggcggcggcggcgggaggcgcagagcccaatgagcgcgcgcaccgccccgggggcggggtctgaggagcgctcccccgcccttgccagcccccgtccctccccccggcgcggggccgcagtgagtgagtggcactggcagcctgtcaatccctcggcccagcggccttccagcccggtccgcggcggctgctggctgggtgcgcggctccggcggcggcggcggcgacttctcccgccctatccatcggctgtccgcccggcgcgcggcccgccggggccctcctccgggctcagcgcccccgccgcctctgcccgcccgctcccaaactttcctcctccgccccccctcgctccccgcggcccgcccgcaggcctcctcctccgccgccgcccgccgccgccgccgctgcctcccccggggccgccggggctcggatcccgcctggccgaggcggcggcggcggccgaggagggcagtgcgcaggctggcgcggggggcggcgggcgtcccggcaactcggcgggcgctgaggagcaagttgcgcggggccgcccggcggggcgcgcggcggcgaggaggcggcgcggcggccgcgtgagggcagcgggcgccgccgcctccgcctccgccaccgccgcggagcccggcgcttccgcccgccgcttctcctcagcctcggcggcggcggaagccggagccgggcgcccgtcctcatcgcctcagccgcgggccctgccggccgggccgccccctccccgcgcgggcggggagcgcgcggccgcctccccctccccctccccctctttcttctcctccctcgtcgccgccgccgccgccgccgcctcagccttcgcctcagccgccgcccgctcccgcccgcgcgcggcgggatggacgatcaatccaggatgctgcagactctggccggggtgaacctggctggccactcggtgcaggggggcatggccctgccg

SEQ ID NO: 42769 - DNA, 2300 bp, Homo sapien
ggcccagcggccttccagcccggtccgcggcggctgctggctgggtgcgcggctccggcggcggcggcggcgacttctcccgccctatccatcggctgtccgcccggcgcgcggcccgccggggccctcctccgggctcagcgcccccgccgcctctgcccgcccgctcccaaactttcctcctccgccccccctcgctccccgcggcccgcccgcaggcctcctcctccgccgccgcccgccgccgccgccgctgcctcccccggggccgccggggctcggatcccgcctggccgaggcggcggcggcggccgaggagggcagtgcgcaggctggcgcggggggcggcgggcgtcccggcaactcggcgggcgctgaggagcaagttgcgcggggccgcccggcggggcgcgcggcggcgaggaggcggcgcggcggccgcgtgagggcagcgggcgccgccgcctccgcctccgccaccgccgcggagcccggcgcttccgcccgccgcttctcctcagcctcggcggcggcggaagccggagccgggcgcccgtcctcatcgcctcagccgcgggccctgccggccgggccgccccctccccgcgcgggcggggagcgcgcggccgcctccccctccccctccccctctttcttctcctccctcgtcgccgccgccgccgccgccgcctcagccttcgcctcagccgccgcccgctcccgcccgcgcgcggcgggatggacgatcaatccaggatgctgcagactctggccggggtgaacctggctggccactcggtgcaggggggcatggccctgccgcctcccccgcacggccacgaaggggcggacggcgacggcaggaagcaggacatcggcgacatcctccaccagatcatgaccatcaccgaccagagcttggacgaggcgcaagcaaagttggtgtcgtctcattaagcatcttttgtgtgtgtgcgggagccgggcccgcggccgagtcgaggcccggggtggcgcccggggctagggccgcagcccccggcggggaactttctccgaaagccggccgcccgccccggcctcggggggacttgcccgcgccccccgaagcgggcgggagtcggcaaagttgctctggggggctcgggacggactcggtgcggcgcggattccgtggcgtcctttcccccgtcctgcccctcgcagcccggccccctcccagggatttaaacctcccgccccgaccccgtgcgggccgcgccgccgggaagtgtaactttctcctccggcggggagtcccggcgccggctcccgcggccgcgggacgacctcgcgatgcgggcggccacccgggcccggcgcggggcgatgggcggttccctggcgggtccgggtgcggacggccaagttctcggagagggagggccgccttgcaaactttgccgagctgtcaccctcccgctggccgcagtcggccggcctcctctgcacaggagcggacgcgggagcccctccgcacccgtcccctcccccgggtcgccttcgcctgcccccggggcgaggctccccgcgcgggttcgcgtcgcgtctgcagtggccgaggctgctgcctgccgggcagatgggtccgccttgttccggctgcagctttcgccgccggggcttgctggctgtcgggaactagtcaactggagtttttgttgacttcccacggttcaaaagggccttccagaatggggggctggaattaaatcttgggtctaacttaaaggaaggcgccatattattccataggtgatgctaatacctttgtgtttcgttatttgttttttaggaaacatgccctgaactgtcacagaatgaaaccagcgctcttcagcgtcctgtgtgagatcaaagagaaaacaggtaagacgctgcgccccgcagtgggcctggagacccccgaggtgggggtcggagctactccttcgactctccagttgagagctgctgcttttgggcaccgccatctttgatcattctctccttcccacgtcctgatcttgagaaaaaactgcaataaatctggagtcaatttctcagttctgctcctggtgtaaaatgaagtgtaggtgcggaccgggctggatcgccgtccctcggcggccgcccctggctgcaggcggggagggggcccggagcgccagccgccctcttccctctcctttcgccttgtttgtgtgtcagtttttaaaaggagcaacgggagactggatgccaggaccgagtccccgggagaagcatcgcccgaactttgt

SEQ ID NO: 42770 - DNA, 2300 bp, Homo sapien
tgtatgtttgtcattgagcttcttctcttgtttgccgtacatgtgcagggaagtgtaatcattttgggtatggaagttaatctgctattaaagtacttcaccacatgtccatagggaaaagattaatgtgtttaactacaaggggaaaactagaaacccggaggaaacttgaaggtagattaaaaaaacacatttcaggagaggcaccagtgtctatgtaaatacaaaaatcaacaaacacacaaaactgtgggcaaaaattcagttgaaaatggagaaacttgagaagtcctcaaacaagaataaaaaattaaacaattcaaagtgcagcataagagattgctcagtaagctctcattgcatgccaaatgcacaaaaaacttgctatgtgaactacaagcatgtacaggtcgtgagatttttaacatttaacacagtgaattaaaagagaggaaaattaaagatttaaattaaaaatgcaaacttaaccaatacatggcagttctagaacaatattaggcagtcccttttagttatagaagaaacagcaaatacgtttgcctatttttaattatcagcagtgtgttggtacgcattttatgagttatctttttgctctcctaaatgaatatattgtcttagtatattatagttttcaaaccttatttgcctctgaatagacaacagataaaattttaaattatggtgagttagttttattatccagttgaaattattctgaagtataattttaaatgaaagtgacagctttaaagtgttttggggaagaaattaaagttttgcatttgtgttaaggcaaccaagagctctgtcatgccatggatgtaattcagggcatctaggaatgaaatctgttcttaaaagaattgacggtagctttaggttagcatataaaatcagagttggtgatcagttgagtacttggcagcttatagatgttatgtcatgtaagttacactagacacaaagtgtgtaccactgtggataaacaacaacaggcacagactcaaaagagaatccaaatacaaacaagcaaggtgccaacttccttttcccctcttccccaagaagccttgtaactagtgtagggaacctgctttgaagcagatttacagaggttaattgggctgggatgttttagattatgttacacattaatgaaaatgctgattttgagctgtcatgactccaatgctttttataccatgataattattttaaaactttgtcttctgtgttgttgaaaacattttggcagaaagcctgtgtgacctgattaaacctatgaattgtcagctatgatctatagtactcagaagaggttgctgactgggcatcacttaggaagttcttgatttaaaagcaaaattagattgagactactgtgcccagcactgtattgccatgtcaatggcacatttttaatactgtatttagtatcctcgttttatagtttgctggcaattgcttaacaatattcatttaataatatatatatatttaagtatagccagttacctcataatgtgtgtattcctcttctgaaatcacacgatggaaaagctcatctaatgttgtttatttttcaatttttgattacagcttgtgaattaactattttatgggaattttaattctgtttctccaactgtacagagagagacagaataaccacctttggatgagttgttttatatccctgtaattattttctttctttcttaaaacattcaattttttaccctcttcccattttatgcttaaattatctaaatctgggaagcttgaatgattaaaatattccaggaagccagggttacctttttctaaggatctagtctgtggtaaattgaggcggtgggggggtatttaaaattctagggtgcatgtaaacactatcttaaaaataattttcatacttattcaaacttaccgatcaaatgtgaacaatgaagttctcagcatgaattgtagtacactgatgttgtttgatcattttctcgaataaacaaaatactcacactatttgtcctctgtttctcgcttcttctctctctgtctctctctctctttccttgaaggtctcagcatcagaggagcccaggaggaggaccctcccgatccccagctaatgagactggacaatatgcttttggcagaaggggtttcaggtcctgagaaaggtgggggatcggcggcagcagctgcagccgcggcagcctctggaggttcttcagataactctattgaacactcagattacagagccaaattgaccc

SEQ ID NO: 42771 - DNA, 2300 bp, Homo sapien
acatagcctttttgtgacttgtttaggacatgtttgcttactccaaggtcatagagctgttctcctatgttttcctctaaaagctttattgttggctgggccaggcacggtggctcatgcctgtaatcccagcactttgggagactgaggtacgtggataacttgaggtcaggagtttgaaaccagcctcatcaacatggtgaaaccccatctctattaaaaatataaaaaattagctggatatggtggtacgcgcctgcaatcccagttactcgggagtctgaggcaggagaattgcttgaatccaggaggcagaggttgtagtgagctgagattgtgctgctgcattccagcctgggcaaaagagcgagactccatctcaaaaaaaaaaaaaagctttattgttttaccattcacatttagttctgcaaaattctggaatagatttttgtgtatgatgtgagataggggtcaagacacacttattttgttatggatctccaacggacccagcaccatttactgaaaagatcactcctttcccattggacgatggtgctgtctttgtcctacatacaggaatcatgtatgtgtaggtctgtttccagactttctcctctgtttcattggtcagtttgtccacccttgcaccaataccacactgccttcattaccatagctttattaaaagtcttggcatacagttttgtttttcttcttcaagtttgccttggatttttcttagactcgtgtattagctgtgctctccgccctaaccccagggcctttgcacatcctccctctgctgaaacacctttcctttctcttatcacctgttagctcttattcattcttcagatcacacctcagttgttatttcctcagagaagctttccctgaactccccgacccagtcaaacgccccacgaagccatcataacacaacccacctctctctgtaacattaaatgcaattcaacttttcatgtattcttgtggttatttgatcaatgggttttccttctctaatctgttgagctccacaaggaagggaatcactgttttatttactgatatattttcaaggcttagcacaacgagacagtctaagtttttgaatacacgaaggcaagagtcccttattcatggacatctgtgtatgtgtgtgtgtctgcatgtgcccttgagtgtatgtgtatgagcaaaactttatcagtgcatgtgtgtgtgtgcaataacagaacccacttcggagccacagatcaggggagctggacccctcctctccttttgggttctcctcctccccttcccctccccacccttccctgtccagcactcccagcagcctcctctccttcctgagtgactggaggaagatgctggtctccagctgcctccgctcggctgcccttgtgcagttgtctgccagttgtgcacgccgattactatgaatgccaccatctggtacgccacgtggacatcataatcttttcttaattacattagcagcgcaatcagttactgcattacaaggccggcgatgagcttttaaatcttggtggaaatcataaataattgcactaagtaccaggccccagatgtgtgcgccaacttcggttgcactagataaatagtaaccttacaagggtgtgagacagcaggcggtccggccggccaccgggccacactacacctgggcctcactgcaggaaggccctggcagccatgcacctgaagagaggcagtggaaggaggcggaggtgccttctgagtgcatgggtgccagggagagagagagagggatcctcagagccagagccagggagggcgtgggaggaacatggagacagacaaaggggaaatgaggtgggtggacagaaaagaagagagagaatgggagaagagaaggcaggtggggagaaggaggagaggagaaaacagagccagggagagagacactgaaacagagatagagagagacacacagagagtgacaggaacagagaaaaagagagtgcaatgaaaagatccaggatgcctggggaggctgggagaacaaagagaaggccttgtttcagctgacctctcgctcttggccagcagttggaagggatcccagggacgggctcagctactcagggcagcagccaggcatcggtgcagagggtgagtgaaactaggcccaggcccgaggggcttcccgcagggcgctctgggctccgggaaggaagccctcctggcttctctatctctttctgaaaaccgcctgagtctgagagggaaagaatgggccacag

SEQ ID NO: 42772 - DNA, 2300 bp, Homo sapien
atttatatttcttatttatttttcttatcttattgcattggctttattctatagccattatagcaggcatccttttgactgacttacatgagaatacctttagtgtttcaccattaaatatgtttgttgatggcttctgataaactttgtcatgttaaaagtttaaactttcttcctataatagtttactaagagtttttagaaatttatgggtcattagttttgaagtttataaaatacttttaaagcatctatcccattgataatatcctgtaatttgttttcctttaacaatgcaatgcatttacaaattccctaatgttggatttttcttgcgcctctggaataaatcttgcttgatcatggtgggttttcagttgctttaatagtaaactggattcaaatggctaaaattgtatttaatagttttacgactattatatacttaaatatatagtgcagattcacatattgaggatttatcagtgagctttagaaggtggtcctggctcagatgagtttgggaaatgccaggttaaacaaaccaaacaggtttctttactcctggacttcacagaggccttccttaatatacgaatacttatcgtgattctccaaaaggtacactataaacggcatgcagcactttctcaagttgcccacagaagcccattttcaaaaaataaatattaaattctctggggactcgtgttctaggttagtcatctgcagttctttttggtattgtctgttggattttggtatcagggttatgctaaacttgggaaatgaaataaaaatttttgtttcttttgtttattttttcctgtgtaacagtttaagtaacatagggatgatctgtgccctgatgggaggataaggcttgctgtaaagccatctgaacccatggcatttctgagtagtgaagacactgggaatgcacacgtgcatggcttccctacaggatgtttcccccgacagcccattctgcttggcacccttctctttaggatcaaacagctattatggaaaagcctagaatgtgtgaaaatgagactcaatgcattagcaaatcaatgctgatcactcctgcatggtcctcaagtcctaacgaatgctccagcctcctggcaggaaacctttcaaatcttgcacacgctggcctctgcctggggtgcctggctgggcggtgtggggggcatggttggttaaggcgcagagtccgcctttcctaccagccactctagctgagggtcaagctctggaccctcccccaaccatccagctccattttatccttggcttatgccttccccaagtactgcagggtaggactcctgctaaaaacttcttctagatgcttgcctgaggctggccccataaacctgattctaggcttctggggataaatcatctaactaatataagagaattgctaggcaattggggttagtttgagacgactggctgagctcaccttaggtgagctggggggtgggggaagatgagctgaaggattctagggttcagtgaagcctagaatggctgggtgggcggagagtccttagaagggtccaacttctagcctgagggcctgggggcttccagggatctgcagccgagcggaagaccggtcttgcgtacagcgaggcctacgagagctaagtgggctgagggtccctggaaaagaccagcctgggggcggggaccatcgatgccccaggctctagaggccgtgggctcccgggggcctgaggctggactggggtcgccggcgggctcggggaggcccgggtgggcgcaccggggccctgcctgcggctgacgggctgggtcgagggggaggctggggaggcggggtgccggccggggcggcggcgcgggctcgggacgccagggctccctctccctcctcccgcccgagccagcctcgggcgccgggcgcctcccccgatcctgaaccagcgccagcgccgggaggcccggagcccggcccgccgccgcggcccgcggagggagccgccgccgccactgccgttgtcgccgccgccgccaggccgcgccccgcccctccgccgccgccgccgccgccgccgctctcggtgaggctcgcgctcgagctgcggcgccggctcctgccgcctgggccccgggcccggcccctcccgcgccgcccgggcgatgagaagctgcttctgcgtgagacggagccgggacccgccgccgccgcagccaccgccgccgccgccccagcggggaacagttaagtgaggcccgggcgccgcggaggctcggcggag

SEQ ID NO: 42773 - DNA, 2300 bp, Homo sapien
ttgacatctcagcaaactcaacttgatatatgtgtgtgtgtatatatatatatgaaacgaagtcttcctctgtcgcccaggctggagtgcagtggcacaatctcagctcactgcagcctccacctcctgggttcaagcgattctcctgcctcagcctcccaagtagctgggactacaagcgtccaccaccacacccagctaatttttgtattttttttaagtagagacagggtttcaccatgttgcccaggctggtatcaatctcctgacctcaagtgatccacctgcctcggcctcccaaagtgcttggattacaggcatgagccaccatgcctggcagattttttttttttttttttttgagacagagtctcactctattgcccaggctgaagtacagaggcatgatcttggcttactgcagcctcaacctcccaggctccaacaatcctcctacttcagcttcctgagtagctgggactacatgcatgagtgccaccacacccagccaatttttttaatttgtagagatggggtttcgccatgtttcccaggctggtctcaaactcctgaactcaagctacccacgcactttggcctcccaaagtgttgggattacaggcatgagcaacagcgcccggcctccagttcgatttgtgactctgagtggcccggttgaaaaatgtgcacccgaaattaatttattcagcaagtagttactgagcacctgctgtgtggcaaaaaccatgctaggcttgtatttatagtaggaacagagatagttttggtcttcatggttcttaaactctagaagcaagacagatattaaacaaataaccccataaattgataggaagggaaaaagagagtgccaagagggaacataacacagtttagatgataagaactccctgcttggctttcagagacgtgacacagtgcaggtggaggtgggatcttggctcccatgtgcagagatggaggtagcagcccttcttctctaagcaagatggaacaacagcctgagaagttgctgtccagggcagagtgatggctgaccaactagatgcttgtccaaggatgctgaacaagtaaacagagagcatgttcacactgggcttcggggatgaggcacttctgcaaaatgggcacgtggagtgcactgctagtatcctaacaggagagatttgggatttgagcccatcattctttccttaactggctctgacgagagagggggaaccaagctgcaaattactctgaagattttaatgaaatctccaaagtggccccacatatttaagttgtagggtagatatctttagagctcatttccagcttgaaatgtgggctgcaagtgctggcgtgtttgcaaagaattctctctcgcaattacagaatggtgtactgtcttagaaagatatttgtacaccagttaccgaaactgcgcactgtggaccccatatactaccactaaacagaaactttaggaggcccttgtgcgtgtcattttagaagatgtgtaatattgaggcagcagggctttcactctgtattagtgtatgattcttgggattttgcagaatgtatctagcaactgaaatgtgtgtcagtatgcagactggtgatcacttaggagagtgattggttccctgttaggtttagatgcagctctttcctacgagtgcctcaggaatttgctcttcctaaaacctcctggccttgagatctgatgctcagggctgaatggcagcctggtcctgggacctgtgtgcacagctgccctctgctgggttatgtctaaagcatctcctgggttgctcctgcctcaccaaggccgtgtctgagttgagtggctttgaggttccgcagatgaaactccttcccaggggccacacgagtccctgcataaccactggggaccattaagtgtcacctactctaattaacctgctgtcataaagctgcacgagtcattgtgttaaatatgcatctggaagccaaaatggcaaacccaccacatgcatgttcagattaatagtctgtatctcttttctttcttcccaagagtcatctggggaacgtgttagtagatatgaagctcattgacatcaaggacacactgcctgtgggcttcatcccaattcaggagacggtggacacacgtgagtcatcctttagtagcactcatcacaatgagcgttttcttcctccaggtatatttgtaggtgtttttctatgtgcatttttcttcagaaacacttttggaggccttactacatgcccatgaacaaaccctg

SEQ ID NO: 42774 - DNA, 2300 bp, Homo sapien
actagggaggcctcccatgggaggagcccccttcctctctgccacccccagtacttctcagccccctcagttcctgatgtaatcaggtctttgcacatcaccttaccaccttcgtaacacacaggatccctagacatacagtgacatgtagatagaaacaactgtcaccagtgagaggcagttcttcactcccaaatactaataaggtctttaaaacatcagaggcagaaagtctggggaatgaatggtgagtgggttctgcaggggagcaattgccagggcctgtgcacagtacctgggcgtgcagagaggactctgctgtggaccctgctgtctgtctagcaggcaagagaagctgtggaagagatggatgtgggcagagagtgggaagtgaggaccatgacaggtgaagagtgggcttcgggactttactggggaggtcaagtagcctgtactatccagagctttggggccactgctgcctacctttgtgaccccagcaagcaccgacttctcagagcctctgcttcccaatctctaaaatgatcggaagtgttacgagtgcccggcccatctcagcagcactaggaagggcatggaagtcaggtcaggcagatggtggtgggagctggcacacctcttcctggatatccggtgggacttgactctgcccttctctagaaggctttgtggctcttccagactcctttattcattgctgaactttttcatctgtgaagcagcatacacgcataggtacttagagttcacacacaggtctgcacgcgggatgtactgaacgagattgaggcccaaatgcgggacgtactgagtgagattgtttggggccttcccctcaccccactttctggggaagtgttgcctgttcgggacttttgtcccatctcttccgtcagctcacagcaggttgccagcaccacctgaaatgggagaaggcctctgaccaggagtctctgtctaagtccagcagccacactgggcagcggcccttccaagagaggagggcgcggggaatgcagcgactgccgccacctgtgctgtgtctttttcttcatgctgatccaagaaggtttcgtttctttccttccctaaaataaagtgtgagcagagttctatgatgttttatccctgtatgaacgtagcatgagccattcggcttttcttgctgattgggaggatccgttccaggttttttcttctcttatgtcctttcctcttgctttgctgctttctgcttctgctactcttctgtgttaggactgagaaagaaaaaatatgaccactgaaggttccagagaagtcatcattccaggagacactgggggaagcaaagattgttggtcccaggagcgcactgcccgacgctgcccccatgctctaccttgcttccattgtgctcactccgtttctccctgaaaccacaatttactgcatagccaccacctcagggtgcggccacccctgacttcggggctccgcgtccctgcactcatgaccaggcccctaacaactgcggctgcatgttcccgactcttcccagacctaagggagaagccaacactggaaaggcccctaccactgtcccagcagccgcatggctgccacgttggctctgtgaatgccggcatcacgtctcgtccagtgtgacctgttcctcaatgtggcaggatttccagtcctggtgtggcaccagagtcctcctctctgaggttataattcatagagaagtgctcacttacggaggcacaccctgggtcgtttctgtccgtgtgcttttgaaagcgatcccctgggacagggcggagggaggggtggccacagaaaaggaaccaggcccctggtttctccatcgttgcgtccccgttccatgccctttttctcgtgtcctgttaaaattgagcacactggtgagcctctagtcagcccttgatgccctgggtctgagtgactgagagcgacagccactgttgcccccacatgccaagcacctgctctgtgccagcgctggccaggtgccccacacactccacttctgatgcacaggcaccctgtcatgtaggtggcgccatctttttaaatgtgacttcagtttttcgtctttcaacttcagttgctcatctgcagtcaccagctgggatttgaacccagccaatctgactcctgagctcctctttcctcccacttagtcttttcccctgagtccaacagcaccttagagcatgtctaatgcacgtgcttactgccttcatctcattgcagcctgtccctgccagctgtgt

SEQ ID NO: 42775 - DNA, 2300 bp, Homo sapien
cacgcacagacacacacagatacccaccgacacacacgcaggtagggtagggcgggagcctctaatcctccacaaagccgggcccctccgcggggccccgcggcgcagggggccacttctgaccaagcctcccgcaggttccaaatccgatccgccctttcgcctccagcgaggtcaggggacccgccccccatgccctccgcccccgcccggctccgcgccgctgcctcgctccgggaggggccggggccgccccgcagcggatcgcggggggtcagcccgccgctaccccgggccgcaaccgcccccctgctccccggtgagccgcgcgtcggtggggaccacgggccgcagacagccggtccgacgctgtggcctctcgcaccggacgcgggtgccaggcccggctggcgcggaagtcggcagctccatctcgccagctttcgcgtcccgttgccgaggtccactttgcccaggctggctagagcactgtccttgatccgcgcgtcccagcgacccctggccgggcacccgacccgccaaaggaccccgatcttggcagccaacctaatttcttcagagccgctaccctggggccaccactccctcctagcgcccctcactgcaaaccctaggaggcccgggtcttgcccactgctcctgcccctgcccggggaccccttttccagccttagttgtcctctaaactctcggtcgcctgaacccaggcctgaccttccttgtcgtcccagtgtcccccattctcgatcccggggccccaacctcccatcggctcagtcccccgcccaatctctgccaggcccggagctttcccagacccctcacccacactccaggctcactccccgttcctgggcctgggccccccttgcacgagtccagggccagccgtcctcgccttctgcccgcccccgtccttcgttcctgggagccggccctctccgcggaccaagcggccccgagcaggcgccgccgcccgggggactccgactcagcccccgcgacctacctcggccgacagtcgggggttcccaagcggccactcccggccggcgccgtcccctggcggagccgccgcgctccctgccgtccgcgcagtctggcctcgctcggggccactcctcgtagcgctggagctttacaaaatattaataataaagaaggcagaggagaaaaaagaaagccttcgctccccaactcccaaatcaatttttcaagggggtggagcagagggatttgtttcgaagacgatcaaaacttctgcgaggggcccgcggggcggccgggccggggagccggggcctgagctcggggccaggcgcggcgcggggcgcgggccaggggcgcggagccccggggcgcgcgggggggcgggacggcactatttgacgtggagccggcggcgcatcccggcgcagggataccggccgcggggttcaaatgtcaggaagtttcgggaggtgaggcggcccgtatccctccgccgccagccccagctctaaacccggcggctcagcgggcgcaccatggcactggagtagcgcggggagcgcgcccggagccccgcggcccgctgcgccccgcccgggaccccgctgcgccgcgcgccccccccgcggcccgcggggccgcccctgcacccccaccccctcccccgcctgccgccgccgccaccgccaccgccgccgccgcctcctccccgcggctccgtctgcagcagccgccgccgccgggttccgggactgacaagcaggtgacagaggagccggcgcgcgtggctgcaagtgtccgggagagcgcggcgcgggctgcagccgccccggcccgcccgcacgacgccggggcccggggccagcgcgtcgccgctccacgatcgccgggggccggcgcaacccctgccctgcgggggccgcgcctccccggttccagggccgcggcggcggagagcgggtggacgggccggcgggcgagcagcccggccggcggggtccgcagcgcgccccgcgtcccatggatatagcaacaggtcccgagtcgctggagaggtgcttccctcgcgggcagacggactgcgccaagatgttggacggcatcaagatggaggagcacgccctgcgccccgggcccgccactctgggggtgctgctgggtgagtgcggggtcggaacgcccgagtggtctcgggcgtgggatggggcgtcgtccggctgtggacacgggcgttggggccaacggataaaggaaatgggtttgcaggacatggggaggaggcagagaca

SEQ ID NO: 42776 - DNA, 2300 bp, Homo sapien
aattttgaaaatatttgtcagtacaggacatgcaccaatggatcggaacagatgcagacggtacctctgcataatttctgaacatcaattgtttgacttcccaggcttgtgttcttgttttcctcctagcttcagataattttcctgactttttttttgcaagtgtatccatgcgtttaagagggtattctaaatatttcttctagcaattttatatattttgttgtagtaatatttgtaaatatatagtcctcaatattgccagaaataaagtccaagtaagaagtttatttggctcatgcaacaaaacacttaagggtgtccaaagctggaactgtggcctaatgtcatatgggacctaggttctctcaatcttcctgctttgccagccttagcatttacttaccacttcataggcacatgatggcagttgaacttccaaacttcaggtctgcttagaggcaggaataaaagtggcaaaacacttaaagagtatactcaactaggctgggtgcagttgctcacgcctgtaatcccagcactttgggaggccgaggcggttggatcatgaggtcaggagtttgagaccagcctggccaagatggtgaaaccccgtctctactaaaaatacaaaaattagccaggcatggtggcatgcacctgtagtctcagctactcgggaggctgaggcaggagaatcgtttgaacctgggaggcggaggttgcagtgagccaagattgtgccactgcattccagcctgggcaacagagcaagaattcgtctccaaaaaaaaacaaaacaaaacaaaacaaaaccacaaggcgggggagctggagcatacatgtttgaagtagaatctttgacaagctgttctgcatccactcccatttctgtgcttccatatttgttttctttcattttgttttctagaaaaaaaaatttttttggtagaattctctaggaaagctacactcctgtgtcctagggcccaacaacaagcaagacaggcataacagctgggaaaccaatcagcttaaactgagacagacaatatcaaacaggcatgtcaggccccacgagaacatccaccctaaatccagaaggcattatgaccacatcgcttcagctgcctggatttcaggtataaattagttcttctacaaagagggcacttggtctgtaaacgggtccaaaggtaagagtcccaccgctaaagacctatctctcttctacactaacatgggggggcagtggggaagaaaggggcgagaagaggtatggaggttttgggagggagtgggagaattggaggctagagagatcgtttctgtcccaccatctgtgtgaccccagtgcccagcacaatgcagcccacggaaaggcactggtcctttcattgaccatttactgagcatctactacatgccaaaaagcgagatgggtgctgtgaaggcagaaacggatttggagataatctccgccaggcatactgaggtcaaggttttcgttcgtttgtttagagaagagacggagaaggtcaaggtgtttttgtttgttttgttgttgttgttgttgttgtttaagagtcttgctctgtgctcaggctggagtgcagcggcgtgatctcggctcactgcaacctctgcctcacgggttcaggcaattctcctgtctcagcttcccaagtagctgggattacaggcgcgcgcaaccacgctcagctaatttttgtatgttttgtagagacagggtttcaccatgttggccaggatggtctcgaactcctagcctcaagcgatcatcccctctcggcctcccaaagtgcagggattacagacgtgggctaccgcgcctggcctatgccaaggtttcaagaaggtttagaactcagtatctgctcccctattttcaacagcgtagtcagtccctaaaattgacccgctccagagtgtactgcgcaggcgcccgctacctccgcgctctctcccgacgcccagctcagacggtaagtcccgcatgcgcactccgctttctctctgacgcacccccggaagcactgtcagtttcggggggcgggaccgggaagcgtttccgggggctgaaggcacaggctgaatctgttgcggcagctgaggctacaacaggcctgcgccggcggcagagaggatatcttgggcgggggatgtgagcgctgagcccttggcaggtactgcgtggccaggaccacgggcggcaagggtaggggaggagaagtcggtgggggagttaagggctcctcagcaggccccgacgctcgcgc

SEQ ID NO: 42777 - DNA, 2300 bp, Homo sapien
atcccagctactcgggaggttgaagcaggagaatcgcttgaacccaggaggcggaggttgcagtgagccgggattgcaccactgcactctagcctgggcgacagggcgagactccatctcaaaaaaacaaaacaaaacaaaaacaaaaacaagaaaaaaaaagttcatgaaaatgatactcttcaattaattttcagacatgcattttttcacattttaaaattcctgaaatcagaatgtgatcaccaggtggcagttttaatagctgtcactgcctgagacaatgatagagaactgctgaggtcctcatcaatgttcttgatgacacaaaggatgacactctagaaaaaatatggacacactctgaattgaaaagtgcacagaagagtagaacttggaatgttaagtttaacgaacactttaaccaatgtgttcttatttttcctttgtatatatgcattagaataggcattgataccatgttttagtgtctaagtctaaaagtgttttcaataataaaaagtctaaacgataagagcgtattaagccatagttcaattagcagggtttctcccttccttggtggtacatgaaataacagcatctaggattcaattaaataaagtagtaattcagttgtgatatcttattagaaagcttgataaactaccttaaaggcaaatagacagcttaaataagagattttaaaaaacaaaaaaaccacaaaggcatcccccataacgaaactcaagaaataacacataattttgcattataataaaagggctatttttcaaccttatgagttttcttcctgtgaaaagcataattatcaagtatcctacttatgagcacattcttgcactgattccaagaaaggcagagggaggagagccagggcagaaagtaagtagaaagcctgagaaagattttaaccaaattcatttaactaaacttttctaagaacctcagctgtacccactgctgtaaagagagtaggaatcaataaacacaggttcaactgtgttcctaacaactacagaatgaattttgaaaaattacatgtaaaaggagcttattggtttcaggagtctccaatgaatactgtttttgttttttgtattgtataaaatatacataaaactttaagacttaacaattttaagtaattttaagagtccaattcagtgaagtacattcacaatgttgtgcaatcatcacaacccatttccagaccttattcatcatcccccaaaactctgttctgtaacattaagcaataactcctctccccagcccctggtaaactattctactttccgtctcttaattggtttattctaggtacttcatttaagtgctctcaaacaacatttgtccttttgtgtgtggtttatttctcccgtggtgcttttataaagcaaataataaattcccaattattaggtttcttataatttaactgaaaatgctgacacaatctctgaactaagcatgcagttatcccagaaaccctgctactgttccagtagccccaaagacctcagtctgatcctttcttagcctgtagacaggcctgttaaacagctgtaactcaaagagcaggctccagagatccctggagaccatcctgtggtgagtggatagagcgaaggcatttgggaagctgtgcaggcctgagaaaccacaggcgagaaaaggagaggactcatcaagctgctctggccctaaaatgggcctcctgtctccctgacaggctctcctgcactctgacacttatgttgggcgacacctgtcagagttgaggccaaactgcggtcgagtcactgagagtgtcaccagtgcagggaacttcacggggtcatgagtcaccttccatggctcagaggtctgggcagccctgccccacccaaactcaggaaagagagacaagaggcaaaaacaaagttggcagaaagagagaaacagacagatggccaaaaagccagactgacaggccctgaattagagtaagggctgagtggcagagacagggtgaacagacacagaagcaaggtggagacagatataaaacaggatccagataccccgacaaagacaaagtggagagaaatatcaggttgacagcgacctagctgaaagacaaaaagggcaggttacaacaggtgacagagacagcaacaggggatgctgaatgttttacttaaacagaagatcagctaagtccaggcgcagtctttctcccagctcggctcgtcaggcctcaggcattggtggctcgaacccgaggtcgtcaagcc

SEQ ID NO: 42778 - DNA, 2300 bp, Homo sapien
tcaagggagctaacgagttaaatcatttaaaactgccacaaagattatgggaaaacagaaacacatatgcacctcaactgtggaggagtgacagttttttaactaaaattagtagagaccatgacaatcagctaaacaacaagaacgaaaaaagcaaggggctggaaaaatatataaatgatgagtttggtgacccagttaggtgggagagtaaatataaactatgagggaaatacccagcatccaatggacagacagagggccaacaactttgagacacttggcagaggagggtcaaaaactcaggaactattttagtctttatagtacttaatgatatgcaaatattgtgtcacagccaagaagaccctaactcttatcaacgaatttagcaaaaatcagttaaaatgatgaggcccaaggctgatctgtaggaaaacctctgggcataagaatcagctcagcagtccggaggaaacctgacaagatgatgtattcctgtgccctgggtgcacacgtatctcacccttggggacagatctcaagaaaacaactcaagtgcaatagcaattcaagagcgagactacctgtctgcccaggtgcctgcagttataggcaggttgcctaaaatcctatgcttggatgttctgttgctataagaagtcagagagacaagggagttcatcccaagtctgccatttactagctgtgtgactttggataagtcactcaacctctctgagcctcagttccctcttggattaaaatgggaatagatcgccacctccttaggttgtgttaaatgaggtcatggctgtcaagtgtctacacagtgccctgcatggagtgtttgacaaagggtagctgttgctattggaggatgaccactggacagatcctggagagacagttcctgcttgcaaaggatgaagtaacatcaggaagtctcagcagctttctatcctgaagaggagctggtatctttgcctcctagtttatttttattacaaagccagaaaaaggaaaataaacctctgccacaactactgactccaccaaaatgcaaagggaagctcttcaaagagtgttacattggtctaatgctgggaggaaaacgctgggtgaggctcccactcccacccaacggtttgaagactggggtgtccccaagggtctggaaatgcacattttttgaggcatgctctgtgacatgggttttataacagtgagttgggaattttcacctccgttttgtttttgagacagggtcttgctctttcaccactgctgaagtacagtgacacgatcatggctcatcgcagcctcgacctcccggactcaagcgaccctcccacctcagcctccccaatagctggaactacaggcatgtgccaccaagcctggctaagttttaaaaatttaaatggggcctccctatgttgcccaggctggtctcaaactcctaggatcaagtgatcctcccgcctcgccctcccaaagtgctgggattacaggcgggagccacctccgttttgagagagagaaaacctgcccaaggtggtaagtcaagagaccccctatgacaggtccccagagccctgctgctaaccactgcaccttgctgccttcagctgccctgccaggagcagctcgggtgcgtggcatgcgcctgaagagatgcaggagggagggtcttggaagggagggctgggctgggggcaggccccccagtgctgggggggtcgagggtcctgggctctctcccacccgttcgattccgggagcccctgaaacgcgccccactgcaccgcccttctcccgccagcagggggcgccgaggagagcgcgggctgaaggcagagccgacgccgcttcccggagtcgggactccggggtccagaccaaggctgccgctagcccgcggcgaggctctgggacgacaaccgggcgggactcaggaccccgggccctggctagaggtccgccgcgcaacgccaccacccgggttggcgcctgcccggaagcgcgggcgtccagggggcggggccgggaagcgcttccgggggcggggggcgcgggctggggcggcagccggagcggcggggactggcctggcgccggcggcggcggagggggcgccgcgggcgggcgatgtgagcgcggcgctctggacaggtgaggcacgctggccgggggcggcgagcagcgggctaggcgcgggcggggcaggcggggcaggcggggcggggggcagtccccgggccgctgtccggctccctctgggcgcggcggggcgggag

SEQ ID NO: 42779 - DNA, 2300 bp, Homo sapien
caggtaaatataatagtagccaatgtttattgaggtcctgttaggtgccaggcactcttccatgtatcatctcattaattcctgccaacagcctgtctaaagaggttgctacttttatcattctcatctttcaataaagaaaccgaggcaggttgggcgcggtggctcaagcctgtaatcccagcactttgggaggccaaggtaggcagatcacctgaggtcaggagttcgcgaccaacctggctaacatggtgaaaacccatctctactaaaatacaaaaattagctgagcatggtgtgtctggcgtctgtaatcccagctacttgggaggctgaggcaggagaattgcttgaacctgggagacggaggttgcagtgagccaagatcgtgccactgcactccagcctgggcaacagagcaagactccgtctcaaaaaaaaaaaaaaaaaaaaagaaagaaacggaggcacatagatatgctaagtaacttgctcacatgtacacagcttgctggtggcagagccagggcagaaccattgcactacactgtctcttgttctctctctctcttcttttttttttttgggacgaagtctcgctctgtcgcccaggctggagtgcagtggtgcgatctcagctcactgcaagcaccgcctcccaagttcacgccgttctcctgcctcagcctcccgagtagctgggactacaggcgtccgcaccacgcccggctaattttttgtatttttagtagagacaggttttcaccatgttagccaggatggtctctctctcttttttgagacagggtatcgctctgtcatccaggctggagtgcagtggcgccatcacttgaggctcactgcagccttgacctcccgggctcaagtgatactcccatctcactctcctgagtagctgggactacagtctgcgccaccacgcctcgctaatttttgtattgttattagagacagggtctggccatgttgcccaggctggtctcacacttctgaactcaagcaatcctcccgctttggcttcccaaagtgctgggattacaggcatgagccaactcgccaggctcttgttctctttatgcaaaataattaagcaccttcttcgatgattaccgttttcttaatacaaaatagcagaaacttctcccagaggtcttttaagacacaggtggtttaacttctactgactctatttatattcttttttgtttgtttcttttttcctttcataagctttgggaagcataataaccaatcattccatattcattcatattactgcaaaattactttgaagattgtcagaatgatgttctatttgtccaagaatctttcggagtagggcaggtcatagtacctcctgtctgtgggaggcagaacggagttttgctgtggttccagatttccagggattcacagacctggcttcaattgtctttgcaatttattatccctgcgactctagctaaatgacttaacctctgtgcccacctcaccgtgcctggcacagagtaaagatgtgggagcagagagacaggatccgggctcattccccagctttgctcctgtgtggtcttgggcaagtcccttcacctcgttgggcctaactctgcccagctgtaaaatggatgagaccgcccccccccccgccccgccaggaactccgaggtttcttctggctctgacgttctgggctctgtgcctacctcccagctgtgaagaatgggcactaaggcgatgtctcgctcacaaaaccatttttgttgaaaacgataaatcccaggtagggatttacgggggatatcgggtgaggcctggacggccgtgtggggaataagatgcgcggctatttctaggcaggggatgggcgtggcgggcggcgggccgggtgtgctggcagcgcagcatccctgcgggcggggagggcgtctgcagatgagctcggaggccgaggcccgggaggaccgcggatgcagcggctgcgcactggtacgaccagccggccgatttgcgtgtctccgcccctacaacgagctggttggggggctgttctggtgccgcgcgccgattggatgagaggcccgccgctcaggccctggagcggacggttcctactgcggctgggcaccggctccgctcccgcgtctgcccgcgctccagctgcgcctggcccggccccggcccggctcggcgtggccccggcctccaagcgaaggcgccgctgccgctgggccgctcccagggccatgaggaagcggcggcagccactgcggcccgcgtca

SEQ ID NO: 42780 - DNA, 2300 bp, Homo sapien
tgagtgcaggcatctctttggaggctttgctaaaaaggggagcagagaaatgcaacaagagctgcagaggggatgtgaggtcaagagagggttttaagttgagagaaaaaaccgtatgattataggaaaaccatcctgatgttggggagacggtgaggactgctggagcaaggccctcgagtgggcaagagaagggatctagcacgtgtcctcccctccctcttggcccatttaactcctactcattcctcaagggtcagtgtaaagggcactttctcagggaagcattcctgaccctctaggtcaattccctgtaatactcctttacagcatgtgacagttgtgctttctggcatttgggaatggcataatgatgtgaaagccccatgagggcagggactggctccatcctgttggtagctgtatccctagccactagcatgctgtccagcaaatcacaggtgttcaatcaacatctggtgaaaggatgaatggtccaagaatagaagtgaagcaaatctggagacacattctgtgttctgctcccttctaacttaatcacgttgcagtggtcaggactgtgctgtcactggctactgcaaatatttggattcagaagagctcagttgtttgttcctgttttggctctgtagcttagctaacacagtgaccagagccacgtaactggacacatccttccactgatattgtccactaaaccctgaatgtattccataacatgtctaacgattcatttgtttatcaaatatttgcccaaagtgcaatatcctgggaatacagggttgaatcagacagacgacatgccctcatggagttagaatccaacagagaagatcaaacagaactgctattcagcacagcggtgatgggtattacaaggggaaagttcagggggtgtgaaagtatagaatagggagactcaacagtctgaggaaccaaaggtagcagaagagagagaccagaaaaccctccctctgcctcccctccccagcctgaagctgcctggatacgattctcaggctctaggccaggagttcagcaagggggctgcgggcattggagctggctctgggagtagcagggccatggcctcctgccttcagatgccctgagaccctccctcttcccttctacctctgctggggcttgcctgtctcctcttgcttccagaatggctgcctgttctctgactccaagagaatataacccagcatcctgaagcagagtttttggaaagctctgcctgcctggcgagaaggctgggatcactgatggcacagggcactgacagtggtgggaccatcactgattctcccctctgtttactttcaggctttcatagattctattcacaaagaataaccaccattttgcaaggaccatgaggccactgtgcgtgacatgctggtggctcggactgctggctgccatgggagctgttgcaggccaggaggacggttttgagggcactgaggagggctcgccaagagagttcatttacctaaacaggtacaagcgggcgggcgagtcccaggacaagtgcacctacaccttcattgtgccccagcagcgggtcacgggtgccatctgcgtcaactccaaggagcctgaggtgcttctggagaaccgagtgcataagcaggagctagagctgctcaacaatgagctgctcaagcagaagcggcagatcgagacgctgcagcagctggtggaggtggacggcggcattgtgagcgaggtgaagctgctgcgcaaggagagccgcaacatgaactcgcgggtcacgcagctctacatgcagctcctgcacgagatcatccgcaagcgggacaacgcgttggagctctcccagctggagaacaggatcctgaaccagacagccgacatgctgcagctggccagcaagtacaaggacctggagcacaagtaccagcacctggccacactggcccacaaccaatcagagatcatcgcgcagcttgaggagcactgccagagggtgccctcggccaggcccgtcccccagccaccccccgctgccccgccccgggtctaccaaccacccacctacaaccgcatcatcaaccagatctctaccaacgagatccagagtgaccagaacctgaaggtgctgccaccccctctgcccactatgcccactctcaccagcctcccatcttccaccgacaagccgtcgggtaagtgcttctgggatcgtgttacatgtgggtctcagagccaggcaccaggcttcccttggctgtgtccacaaatgggga

SEQ ID NO: 42781 - DNA, 2300 bp, Homo sapien
cagtgaccaaggtttgctcagggtttgctgtgcaccaggcactaagccaaggccttcctaggcatgggcgcctagctttctcctagaaagcagtagggtgtggttgagtggctccggagccacaccactgggttcaagtcctggtcctggcacttactagccatgtagccatgggcacattactttacctcagtttcctcacctataaaacagggatgaataataatgcctgtgctatagggtggtcatgaggattctacaagttgagtctggcatagagtaagtgcaatataagtgttagctgttactctctggccattgttaccacctgggcagtattatcccatttcacagataagaaaactgaggtttagaaaggctaagtgttctgccagagccattggctagtaggtagaagagctgggatttgaagccagctcatgaggactgccctactctgcctccatttggaaaaatacatgtggggagcatttggccggctttggaagtggcattctcaattttccccagagagtggggtgaaaggagatgcttttccaagtaactgaactggcctctgggagctctcataatcctacagcagaggcaagagctgacccatgacacacatatcatagaaggagaagggaaggatcagtgaagaatttgtttggaaatgttatctaatactgagtgctttcaggcgacttggtatgtggagcccctgctgtccccttgcgggggtaccagggaagccgcatcctccctgtatcttggccacatccactcagttggagacccggggtaccatccagtgcagcagcccctgggtgatgcgtccgttcccgtgctgggtgcctctgctctcctcgccagctggagggtgtgagcagaggcagcccagctcctgtaactctccgagcaggggctcccagcgcctcagcacagcgcttgcctttgcctcacattgtcccggcctgggggcataggaatccaaagcttcaaagtgactacccaagtccttgggccacccctgccttctgcagctcttcagtacgctgccctctaagcacacacctacacacacgcacactcccagctgctctgccgtgccgggagctgccggccggcaccccaaaggctctttgtccaaaagaggagagtgaggcttactcatgaagtcctcgagatgccagcccatgatcatgtgcccccaaacaccaccaaatgtccacaggttctgccccggacatgcctcgtttggctccaagcgatagcagggagtgaccctctgagatccagcagcacacacccccagctggagggtcagggttctggaagccctagccacggggccagcggctgcctctcgcccctgcctctcatggccgcagagctggccccttacctcttccctcctgcttggctccggggcggctcctcacatgcttcaccctggccgtcagcggggcagcctgtccatggcctctggaggggttcctgagttgcaggccggtggctgccaagcagccctgcctcactgggctccactggctctgcctccacagagggctccggcagaggctggggccagggctggccaggggtcctgcggggctgctcacaaccttctttccctcacagtagcgtcagccgctgcctcagtgccacgctcggcaggtccagggcttggggtccatcctcaggccgtccgcagcagcctcatttgaactcccaactcctttgtggagcctttacatgccgccagaggaaactgtgagcacagcctgaccctggttggctgcaggcgcttctctccacccaccagtgcaagaggatcccccaggccccagaaaggctccgggcctcccctcagccccagacagaggcgggccgcccggtgatgtcacacgagctccggccccagctggcctggcccctcccgcccagcccgctttggcggcctcggcaggccccctccttccttggcacgggcagcctggccagctctgctccctggcccgccctctccccaaagctcaggcagctcccgcgtgctgcgaggcggagcgcttcccctttgactcagggaatgggtttagatccgctccagctgtgcgtgcagccgcgtgcgagcagcaggcagcgggtcctccccctggatgcctcgttgggcactgccccactgagccccaggctggcgggcggggcagctcagcccagagcgcctctccccatcagccgcccttcgtggaggcctcattctcatctctaaaccctggggaaaggagtccaaggct

SEQ ID NO: 42782 - DNA, 2300 bp, Homo sapien
tggacctgttaccagagggtgggaaagtcctaggacactttgtctgtagctcacattaatccagtctccactcaataactaatgtagcctttaaaaaataaaaccaagtctcaacactgtcttgctcaaaacctttcagtggctccttactgtctttggaataaagttccacctctctaacaagaccccatcttctctcctcagccacaatgtacttctctcagctcctctaaagggctccctccaactgctcttgcccgagtctatcccagttactaatgctgtgtaacaaattaccaccaaaatttagcggcctaaaaccaccatcttattatacgcatggggcctgtgggtcaggaatttggagatgaaacagtagaatggctctctctgctccccagtgtgtggggcctcaacaggaagactctacagctgacagtgatgcagcatctggggtgactctgtggctaagggctgggatcatctacaggcatctttccttgctcacgtgtctgcggctgatgctcctgtcagctgggacctacactgtgtgtggcctctagctggacttcttaggctccagcttagctcggggcttcaaaagagagtgccctggtgaacagggtagagactgcgctgcctttcctctcccagcctcagaagtcaggtggtgccacttccaccacattcctctggtcacaagcaagtcacaaaccctctcgggttcaaggcgaggagcagggacctcaccgctccatgggtgaagtgtcagggtctccttggggactgggagagattgcttgggccatctctgaaagaggaatctgccacagggttgggacgggtgcctggtagtagggaggatgcctaggggcagggagagtcccattaaagtttttctcccaatttgttcccaaacatcatcaccaccatcatcactaacacctttttaaaaaagcaaagataccaccaatatttcacatgttcttgtccaagcagaggggcaaacttgtaccctggggctcccttcctggtgcctgccatcctcctactctctgtatccccgcagggtgcccggcagcaggcctgtcctcctgcactgactgtaccttctcccaggctgccagtgctgacgtgtctggaggatgcttgcatcatggggtccagtgccatcctctcctttcttactctgattctatcaacattcacagagctccacctatgcggctggctccatgctgaggactctgatgcagttccagtgtttgttcctagaagagcccaataggaggtcacattttgatgaaaacacaggctaaagaggatcacaaagcagaggttctgggagcaggagacccttgatccacccatctccagagtcctaagctcagttcaaggaggcgtccttgacactgtgccaagctccttcccacgtgacctcacagagtcctcgctgcagctgttgcaggtagattactagtattaattagctcatttaccgatgcatggaagggatgcccagagaggtgaagtgaattaatcaaagccactcaggtgtgaagtcacagagctttcctccagggctgcctccaccctcagcctgtggtatttccactgtcctaagccactgcctcctgctaacttcgagcagctccgatgccacagcttctgtgtggacagccttggactcctttccccagggtttagagatgagaatgaggcctccacgaagggcggctgatggggagaggcgctctgggctgagctgccccgcccgccagcctggggctcagtggggcagtgcccaacgaggcatccagggggaggacccgctgcctgctgctcgcacgcggctgcacgcacagctggagcggatctaaacccattccctgagtcaaaggggaagcgctccgcctcgcagcacgcgggagctgcctgagctttggggagagggcgggccagggagcagagctggccaggctgcccgtgccaaggaaggagggggcctgccgaggccgccaaagcgggctgggcgggaggggccaggccagctggggccggagctcgtgtgacatcaccgggcggcccgcctctgtctggggctgaggggaggcccggagcctttctggggcctgggggatcctcttgcactggtgggtggagagaagcgcctgcagccaaccagggtcaggctgtgctcacagtttcctctggcggcatgtaaaggctccacaaaggagttgggagttcaaatgaggctgctgcggacggcctgaggatggaccccaagccctggacct

SEQ ID NO: 42783 - DNA, 2300 bp, Homo sapien
actgcattttcttgggtgttgagaacttgtaccatggacttcagaccgccttgcagccgtatgctgcacaagcgtgtacaccccctgggcagcctcaaaaccccgcttacagcagcaacacaggagatcatctgtccattttagaaccattaatctctttatccattgctgaacgactgtgactattcagtaacgaagtaatagtaattaattagtatggtataatctttaataaatttcgtgccaaaatgcatggttttccacttagcattcaaaatgttgcatagagagtagttttcaatttcttatgtactcttcgaagtaagttgaaaatcagtttctacattttaattcgtttcctgttaaatctgttgcactctcctgggctgtctttttctccagcagacccctgcatgcagttgtgtaaggactttctctaattcttgtgaatcgtctcacccgcagtaaccactgaacgtcaatcagccctccatggggttctttcgatttttggtgaagtattttgttacctcagtcttgtatcaagttgctgtatttttcagcttgttacattgataataattatttcactaattaaatactttaatgtacaaacatctttgtttactttgaaattaaatgtgttttccaatgaatgttgctcagtttattaaagtcacacacattcacttagcaaacagttgctgtttcagatagacacaaaggaggcatggggtgcccaaaactcagctaggacgtaaccagaacataaaaaccctgcaggagcagcatcctcaggaagggacaggcactccagggagagaggcagaagacctggggatgctttagagagcagtgggtatttggagattcagttcagaggctgcagaacacatgaagggtgggggcaatagggagacagaaatgagaaggagcaggatgaggctgggaaaaaggaggcaacctgatctcactgagtacaggttttgcgggagtaatgggatttaagtctgaaaagatatgttgggaggacttcatggtgttaggcaaaaatccagaactccattatacctcgcttggagaaaaagggctgtcttaaacgggttatctcatggaaacctgaggggaggaccaggggcatctctagaggggctggaaggacaaatagaaacacctcgtctacatctttcggtgctatctgggcagccccttcattctctcacaaagttcaggccttaccaagaaagaacctggaagtcactgaggaagtgtgcaccagggggtgatgtaatccaagttaactataggatcccctggcccggactgcctcagtttcccagccagtgccttccaaatctgcagtggccagtcccccaagcacaggttccccccaacaagcacactcctcgggctctgctccaccatcccagttccaggccagcatggccacacctccctagctacgacaaaaccccgcttgccgaggtagccctagcttacctcctcctcctgatttagacagcacggtggccccagctttacccagatggggtcgctgccctcagtcacagtgcagtgttcaaggtccctgagaagaatgcatttgacttagcgaagtggggatggggttggaggttgtcacagttggaaactaacagtcaagactcgaacccaccacaactggtatccagcaaagctccagccccttagcatcaaggcgtcaggcgccacaaacggccaccaggagacagcaatacctcccccttgatgggtggcgggatcccggagccaacgcagaccggacgtcggaacgccgctttagccccgggtgcgggcatctacccagcgcggagcctgcgggcaggctgggcgacggcacgggaggagggagtggctgggcggggccaccgagtttgggcggggcctctcgcggctgggcggggctgtggcgggccctgtcagagcagaactgagcaggcggtggagctgggtctggtccgggcacggagtgggggcttcgaagggaaaaggcggggctcctgggggcggagccatacctgtgggcgggacatgggaaaggagggcccgaggggcggagctacaatagaaagggccaggaggtgctgaggcgaggagaggccgaactccaagggacgacgctcgcggaagcagaggtttggggtgagtgcgagggccttgcgcgagctcagtagtgcaggggtaggtgagcggggcctgggtctgtgccgaggggcaagcagcaggaggggtggggtcgtggacgggacagtcgaggttag

SEQ ID NO: 42784 - DNA, 2300 bp, Homo sapien
tcactttggcctatattgtcttggccagagctcagtctcatggccacacatcctgcaagaggggctaggaaaggtagtccaagtccaagacaaaaggagaacaggttttggcatgcacatagcagtggctgccttataggccaggactctggactgagggaataatggccagcagagaattataatggctcattagtgggggtggcagtgggcagcctgccctggtagaagaggtgctgtcaggcattagctagtatgattcaaaagatatacaaataccttcattaatgcagtaagcatttactgcatgtccactatgtgccaggcagtaggccagacactggggccttgggaggagaacaaagctccccttggagctctgggtgagccattctactcctaacccttgtgctggaggcctagaggccagagagcctgggaaaggaagagggaagtggctaggtctttttaacttggctggtttgaatgcctcctacaacccaagaaatgcagcccatataggtcagcctggttcccactattagcaagcatccctctgcggtatattgaatgaaatgtaatatgggggaagagaaggcaacacatagtggacattctctttatagcttgctccctggttgttttcataggacgttgttttccttctgtgaggcatctaaggaaggtggtgggtctaggatatagggttatgtgtttgtgtctggctgctggtaaagttagggaattggcaccgtgtctcagaaccccctcagcagagctgatggcagcacagggaggacccagtgctctacatccttgcttttttcgtattattggctattcatgttagaagctgttgctgttgttaatttcctagtgggcctggctgaaattgaagcggcgggttgagctctgggcagacacagcatttagtcaacagccattgggcatccgctctctgcccgatctctgtccaagtccaccggcactcctctcactggagcggccagtgatgcgggcttggtaactgatatgtaggggaatggcagtagcctccaggaaggtcttcaaaatgagctaagaaaataggcgtagaggacatatttaatacagattggaatagaccatggagggaaggtttttattcttttttggagatttttgggtagaaaatcatatcactagaagcaagaatgtagcctgggtaatatctggaacactttcaaactgcatgcattgatgtgttgcccattttcagctaagagagggaggactacaaaaggttaaatttctcatataagattaattcagccatctctgtgaaatggtggaagcagaatgccattagactctctaatctcatttctctcatgctgtctttcttggagcctgtcaaacagtgtcctggcagagagtcagttctctggttgctaaacatcagagtcagtctctttctgcatgtgccaagagggctgtaatttagaaaatgcaacctaccttttaaggaaggatgaaaaggtactaaatgcacctttctttgcatgttagatcccaaatgttttgaatatagtaaacatgttattcctatataattttattttctatgttatcgtagagttatttgcatgacatattagaatcaaacttattaaaactgtttatattttgtggatctcatgtggtttcatgagtattgcttgagtgctaaatatactaactaataagatttgtgccttttgagtgtgcaactgtgcattcaggatgaaaacgtagtaacaattttgcccttgttttaattactcttcaacaacatgtgatttttgaaatctgatttaagcctttttggggggtgggtagctgctgctatgtaaaaagctgaatatacttggacattagattttctgttagttctggtcttttttcatattgccacataaaaatcctaaattaaagggggacagagggtggagcctaccacgattgtgaagtttctttctcttacttaaaatatagcattaaataatgctggttatttttatgttgcatatttgggacaaagagctctcttaaatgaaagataattgcaagatccggttcagcagctttgtcccttgcctcaagtttactgcagggcttctctcctctctggttatacagaaatgaaattataaaccaccagtaaccttggaaatttcaatcgattccaaatgactaaatatttaattgaatcattgcctatacttccagggatgactctggcgtttgctttttattgagggctccatgaaagccaggctctg

SEQ ID NO: 42785 - DNA, 2300 bp, Homo sapien
aagacttagccagcttttgctagtggaaaagtcctcacctcatttcagagaaactttctgacaagttctattttaaaataaatcatgcttaagtggctgaaaattatgcagtttacttactcatcagggtagctatagagaatatcattttattaaatttcttttatatggtggtttttattatttacctatatttaatgtcctataattcattataggatttctttttcctatgatttgtaaagaccctggataaattgggttaaaaaccattttctttgatgacttctgtgctttgttttttggatggctgtcaggaacaactctcaagttttctgtcctctcttctatgtgcttcttaaaagacaaatatacaaagttttttcctaagagaaaaaaaaatgtatttttgttgttgttgttgagactgagtctcgctctgtcgcccaggctggagtgcagtggcgcaatctcggctcactgcaacctctgactccctggttcatgcgattctcctgcctcagcctcctgacgagtagctgggattacaggcacagccaccatgcccagctaatttttgtatttttagtagagacagggtttcaccatgttggccaggatggtctcaatctcctgacctcgtgatcccgcccaccttggcctcccaaagtgctaggattacaggtgtgagccaccgcacccggccaagaaaaaaaagtttttaaggaaaaaaaaacccttccctatttcctggctctgagaggatcagcgtgtacagccctcccgtggtagaatggcggctgcacagctcccagcaggcacggtgcagtgcacagctcccagcagtgcttagtcagatgcactcactcatctttcaaggagggtactgtctgtctggggagatgagccctaagaaaatgaaaaagataatgagctgtatgttttctaatagctggttagaaataggccttgtgggaacaggactagctttttaccaagatgttcctgcagctcagcacccagggcagtggggacaggagagagaagctgacacagcgtaggtcattggaatttcatttccattccgtctacattcgctgcctgcccgcctctgtgggcaccagtgttaactgggcaggcctcgcttcctgctcccattcctcctctcttagccaggaccacttgatacctatttcaggcttgtacccaccccgggttctgtaacaatcctagctcaagagaggaaatgtttaagaagcactaaagcaacattctgaaagtcactgacaagttcactgtaccagtgggcctgctgtgacccactgccgctgctttaaccaccagcactgacctcattcccaaaaccaagtgctcctctagggggaactgcaggcatagccatgggatctgggtccctggtttatgggaggggctcaggtcctcatcttgacgtctgcccagaatccagtggttctcagctgggggctgagcccagaatcacagggaaggctgaaggcagagccagctaggagaggtacagttcctacttcacttgttacaagtctgtgttttgaatttttacaaccaccatacattatttgttatcattttaaagtaccaatagaatgaactacttattactttttattttttttaagagagagagagagagagagagacagggtctagctctgtcccaggctggagtgcagtggtgcaatcatagttcaattctccctcgttggcctaccaaagcactagaattacaggcgtgagccaccatgcccagccagaactacttattgttaatcaaacttatgaaataaagatttaatgcctatgtcctacaacagacctgccatatcagggtctccaggagcaagaaccccaccaggcccctgtcccaaggtggagacagacacctatatcaaagcataaaatagatctcattgtgctaagtgttaataaaggtctgaataataaagtgctgtggcatgcctgaggaggaagtggttaagggttaagtccaagcctgtttctgaatcctggccctggggctgaagcctgccaccacctgtcctgcagcccaactctctgaatattgccacgtctgtctgcctgtcagcacagcgttggagccccttggtagacttacttgatgccaagtacccccctggtgtctgtggtcattgtgcatagatcttggtctaaaaggctgcctgaacttcctccatacgtgtcaccactgccaccctccctcaccccaccccaaacacacacacaggccttatctctaaact

SEQ ID NO: 42786 - DNA, 2300 bp, Homo sapien
ctatatagggggaaaaaaacactgtgtctcaaccccaccaacagtttaatgaattatgttttattattcttgcttttcaaataaggaaataggcttaggaaggggcaatggtttgaacctgcaagttctttgactccagagcccttgctttccccacgtctgccatgcagagccaggctcagtgccttgtgtcagctggatctggctggtgtttttcatgttaaactaatttgtaagctttatgagcttgtatctgtgtttttcctttttttctggaagtttcttgcttcacagtgtagcataaaaaaaacccaaggactattttagagcattcttccaaatcagcagcattagagccacccacaatttgacaagagtcacaggtctgaggagtgatgtagcaagggcaagaggtggaccctactgatcaggctgatggtgctttgcctatgaaaagggggcaggaggctgttctggcaacattatttgtctacaaaggccaagaagtgagttctgcacactcacgggaagggaagccatcggccacagggtaggagcaccctgcctacataatcctttctgtgtacccgactggctgagtcacacagaaaatcatctaactgcagtgtctgcctatggagttggaggcattgatccactctgcacacaccaagtgcctcctctccagaggaggtcatgtccattgggggaaggacggaagtaaacaagggatcacaaagcagtgataaatgctgtgataagaatacacatctagtgctcgagttatcaagcattagatgctgtgggagtacagaagggcagttgcctaagtctttaaggataggcttgtggtcaggactgaaaaatgttggttgctagaaccatcaagtgactgcaacatatcagatgactgtcttcatcataccggttagcctttgagtgcttcacatgtcttatatacattaccttgcttcacaactctcctggaagataatggtcatccccacttagagatgaggaaacacaaggcccagagagggattacaagccaagcctcttactcccatgccctggctctttccagaattacaccagcattccaccacagctgcctgcacccagagtgttgggtatgaatcgggtacaactggtgagatccaacagtgcctcatcattcgacttgggtgcacacgggagaaggtggcattaaaatccacagggaactcaaaatatggaggcaggtagatgaagattcaagagtcaggactccctgtgaagtgagtgacacttaagagggggagtggagcccagatctgtcacacatacggcgtgggggaccccacctaccactggtcctcagcacctggagacccgagccttcagcaatctgggaagcatgaaagtgggtttcggtgcacagggccacgcctccgccgccagcagcccagcgggagcgtctgaccagtctcgccctccgagaggagagagaggcggcccaggacggtctgcttagaggctctctcccctgcagagctgggcccaggcataggtcagacgcctccaatacagtccccagggcagcgattaaagcggagcaggaactgcagacccgaccgggcaggacaggtgcagcttctcggagttgggggcgggaagtctcgggctgaggcccacgtgcttcgccttcgccccgcctctaccctcattggttgaagccagattgagaggaggtgccagaaaaaaaactcctccctccaacctcattggccagctcagttctgaggcagctctctggccccgtctatgggctcgcactacactccaattgggtggttgttctcccagacggaaactccgccccacctgtaccttggaccgctccgccctaggggcggttccagcgcgcttcgctaatcggttctatgctcccattggtctgctttaatgtgaagggcgggtcctagctgattcgctagccccgccttgcgttcctattggctgctcctgctctgcggttccgatcccgcccagcaccgtcccccaccccccgccgcccattggctgcgagaggccggtgcgggccgcactcgcagggcccgtggcggttcaggcgccagagctggccgatcggcgttggccgccgacatgacgcccgaggacccagaggaaacccagccgcttctggggcctcctggcggcaggtgagctccggggaacccgggcccggatgcggcctcgccctcccgcccctccgcgtccgctccgctcaccctcggccctgtccccccagcgcgccccgc

SEQ ID NO: 42787 - DNA, 2300 bp, Homo sapien
actgcgaccaggatgatctttctaagcagtgtgtctgtgcttcaggacacacaagggccaagttagggcagccagggtcatgacccttttggctgctgttggaaggggaggggtgacacttgctcctgggtgctcccttatctccacatacgctatatcagcggggtggggacagcctgaggctggccagagctttcttgggggcccttctcccatcttccttctgccacctcaggcctcctcaacacaggaggccagacagaggggcaagtttgcctcattctggcctcctggtcccagggatatgaaacacttcctcttccctaagtgtcctatccatcccagtctagttatgcttcctctcctcaaggtagcaagatttctctgacaagaaacttctctctagccacttgagcccaacgcctcttctcaggagatgggattcaggactctcaagtgtgggaggagtacattagcaacactgggaacatttcctgatcacggattcaattctgaaacgaccacggcagtgagtctagagtgaggccaggtatcccccagtgatccaaaaagcactctggatgcagctttcctgagagctgacaggtctgggatacctctgccagcctgacagccagctggatcctagattcccggtatccattcacttccatctggttttctaatcctgctgtggtcagcagaataccaccccccaaagatatacatgtcctaatccccggaacctctgaatatgttaggttacatgacaaaagggaataaaattgcaaatggaattaaggttgctaatcagctggccttaacgattctcctcaattagctgggtgagcccagtgttaaccatgagggtccttaaaagtggaagagggctgcggaggagagagaaccatacagagggcagcaatggacggactctggctgaggttgctactttgaagttggaagaaggggctgcgagtcaaggatgcaggcagcctctggaagttggaaaaggcaagaaaagattctcccctggaacctccagaaggaatgcagcactgtcgacaccttgattttagcccagtgagacccacttcagacttcttacaaaactgtaagccccaaactacagctgcccaatatagagaagggctagctcaaagacatttgtgagtgtggcttctccgatggagccaatcccattaagattcataggaagacccacaaaattaagaaacttacactggcaaaaatgccaccggctgtgattgaaagggaaagagacaagacaaaatgaaaaggagccttagaatccccatactcacttatttcctgggtaacccagtcccctccccttaacgacaaaatgcctataaaaaggagctgatcatcgaaaaattgcttaagaagtaatttccaaagggctcgagggaaagtccattgaaacatccccagcctgcagcagggaagcccttaaggaacacaggattcaggaatctcctcccgcagaagtgctgatcaaacactgcccctgaaatgactgaagcagttcccgccggccgataggtttttatactttgagggtcccaggccacccactcacggctgtcctgttcagactgagggacttctgatttcctttagtcttcccaaacttttagtacggctcaagaggaccctgagagtggctggtgattgccctgagtggaaggccaacgagggacaggcgtaccgtgcgcagagagctgcggagaggaaaccaagcgcctagcgccagcgaagatcggcgcccctgtaagcccagcattcccagaatccttcgcggctaaatctcttcttttcctcgaggctccatttcgttggattctggtggactttaaagacgtgtgcaacaaaaaagcacgatggataatagattccgggagcaagcacaggcggaagcctctctgggaagtacaatccctgagcgtgtgtgtatcataaaccgggctgcaggaatgaaaaagactttggccagaaacagagccccgcggcgacttctgggaaatggagtccggtgtggccgccgcggggcatgtgcgcatgaccggaagtggcgccaatcaggcgcgtccctctggcgctggagccaggacctggcgttgggcggtacttggacagcggttcttgagctctcgcggttgccggtagattgttgccagttgccagttgccagtcgtttttcggaaagctggcagcggctttttcaccgggttctgcttgaggccgagccaaagagtggctgtgactcgggagacgga

SEQ ID NO: 42788 - DNA, 2300 bp, Homo sapien
atactgccatgcacgctggctctcaaaaatcatggccacacactgtccaagtctttgccctaggtccgtactcttgacaaagcctccccaacaaggtgaaatcactctcggctcaccactggtggcagaaatactcttcaggaatcccagagggttgctacctgtccccccaccctcctctcccgaaaccaagcacaagcaaatacctgggcctgtctgttctgaatggtcagtttcactgtaatcctcaggcccttccagtcacccgttgccttggcaatgtcatcaccaactttttttggagactagaaataaaggcatgtaatcaacatggtgtccagaggtgaaccacagccttgaaacctgcccaccacttctcacttggcaacaaaggaagctatctcaagtacctaagggcaccttctcaatcagagcacagctatcaccatagcataaattgggggttggggttcttgtccagaactgtaaactgcagacttggccacaatgtaacctagaccccctcctaagtgcccatgtgcttaaggagggggattttcagccctgctgacattagaatcacctaaggagctttcaaaatactaggctcccatgtcagaccacccacgtccatcttcctggatggaggtctgattatttgctactctgaagttctcctcctctagtaatccttagcctcaacaggaggctaagtgtcccttaagtgccagctaacggccaaggaagaatagttaagatacaggttaaaaaagaccaatggggaagagcatttggggcaggggagcactgtgcaaggattaaataaaggcctaatgaaattcagagaaatccaagaggacagaatgacggggaagccagcagttgctcagcaggcatgagacacagcctgccacattaactgctaggtttacatctacaacacagctggaaacgctcactggatcttcacccacaccccgtttaatctcccaacaacgccatgcccacttcctgacgaggaaatacagatgttggctgcccaatgtctctaagccagtcctaacttcaaaactcccccttgggcccacccctcaggtacactaaagcagcagtggagacacatggagctaattacaatttaaaggcaccaggttcgatttttcacacacgaccttcctaaggtacctagtacttgttcagtggctcaggcctactgagggtgacagtccaagccacgagggcacctctggcacaggcgtgactccacgagccggcgcttaaagtgaaacaaatgtgaaaaaaatgccccttggaggggataacgtaccagacccagggggccgatcttgggggccagggcagaagtggcaccgacttcacctccggtgcacctcaggtatactgggggaaaagaagagttagtgtctgtgcagagggagccccgagccacagccctctcagcgtctttccggggttggacacgccaccctctgcctcttctcgaaacagcacagagcgcgaggcgggccacccgctcctccctcgggtgtgggcagctccgaaactcacaccggggaggcgtggagagagccccgtcgcccgctaacccaggccaatggggcgaaacgcccggagacaagccttaccctagggcgtgcgggctcccaagccgccacaggtggtccagtcctccctccccacctacacgtgaagaagctaaggcccagaaaggctgaggcttggccggggcggcgcaacaccgggaaggtctctgggaggcagcggctttaagagccccatacggggaaagctttgcacgcgcggcagggccgagggatgctccatcccgcagccccggccacaaccagagcacgcaccgactttgatctcgttggggtcgaacttcggcggcatggtggaggcggctggtgtcggatgaacccggattcgggacgaccgaaggaagttgcaccttggcctcctccgagccgaaagccgagaggccggaaatcgcgcggacaagccagatataggcaggaaaacgcggctatcgcgagaactgtcgtcactgcccggccttccagagacgcccttgtcgccatgtttgttgtgggcaggcgcctgaggctgacggctggcaagcagggcaccgcggtgcgctgaagctagagattccgaaagggggttcgggtagttcgctccggagaagtctgagaagggtggctccggtgatcccagccctagctgtttcccatattcctttatcgtgagtgtcaccccggtccccgtcacccaatccc

SEQ ID NO: 42789 - DNA, 2300 bp, Homo sapien
gttaagatacaggttaaaaaagaccaatggggaagagcatttggggcaggggagcactgtgcaaggattaaataaaggcctaatgaaattcagagaaatccaagaggacagaatgacggggaagccagcagttgctcagcaggcatgagacacagcctgccacattaactgctaggtttacatctacaacacagctggaaacgctcactggatcttcacccacaccccgtttaatctcccaacaacgccatgcccacttcctgacgaggaaatacagatgttggctgcccaatgtctctaagccagtcctaacttcaaaactcccccttgggcccacccctcaggtacactaaagcagcagtggagacacatggagctaattacaatttaaaggcaccaggttcgatttttcacacacgaccttcctaaggtacctagtacttgttcagtggctcaggcctactgagggtgacagtccaagccacgagggcacctctggcacaggcgtgactccacgagccggcgcttaaagtgaaacaaatgtgaaaaaaatgccccttggaggggataacgtaccagacccagggggccgatcttgggggccagggcagaagtggcaccgacttcacctccggtgcacctcaggtatactgggggaaaagaagagttagtgtctgtgcagagggagccccgagccacagccctctcagcgtctttccggggttggacacgccaccctctgcctcttctcgaaacagcacagagcgcgaggcgggccacccgctcctccctcgggtgtgggcagctccgaaactcacaccggggaggcgtggagagagccccgtcgcccgctaacccaggccaatggggcgaaacgcccggagacaagccttaccctagggcgtgcgggctcccaagccgccacaggtggtccagtcctccctccccacctacacgtgaagaagctaaggcccagaaaggctgaggcttggccggggcggcgcaacaccgggaaggtctctgggaggcagcggctttaagagccccatacggggaaagctttgcacgcgcggcagggccgagggatgctccatcccgcagccccggccacaaccagagcacgcaccgactttgatctcgttggggtcgaacttcggcggcatggtggaggcggctggtgtcggatgaacccggattcgggacgaccgaaggaagttgcaccttggcctcctccgagccgaaagccgagaggccggaaatcgcgcggacaagccagatataggcaggaaaacgcggctatcgcgagaactgtcgtcactgcccggccttccagagacgcccttgtcgccatgtttgttgtgggcaggcgcctgaggctgacggctggcaagcagggcaccgcggtgcgctgaagctagagattccgaaagggggttcgggtagttcgctccggagaagtctgagaagggtggctccggtgatcccagccctagctgtttcccatattcctttatcgtgagtgtcaccccggtccccgtcacccaatcccagagccccgcccctcccctgaggggtccgtagtcccattccgagaccccagtaccgcggcgacccctgctccctcgagcacttgttgtgtgcactttagttatcaaaacagtctatgtggaaatccagtcccgctcttcattcggagagtccgcgattcctagagcctcagacttcgtcatcccggtctgcgtgactttatgagattctgagtttctgttcccagcacctgcctttgaaggagaccagactccggctccgcccggcccgtgccgggtggtctgcggccccgagtccgtgaccaagccctccgagtgatcggcctgccctcgggtgcacccgcgggtcccaacgtgggggatccctccatccgcaaagccaggtcagccactgcccaccccaccccaggaaatatgggtgtggccctccccccgcatctaggctggacgtcggagagggagggacaggcatgtggggcagcctggaaagaactgatcttcggggaggggtgggagagcgatggtggttgggaggaagtggggagggctgcacatcaggaagggggtgcaagagggttagtgattggggagcagaagggtaagtgctggtcatcagggacggatgggggagggctgttttcaaaccattccccatccttgcaggcaggtggggtgacaagagggcctgaactggctctgcaggcctggctgcctccccagacagccccgcccccgtgggtgcagagctgccat

SEQ ID NO: 42790 - DNA, 2300 bp, Homo sapien
gggagctcaactacatcatgaccaaagagacctctgcggtgaatacaaattaaaaagcaattctcagcttaccaccctcgttattattccattttgttctcaccataaccctttttaaagtgaagaaacacgccgggtgtggtggctcatgcctgtaatcccagcactttgggaggccaagacaggtgggtcacttgagcccaggagttcgagaccagcctgggtaacatggtcaaaccccgtctctactaaaaatacacaaagaagctgggcgtggtgatatgcgcctgtagtcccagccacttggaaggctgaggaacgagaattgcttgaacccaggaggcagaggttgcagtgagccaagatcatgccactgcactccagcctgggtgacagagggagtctctgtctcagaaaataataataaataaataaataaagtgaagaagtagatgcttattaagttcagtggcctggctgtacagcctggattgcagcctggaaccgtggtctctcaagtcctgacctatgggatttgcccgactgcttggtgctcacataacttggcacacacgaagtacactgtcctgaactcagagccaggtgctcactgcctgcccagggcctgcacagtgtctgtaaataccagagctggataagggatggcaatgagccaggaggcaatcacccagggaagtgcatggtgagcagcacaggctttgggatgaaaagagaactgggtttgaatccgaaatctgccacccacaactgcagaggtcaccttggttcacctctcagagcctcagtttcctcatctgtaaagtgtgagtaaccatgctaccaacactggcttctatgaggatccagcgacttcatgtatgtcaagcccctagtacagtacctggcacatgagcgctcaataaatgttagccacaaagcaacccacatgcaagcaacattgattcagggcccgctagaggagctagggagaagatagtcatgggaggagatgcagttgaagaagacatacacccagtcctcagagggatgggcaaagatggcagctctgcacccacgggggcggggctgtctggggaggcagccaggcctgcagagccagttcaggccctcttgtcaccccacctgcctgcaaggatggggaatggtttgaaaacagccctcccccatccgtccctgatgaccagcacttacccttctgctccccaatcactaaccctcttgcacccccttcctgatgtgcagccctccccacttcctcccaaccaccatcgctctcccacccctccccgaagatcagttctttccaggctgccccacatgcctgtccctccctctccgacgtccagcctagatgcggggggagggccacacccatatttcctggggtggggtgggcagtggctgacctggctttgcggatggagggatcccccacgttgggacccgcgggtgcacccgagggcaggccgatcactcggagggcttggtcacggactcggggccgcagaccacccggcacgggccgggcggagccggagtctggtctccttcaaaggcaggtgctgggaacagaaactcagaatctcataaagtcacgcagaccgggatgacgaagtctgaggctctaggaatcgcggactctccgaatgaagagcgggactggatttccacatagactgttttgataactaaagtgcacacaacaagtgctcgagggagcaggggtcgccgcggtactggggtctcggaatgggactacggacccctcaggggaggggcggggctctgggattgggtgacggggaccggggtgacactcacgataaaggaatatgggaaacagctagggctgggatcaccggagccacccttctcagacttctccggagcgaactacccgaaccccctttcggaatctctagcttcagcgcaccgcggtgccctgcttgccagccgtcagcctcaggcgcctgcccacaacaaacatggcgacaagggcgtctctggaaggccgggcagtgacgacagttctcgcgatagccgcgttttcctgcctatatctggcttgtccgcgcgatttccggcctctcggctttcggctcggaggaggccaaggtgcaacttccttcggtcgtcccgaatccgggttcatccgacaccagccgcctccaccatgccgccgaagttcgaccccaacgagatcaaagtcggtgcgtgctctggttgtggccggggctgcgggatggagcatccctcggccctgccgcgcgtgcaaagct

SEQ ID NO: 42791 - DNA, 2300 bp, Homo sapien
cttttacaaggagaatatattgagatgttatctgtataattgaagattaattttaaaattatattcctaccattagtataggcaaaatcctatttataggttgctgcttttataattcagagactgatcctgttctcaaaacaggataactaaatagaaggaccattcaaaaaatacctgtgtgccaggcgcagtggctcacgcctataatcccagcactttgggaggccgagtcgggtggatgcttgagctcaggagtttgagaccatcctgggtaacatagcaagaccttgtctctaccaaaaatacaaaaaattagccaggcatggtggtgcgtgcctgcagtctcagcaacttaggaggctgaggtgggaggatcactagagcccaggaggtcgcggctgcagtgagctgagattgtgccactgcactccagcgtgggcaagagtgagactccatcacaaagaaaaaacttgtgtgggccgggcgcagtggctcatgcctataatcccagcactttgggaggccgaggcaaatggatcacctgaggtcaggagttcgagaccagcttggccaatatggtgaaaccctgtctctattaaaaatacagaaaatcagccgggtgtggtggtgggtgcctgtaatcccagctactcaggaggctgaggcaggagaattgcttgaacccaggaggtggaggttgcagtgagccaagattgtgccattattgcactccagcctgggcaacaagagcaaaactccgtctcaaaaaaaaaaaaaaaaaagaagaacctaactcttgtgtatatgtgtattgctgtttaattacatcaataataaattaattaattaaacaccaataattacattacattattgatgtttaatacctgctccttgttataaatttaaacaatacagacaattacaaaccaagtgaatgtcaacccttccaccctgcactcccgttgcctggaggtagtcatcattaactgattaatgactgtccttcttgacctttgactcaataccttcacacatatgctcagagttgagttttcttgatgatgtttttgcaaaagtagaatcatgctacacacaggtgagggatctcacacattcgccccattggcggttgtgtaatagtccactgtatggatgcaccatgacttacggacagatgttgatagatgtatgagttatttccagtgtttttgctcttttgaataattctgcaggaagttgtacccacacctttgtgcactgtgagtattttggtggactggaaccgggtgctgtaggtgtgttacgcagacatccatgggcatcagatatcccatttcctgctctgctcttcagaccaccatccctgctcagggctgcatcccagaactgtcttgaagagcccctcctacagtgccatgcacacagtgacagcccaggggttctcatcaggtgtccactggaaccacctggtgcccttgatcaatacggatcccctcatcccccgaccccaccattctgaggcagtggtctggggtgggccagagtttgtataacatcaggccacccgggggttcctggtgcccatgccagggagaaccactgctgccaccctctcttgaccactgtctttttttcctcccagaacaggttctcagactatgagaagaggaaggtaagaaaatgcctttacccttctgtcactcttttctcattaaagatctcaactcaactcataaaatatttgagaaaatgacttcttcccagctcagaattagaggtcacagtaatgccttcctcttacacgcagtctgctgcatcctcacatgcctcaggtgggtggtagagcatccatgggacaggtgcagagactgaggctcagaggggttgagcccagcaccgggctctagaccactagcctcttcctgtgaacagcttgttttcttacagttgggccctggaggggagtgggggttgctcagcatgaagacctggagcctgccctgtcagtgttgaggggtggattctcccgacttctgtgtcctaactcccccagggcctgtgctgacagtcaccaggatctgtgtcttgcaggaacagaagatgctggagaaactcgagtttgaacggcgcctggaactggggcagcgggagcacacccagctccttcagcagagcagcagccagaaggatgagatccttcagacggtcaaggaggtttgtgagccgcctgctagggtccagcctggctgcatcccccagccagtggcctcctggcttgggccaaggtccctcgg

SEQ ID NO: 42792 - DNA, 2300 bp, Homo sapien
agagtcactccaggtatgtagggctccctgcccctgccctccttcacgtggtgagacccccacctggtgctccctcccagcctctggcagctgctcaccagcccctgggagtcaagggcttccccagcagacagagggcagagctcctctgtggctgtgacaccagaggacaccccccagccccagaaggcccagcgcaggccaaggttagaggtggtcagcctgttgcgaggcaggagggtcagaggaaggagggtttcattgccaaggctcccctgctcatctccatcactgtgtctcctgtgctgggtgcgggcccgccgctgagctcctgtctctctctgtaggccgtgctttaggcccccaggcacacatcctccagggctggagcttttgggtgtcccgggttgtctggaggagagggcccagccgcatctgtgtaactccctgcaggcagcatctctggggctccagcccgggagtcctgcgcacacagatgagagggcagcagggactggcagctggcgtcctggactggatgcctgggagccgggtgtggcccagcacagccctgctgtgcaactttggcaggtgggggaggagaggcagccctttcccctctctgaacctcagcctctccagctgcagacggagggctggatgggatggtgtgtgaggacatgtgcctgtgccaggagtttgagcagagccttcggtctgtcactgtccctgtgtctgttctcagtggagaagtctcaagccatcccatggactcctcagtgcagtgaagggtctgggatctggatccctggtctcaggtgcaccgcaggtgtgctgtgtgcccttagacaggcctctgcccctccaggccttcttcccctactccataagatggcagcggtcctccaggcccagcctgtgccatcaggccatcggagaaggctgagctagcaagggaaagccctttgtgagccttgaaatgatctccagagatgaggggactgggactgctctcagagaagctgcggtcatcatgcctggcgggtgccctagtccctgcccacaagtgtggcagggctctggctgttggggcccccatggggtttccaagagcaggcgcaggagtgaagcagggaccccaggctctggtttgcacgcacctccatttgtgtggggccccacactgctccccgccatttgcttctgcccatgtgctctgttgtctgggagaccaaaggcaggcacctgtggcttgtcatttcttttgtttgatgtttcttaccatcccattgtcatcagtcaccaggatcccatgcctgacttaaccccacaaggaagagagatgcgggcttagggtaagggggcagaagggcctcttagctttgtcccccaacgcagcctggaggcattgggcagagaaccgagtgagcgggaggccaggcccttctccatcctgccactgcgggactcctgcgctgccgccagctcacggtggtgcggggtgtggtcttgttcgcaggagatgatctcggagcagcgctgggccctcagctccctgctccagcagctgctcaaagagaagcagcagcgagaggaagagctccgggaaatcctggtatgtgtttggcttctgtgctcagcatcacacaggcatttgcttttctttaacagacttgccatttttagaaacacctgttattcaagtaagagttattcatcaaagaaaaactggaaagtacaaaggaaaataattgcatttccaagcgttatctcctgccattttttatttgtttgtttgagacagggtctcactctgtcgcccaggctggagtgcagtggcgcaatctcagctcactgcagccttgacttcctgggctcaagcgatcctcccacctcagcttcccgagtagctgggactacaggcatgtgccaccatgcctggcaaatttttttattttttgtagagatggggtttcgctatgttgcccaggctggtctccaactcccgggctcaaacgatctgtctgccttggcctccgaaagtgctggttttacaggcatgagccaccgcgcctagcctctcctgcggttttgatgcatattttccaaacattgtgatgcacctttatagctgttcgtgtatgcgccttttaaacgtggcatgctgcatacccttttcgagcagcctgtttccgcacattcttttcaagtcattaaactattccttgacgtcctttctcaaggctgtccgtggcccctattgttgagtatgtggattacttctggtttttaaacttttc

SEQ ID NO: 42793 - DNA, 2300 bp, Homo sapien
ctcctcacgggatggatccggaggttcctcaacgtggttcatgcacagcggtgggcaggtgccgggctcccagatcatgctcagcacatggcagaccccagactccacacctgccccttctccccacgggcctcacgacctgcctttgccccttcacagcctgttgtggacatctctccatgtccacaggcatgcctcaggcccagcattgggtatactgcaggccctggggacgggctatttctccctctagtccaaagtccctcagtgtgtggatcccagcgtctgtagggtggactgagggaaggctatgggacagggagctgggagggcccctccactgctacgtggaggtctcctgttctcccaatttggtggcccatttttcccatctgtaaaatgggctcactgatccctaagcctgctccttgggaggaaaccttaccgaccagcagaggctagaaccagccctcaggagtcatcctgaaatgtaagcaaatgactgtccccaccagagcccacacatacggctggagccctgcctggaagaggctggagctgtgcttgtacctggctggatcctggctgcatccagcagttcctggactctccggaggatctcgtgctgcaggccagcttctgagacgcccacctgtgacagttcaaggaagtgcagactgtggcctgggcgggagcccgctaaatggtgtgagccacgtggcacaggcccaggctcacaggaccgtcgacacctcctgctggaaatgtggaagccttccggggcctggcggggcccacggtcaggatgaggcagtgcggcaccatagctgtgagggcaacctccccaggcctcagcccaacaatcagtgtggcaggggttggggggaaactgaggcccaaagggaaaccagcactagcaacagctatggtttagcaactgcttcccggtgccaggcttcacctgcacacctcagccacttccccaccaggtgggggaggagagaagccttggaggccaagccactaagcagcagcagcacacgagccccacagtccctcagcctccagagcctgagcggcatggccttgtgaccctcagtgccatccagtcctcttggaccctggtgtctgcatctgtccagggaggggcaggagagtctcatgaaaaagaacacgaactctggggccacactgcttggggtggagacctcactctgctgtgtgaccttgggccaagttattgccttactgggtctcaactgaaagatgatgataatgatatgtaccctgctgggctgtcgggagaattcagtgagttcgaatacaaaaagtgcttaaaatggtgccccgcacgtgcaggtgctacaaagttagctggcacagcgatgagtattctgttttgaagaataagtggattaatgtgctgtaaagagctcagcttgtgcccagaaaggaacaggggctcaggcagtgctgtggccacgacagtttgtgacaccatgaggcagggcagaggctggatcagataagccccaagggcctgtcttgtccctccagtctgaagatccagtctgatcaggtcagcaggacccacctccccaggatttcccagtgagacagtgtgcagggcacacacaggcggctggggcagatgggcaggtgttctggccatctggaagcaaggtggccctgggccattaggtaaggacaggcctcaacgaggactacacaaggagcagatcaacccccggctggtcaggacagcggccttgcgtgcccctcccctccatgcagacggctgctgcccaccttggccaggtcccctgggctcatttggctcagcaggtccagtgagaggcggtggtgcgcaaagatgggcaggtagtgctcagccgacagctcctccaggagggccaccagctggcgctccatcccctcttcctgcaagacagaaacgtgtaccatgagcaggaaggaagaaaagaacccactgtttacaacaggaaatgaagggtttgaatatttataacataatacatagaatgtactcgggatttttcctacaaaaactcataggtaggcacacagagatagatagatagataggcccaggggttcactgccgctctgtctgcaaacctgaaaatagtaagcaacttgaacatccaccaagagggggctgtttcaactgcctctctgtccccgcaggtgctggacagacagtggctcccggcacaggctttgctctactgtgggctcagtggtctctgccctgcacagcagtgaccagtgccttgtcg

SEQ ID NO: 42794 - DNA, 2300 bp, Homo sapien
ctgctggggactaggggcagaggctgtgaggccagggctgttggagtcctcgtggggcctgcagtttgaggaaagagggaacattagctcccggccaccagcctttagaaaccaagagtggtgctaaaatagaaaagaatttaacagaagagagggaaggagggaaggagaggaggggagagggaaggagggaaggagaggagggaaggagggaaggagaggagggaaggagggaaggagaggaggggagagggaagggcgggcttcaggtggagtaatgagattgataaggaagaattcacaagtcacgcgccctccaaatggagacagccgttgcccttacttgacctcagttatctggctctcggggtgaacgtccttccacagtctccatcttgggctggctgcccggagcccgcatagttgtcagattgaatttatcctgtatcttagtttcctcctttatactctgaaatggggagtccacagaccataataatcccagaatctgagacctggagaggaccttggagagcaggaaagctctctcccaattttgaagctgaggaaactgaggctcagagagggtgaatgacttgcccaaggtcacccagcacctcagaagggatgagtgccttctgccggcaccgaggctgcctctccacagcgctgtgccactggactgcgccctccatgccttcagagcctcatgcttctgtcctgggccctcctgggtttacctttgtggccatgagcaccaggtggccatccctggtagcaggcgccagccccagggcctggacttcgaggacccaggcaaagtgtgtggggggtgctgcctggccacagggcggccctgctcagcccccgcggccccggcccctgcagtacatggagaagctgtcccggctggcgtaccaccccctgaagatgcagagctgctatgagaagatggagtcgctgcgactggacgggctgcagcagcgatttgatgtgtccagcacgtccgtgttcaagcagcgagcccagatccacatgcgggaggtagacccgaggctacgacccccaccccacaccctgtccactgccttccacaggccccctcgcccagggggtcccttctgctccgtcccgtcatgccatagccacgcttgcctggcacgctctctcctcctctgcttggaacatctgtgcctctgcccacctggctaattctgactcacttcccaggtctcagcttagagaccccttcctccaggaagctctccttgcgcccccaggccccttcccatatttcctgttgccttgaggcagggacttgctccagcgtgcagagctgtgagtgggcatagaccgcttgccattcctccctggcaggcctcggggtggggggctggttgaggatgaggacccctcagcggcacccaggaaggggctgtggtcaccctgggggcttcacatgtccgcggtatgccctgcagcaaatggacaatgccgtgtatacgttcgagaccctcctgcaccaggagctggggaaggggcccaccaaggaggagctgtgcaagtccatccagcgggtcctggagcgggtgctgaaggtgagcggccccacgccctgccccggaccgtcctaggcgaggccgagccccgagcctcatccccggccaccaccaggattgctgtccctgcaaggaggcgccatggtcctcttgtgcggatgaggactcggaggcttgggtcagaccactggcctcgtcctaccctcagggccaatggagcccactgacctgcagacccccgacccccttgttccctgcagaaatacgactacgacagcagctctgtgcggaagaggttcttccgggaggcgctgctgcagatcagcatcccgttcctgctcaagaagctggcccctacctgcaagtcggtgagcagcccccacctgctccagccgtttgggccctaagttgggggatggagcccacaggcctccctctacccttggccctgacctctcatctctgccgccccacccgggcaggagctgccccggttccaggagctgatcttcgaggactttgccaggttcatcctggtggaaaacacgtacgaggaggtggtgctgcagaccgtcatgaaggacatcctgcagggtgggtgccgtcccggggtggggactgttgccaggaggatgctgggggcgcagctgagaagtggtggcagctgagggggtcagctaaggctcaaagaaaagcccagacttgcacctggggtctgggtgaagcccactcttcgctgtg

SEQ ID NO: 42795 - DNA, 2300 bp, Homo sapien
gggattacaggtgcctgccaccatgcccagctaatttttgtatttttagtagagatggggttttgccatgttagccagactggtctcgaactcctgacctcaagtgatttcccccacctcagcctcccaaagtactgggattgcaggcatgagccaccacacccagcttcattctttaacaaagttattcaagcatctgtgccaggtactgacctggacttagcagtaacaggacagaccccgggcccagtggggcaggcagctggctcctcagttattgataaaaagtgtggcgcagagcagtgctggaccctgatctcctgtccctacactgtggcccagggagccccgcagtggacctgtgaggccattgttccattgttcagaagaggaaacaggccatttcgggttcagtgatctagaaccaggctctgaaacctatggcctatgggcccagatcagccaattgcctgtttctgtcaacaaagtttattggagcagaggcacgctcatttgtttctggatggtccgtggctgtttttgtgctgtgactgtagaggcgagcattgcgggaggggttttatggcctgccgggctgagaatatctgctgcctagcctgttccaggcaaagtttgaagggccctgatctagcagtaagggaggaactggggctcgaacaagggtctctgggtgcctctagggccattctgggtggctgcttatgggacgggagcttttagtcctggctctgccactccctgctctgtgaccctgggcccgtggcctgtcccctaacggttgtctcttcatctgtaatcatctgtaaagcaataaggtgaatgatagtgcccaggtcttggggtggttgggaggatttcaggagctaaggaggaggcaagggggctgccttgtcactgttggtggtggggtcattactgcttttgcctatcagatacaaccatgactgctctgatgacgaggaaagtgagggtcccagctgcccctcctgaggtgcatgccatgtgtgtggggggggttttggtcagttctcagttggtcttggtagaggccactgggccatctgctgacctcctctctccctccgtctcctgggcaggaatccctgaggactccaaggtagagggccctgcgttcacagatgccatccgcatgtaccgacagtccaaggagctgtacggcacctgggagatgctgtgtgggaacgaggtgcaggtgaggccagacgggctggtgaggaaacctcagaagtcacccaaggacccagcaggggagggcagggggtggggtacagagatggggctctggggcgctgccggtttggaaggagatgacatgcttagatttggacaagtgcagggccagtgcacgtggagatactcgctgtcttattcatcacttactgggcatctgagcacctaccctggacgaggcactggggtgcagctgggaatgatgtggacaaattcctggccctcagggagctctccgtatagcaggagaaacagacatttggcaaataaatgtacacttccatgtgcaggcaaagcagggagggagtatggtattctaggtagggaaggcagcctgtgcaaaggccctggggctggcccttgagtctgaggatcctacaggacacccaggcagatgagttgggacctgtgggaatggagctcaggagagagggcagcagggagggtgaagcaatgggccagtcgcggaggaggtgggggctgcagcggcctggcttgtgggaatgcagagagaaacaggccagctgagcgctctccagcccctggcctggcttgtgcctcctcaacctagatcctgagcaacctggtgatggaggagctgggccctgagctgaaggcagagctcggcccgcggctgaaggggaaaccgcaggagcggcagcggcagtggatccaggtgggtgggcctggggccctggagcggggacgggacctgcagctggtgcggtgccctcagccctggtgccaattcagctgctctgcccacagatctcggacgccgtgtaccacatggtgtacgagcaggccaaggcgcgcttcgaggaggtgctgtccaaggtgcagcaggtgcagccggccatgcaggccgtcatccgaactgacatggaccaaattatcacctccaaggagcaccttgccagcaagatccgaggtaggcagccacccccgtgctcgacgggccctccaggggccaaggtggactttctttttatttcatgattcatgtaaatttcacagcaatgacttgc

SEQ ID NO: 42796 - DNA, 2300 bp, Homo sapien
gtgtgccacgaagcctggggaaaggccactgtggccccatctctaacccccctggcctaggcctccagcccagccaagaagatgcctctggtgtccagatgccagctagctccagctagctcctccctgggcagaacagaccctgcagtttgggctatgagaaaaatgaaaagaggttatcagcatcacttgcttctggttgctcagagagaatcagacactgggtgccaggagacttggcctttggccaggttctccctctgcctcactgtgtgcccttagcaagtcactttccctctctgggcctcagtttccacctctataaaaggaaactagtgatccctaaccagcatgacttcaactccacctgatgatgactctttgacgcatgaatgcatcccggccctcaaaggctgggcccctgcccatgctgtccccactccctggaatgctgtttctcagtatctgctgtcaaaagtcttgtttttcaacttccagttctggtcctaccccctctgtgattttccttaaaacagaatgttctgctccttcctcaagcttctctaagctcttgagggcagggactatgaataatagaatgacacgttctgttcattgagagatgatggaccctggtgccaggcactatgctgggcactttgtgatatcatttaaccctcccgcaaaaagcatcattctcttttgacagatgaggtagctgaagttcaaaggggtaatgccacttgtccagggtcacagaggggagggcagcttgggcttccttctcttttcacccccagcatctagcagagggcctggcacacaggtgttgaccacccattgctgaatgactggtaagtgactgaatgcatgaatgaatgcctgcatcactttaatccatttcaaacctacctcctgtggtgtgcacaggcctgaagtacaggtgctcagcaaatttaactgttatcatcatcacttcctgccttatgccacagtcacactaagagctgcccaataacaacgtgaaatgcatgagagaagtggtgagtgcttagttaccaggggtcaacaagcagaaagtggatggccttgtcccagtgcagatcaggagatctgagcaccagcagccaaaggattgagatctggggatcccactggttaacctgactgtctcccctgccagcttgggaggtcctgaaactgaaacacattcccctggcactgcgacccacccatgcccagccccataggctggtgcctgtcggtctccgggttttgattctggtagtcttttgcaaactgtaaagtgctactgctttttccttttctgatttgctctgtcccccaagccgcctcccgagtgaaatgcccatatgctgagcctgaggcaagcccgcctggcactggggcgggggtgccttcgggcccgagccttccccacccccttcctatagctgttgtgcaagaccagcgggcacaccttctggggcaggtcgaatcaaggccagggaacttcctgagcgcgggcagtggcgggcgggacttgggggggcagggggcactgttcagggtagaggagggggcgaacgccgaattccggcccgtaggtccaggcgtcccctgccagtgccccacatcctcctcggcgcgattcttttcccgcgcgggcaaggttggggaggggaggggggtgacactcaggctggagtcccccagagcacccccagtttttcagatgtccccaccagccccgtctctttctctgcttaggtacagggcgggtgcgctcttcgcagtctctccgcggtctccctttctgggaccttctctttgtctccttctccagggcggtcccggcgtccaccgcccctgtgccccgcccgccggaggcagcggagggggcggggcatacggggcgggccctggaggggctgggtggggcgcaggggggtgcaggaccgagggcggggcggggcggggcggggtgggacgcggcgggcgcagggcagcgggcggggagggggcggggttggcctgcgggggcgtggtctggtggggcggagcggggcgccggggtgcagggccgagggcagggagggggccaaggcggccggctggagggacggggcccgaccgggagcggagccggagcggaagccgcagccgggcggcgggagcggcgggagcggcgggagcgggggaagcagggcgggccgggctccatggcgccagcggcgtccgcctgagcagcgcgggcaacagcggcggcgtcggccggatcgggccgcgacacctcctgg

SEQ ID NO: 42797 - DNA, 2300 bp, Homo sapien
tactttcccagtgaatctgttctgtctccgatggcctagttcaaacacctcctcctccaagaagccatcaggcctcgtgccacaccctccctgctggctcaaacctctatcatggccccatccaccttgtaacatcagaatgagaatccagtgcaggctgggcttgggggcacacacctgtaatcccagcattttaggaggctgaggcaggcagatggcttgagtctaggagttcaagaccagcctgggcaattacatctcttaaagaaaaaaaaaaaaaagaattgatgtaggctcttcccatctttcacactagatgctgacaatcatcacgagagagggtagctgccatttgatgagtgggccaggtgccatccgcggatgccctcattgccagcctacaataaccaggagagtggaaattactggctccattttacaaaaaaggatgcccagagtggtgagagccgatccgaggcctcacagctgtaatgaagttgaggaacttccacccgccactgcccactcaccccgagggcggccagaagcttccctgaatgggcagagaggaaggactttgcatcttcaaaactcttcagagttatgcaaagatgcctgacagggaggaaggggagctactttaaggtaaaaggcattcccttgaagatttccagagcagggcatccttggagaaagtaggtagcataggtagaaaaccaggctcggccgagtgcagtggctcacgcctgtaatcccagcactttgggaggccgaggcgggcggatcacttgaggccaggagttcgagaccagcctggccaacatggtgaaaccccatctgtactaaaaatacaaaaattacccgggtgtagtggcatgcacctgtcatcccagttactcgggaggctgaggcatgagaatcacttgaacccgggaagtggaggttgcaatgagctgagatcgcaccactggactccagccgtggctccatctcaaacaaaaacaaaaacaaacaaaaaaaccgacttagcacactgggaagaatttcacaaggtcacagttgttatggtcctctccacgatgtaactggacagcagaggggtctcaggcctggatttgggagtacagagaatatttcatcacccttggcaggaccagccaccttgacaggacacctagcatccctggatttcagacactaaatgccaagacccctccccttgccccacactcccccactcccacaaacaccagacatagtggcgatgaaaacacctccgtagacacatttccaaatgtcccctaggaggcggcaccatccccgcctcctcactcagggctccctgcacaaatgcgttgggtgatgggggctgaatccagcccacactgcacttgccaagccagctggggccctggcacaagacagtcccagcctgttttcactgactttgctaattctcacggaggcaccatgtggtgtgggaaggcccggtcctcgtaacctctctgctcccaggtccctgaccagtccttaacacacagtggtctttgctcacctgcggcccagctctgggctctccccacagcatcctttgccttgcctccctcccatcttcctctgggccttctctctgctcctgcccaggaaactgtgctctcaggagcgcaggagccagctctcagcccccatctcctgggcactcaccgtactcaggaaatatgttctgaattcaggattatcctcattctactgagaagacctggaggacagaaatcagcaagacctaaaggggagaggaaggagggccaggctggggtggaggtgccccacccgggagcccgggcgcagcctcaccgcaggctgattcacagaaggctcagagggttgcgagggcccaatcggcactgtcatcctgcccaggctctgagtcaccagctggtgaggggcagctgcagcccagcaggaaacaaagtctagcatggaagaggtgggagggaggtggtggggcctgaaaccccgcctggctggccttagaggaactgggagtgactgtccggcactggctcagcagcaaacagctctcaaggacgtgctaggagtcaggaactgggccagttccggtcccttccttttggggctctcactctggaggatggggtggatgggaggtaagacttgtgcacaagtccccaggacacaaggcacacggggttcttttttgtttgtttgtttagagaggaggttttgctctgtcactcaggctggagtgcagcggaatgatcatagctcaatgcagcctc

SEQ ID NO: 42798 - DNA, 2300 bp, Homo sapien
cacagcacatggcccagactttggccgcactcaataaacgcttgttgacccactgactggatgagtgacaagaggagcccttggccattcctactccttagctgctaaggaattttccagcttcaaatttatattttcatggcagatacagaaactgtggagtctctgctgatatgtgccagctggcgaaggaggaagcatgtggcattaccagtgcatcctaggtctccccatgtttacacactatctcctcctccaaatacacacaggggctatcaatatgtttcctgggcaaaaggcaaggcccagacatagagagttgacacattaacgcctcctctctctctgaacccatctgaaggttctgttgggggtagattggggtggtggtgagaagatggtcaaatctgcttgacttggggctggcgactgaagtaggacatgtagcctcttgtcctggctcagccaccactggcttctgtgactttggaaaattcctccttagttctcagcaggttttttgttttttgttttttgtttttgctcagtataagataatggttcagaattcagatcctagaattggatctttcctttgtcatttactaataaagcacttatccactctgaatctcaattcttcatctgtaaaatattattatgcatcttaataatatgaagattaaaaacctagctcaaatgtattccaaatatttaatgaatgttcactgatttttactactactagctctcttattcttttttatttttaattggctcaatttgtgttactttgaagccaaaagcaagccctcccccatatttcaaaagtagtatctgagaccatcctggccaacatagtgaaaccccgtctctactaaaaatacaaaaaattggccaggcgatggtggcgggcgcctgtaatcccagctactctgaggctgaggcaggagaatcacttgaacctgggaggcggaggttgcagtgagccaagatcgagccactgaactccagcctgggcgaaagtgcgagactctgcctcaaaaaaaaaaaaaaaaaaaaaaaaaaaaaaagaaaagaaaagaaaaaagaaaaagaaaagcagtatctcctattaacaaagaaagttgagcaaaaactgacctgggaccgctttaataaatacggactccaggaaggagatactgagaccagagtcggtcccacagtatattcgtatcagatttggggcttagaaacttctaaactctgagcgcccataagcaagatgagattctgccttgtacatggtcgtagctccaggggacagaataacggcttacacataaaagtgacagaatactgaacattagctaacggatgctacgctgcctgaaggtaagtctagtgctatttccaatatctccgagacttggtttttccaccggaaaatggagattaaaaataatgcccataggtatgagctaagaggagtgtaaacaaaacaaaataaaaagcaatgcccagtgattggaggatttgatgagatgatgcccgcgaggtgcttggcacggagtttgacacaagaactcagtgttggtgaatgcacgaatgcaggtacccagcgacagggaggtgctgtgggtggattcaccctggcttcgctgcggctgggagtgggcgctgctagtaagagatctcgcctccaagctccttccgtgggcaggaaaaaacggaagctcccagaaagaggaaagacaggacccgagcggggtttcaggcagatggagcgcgtcggtagcctgtggccagggatcccagcaccgacgggaaagaggaggcctgggtaccctgcgccccgggcgcgcgcggcgcgtgaggtgagggggagggcgcggctccgcaccagccagcggccgcctggcgcccagccgcatctcggggggcggggttgagcctccgggccgcagtgcgattggcggaggcgagtgggtgacgccaacggccggcgcgaggccccgcccccggcttgccccgcccccgcgcgcgccggcggcggggcagcctcgctctggctcgcgccgcgcccccgcgcccagtccgcgcgtcagtcggtccctagcgcggctgcggggcggagagctgcggctggcccagcgcgcccacctgaggaggcggcggggtccgcaggcgtcgcgggacgaggagatcggagccgggagactcgcgcagcgccatggcccccattggcctcaaagctgttgtcggagagagtaagtggagccgggatccttccagcaggcggggactgcggctcccga

SEQ ID NO: 42799 - DNA, 2300 bp, Homo sapien
caggcggatgccaccaggcctggttaattttttttttttttagagatgggggtcttgctatattgcccaggctggtctttaactcctggccttaagtgatcctcccaccttggcctctcaaagtgctgggattataggcatgaaccagtgcacctggccaagggcatgtttaatgatgcctggcctccctgcttccccagggcctaggtttcttccctccaaagtctcccagaggtgacagtgccccaggccactgtccactgtccttggccggtgctgcagtctgcatggctttgtgcactgcctgactcccctcagaagacccagctcctgcagggtttgtgtctcacagctccagcagctctgggcccatcagcctcagtctccaagactacggaaggcagctggagaagcgataatgagacagtgcccccatggcaagtagcggcctatggtccaaagtagggagctttggggagagtctccaagcaaaccccagaaagtgctctccctccaccctgcagcgtcccctccctgcctagaagttcagctcgtccctcttgccacgtggtgctgacaaagccatcctggtgctgatgaaggcgaggagggcaggtctccaagctgacaccctctgtgggctccaggctgcccgaggggctgtgggccccattaagctgggaattcagagctaccccctgcaatgggcctggggaaaagagaatagaaatgggggaggcacggggaggcccccggtcaactgggagcactgtgggaatttttgcctgcctaggctcctgtgggagcagctgttcaggcgggggagggggcaatgtccagcaggagcagggccatcgcattgagctggaagggcactgggccaggcctccccgctctccccacaaggcctgggcagccagagctccctcacttgtaagtgcactcaggctgaggcctgtgcagaagcatgggggtctcttccctctgccagtcacatttgtgccctcccagggctgccctgcctgcagggaacaggcaccctgggaagggcagaccaccacaggcgaggtccagggctgtcggaaattccaggcaggcctgcctaccacacaaagtgggcgggagcttcatgggccaccactcactaagtgcccccagcatccctggaccgtatccctgcacagggaactttacagatgcggtcttgtgaactctttcacagagcagggttcaggccattggcccaaggacccactggaggtcagacagagcccaaatgtgagcccacttttgaccaaccaatcacttctctgacctttctcatcaccaacagtaaaaatgcccccacctccctgtgtttctgacccgtcaccgtgaccccaagctctcctcatccccctgcccctgccccaagggtcctacaactcacaacatctagttgctccaagaaaccacatttgctgaagtaccactgccattccccttggctattgtcagagtttttcagggtggtgctatagccatctcttgctaagtgacaagccctgggatgacagggatggaaaggacctgcccgctgtcccacggagtgagtgcctgggctggtggggaacacaggcaggcacacaggcatggctggctgagattggggctggggatggagctcatagaggcacccagctgccagccagggccccatcagctggacgccccaatgcacccatgccaggacactgtcaccccaggccacagctgcagaacaggctttgtgtgcccagggttagtgtcgtccatcttctgatcagcacaaaggaaaggatggcgatttccagggccctgacccacatgaactttccccatggcgcttatttccacgtgggagaaagagggttgtccccagaagcccaaaaagttgccctgggagccaggcatcctgcctgccatggcctgggactcctgggcctggggcctcactgatgccatctgccttggagtgggacctggtaccggcacccagcaagaagagggcagggtccctttaagcccagcctcactccctcggcctgttgctatgtacgggaccagcttccttagcaaccacctggcctcttcctggggcctggagccctggttgccatcagccatggctcccaaaaagagtgtgagcaaggcaggcaaggagcttgaagtcaagaagaaagggggcaagaaggagccggtggtggccgtggagccgcctctggccaaggagatgaaggagttctaccacatccagatccgagacctggaggaccggctag

SEQ ID NO: 42800 - DNA, 2300 bp, Homo sapien
aacttcccttgagctgagatatcaggtagaatatattcaaggcaaatgtatttaacagagttattgggtgcttactatttgccaagccctgggaatacagaggtggaggagagggacatgttactaggttttgaccactcagtgggacaagggccaacttacaggagcaccaaagagagggccacaaatgtggctcagggccaagaagggtccactgaggagaaaacaccaaggttactggatggaaaaaggtaagggagatgccaggtacaaagacttgggattggaaagtgtggaagagttatggagggatgcagagctggccgactgcagcaggcattgtggctaagagccttgcttctggggatcagactgattcaggttcaagtcctggctgtgccacttacaaactcagagttcctttatccttctgagcctcagtttcctcatctgtcaaataggtataaaatcatcatagtacctacattcttataggttgttgtaatgatttaacaaacacactgcacacctgctatctgccaggcacaggtgttggggacatacttgtaaacataacaaggccctgccctcatggagtttacattctagtgatgtaatgaaaataacatgctaagcacaggcattggctgtggtcatgactgtcggaccaaggggcatagtgggagatgaggctggattctgatcacaaggaaactcaaatgcccctttacgggacagggagtccaggagagtgggcccagctgcaccagaggcctggcttgcccagcctgacccctggaccacggctctgcccctgccccaggtaccagcggaagtgggatgagctggctgtgcaggagaagatgttccgccaggagtttgagcagctggccaataacaagaaggagattgtggccttcctcaagcgcacgctcaaccagcaggtggatgagatcacagacctcaacgagcagctccagaacttgcagctagccaaagagatggagaaggatgccttcgaggcgcagctggcccaggtgcgccacgagttccaggagaccaaggaccagctcaccacggagaacatcatccttggtgaggaggggactggctggtgagcctgcaggcacacatcccagctctatcactgaccctgtttctcacctgggaaacagggataatagccacatgctgcttggcacacactgtcttccttaattgtcccagcaatcctacgaagctggaaacatcccccaaccagtttgtagacaaggaagcacctcaaaagatgaagtgtcgtgaccaaggtcccccagttggcaagggttgtgaggctcaaatgtcagatggcattagaacctagcccagagaatatatacagtccagctgctggctgggcgtggtggcccatgcctgtaaaaccctgtgctttaggaggccaaggcgggaggattgcttgagcccaggagcttgagacaagcctaggcaacatagcgacactccatctctaccaaaaaaatacaaaaattagccaggtgtggtggtgcacatatgtagtcccagctacttgggaagctgaggtgggaggatctcttgagcctgggaggctgggaggttgagactgcagtgagctgtgactgtgccactgcactccagcctgagtgacagaggaagaccctgtctcaaaaaaaaaaaaaaaaacaaaacagttgttgtcattactgtcgctttcatgagagtatcaaggaaggcttcttggaggaggtggaacctgaacaaaacttcataagattcatggaggggtggagggagggcaacccagatgaaggcagtaaaggtgacagggccaggcagggtaggtgggggatggtagacctgccccactgagaccacacagggcgcacaggaagggacagggacctaaggggcatctttaaggtcctcgccaggccctgtcctctgaggcagcccatcattgggccttgtgcgctgtggcggccaggggggaagctggcagccctggaggagttccggctgcagaaagaggaggtcacggacaagttcacattgctggaggagcaggtgcggaagcaggagaatgagttcagggactatgcatacaacctggagaagaagtcggtgctggacaaggacaggtgggcaagcggggcaccctttggggcctttggaggcttcatccctggggctacgaacatcctagtcttcaggcctcagcttctaactggggggttagatggggaaactgaccgccgccccgacaacctgctactccttggaat

SEQ ID NO: 42801 - DNA, 2300 bp, Homo sapien
taatccgcaggcagcctggaacagtctagaggagatttgtataaaaagtagataccaaggctggcgtggcagctctgtggcagtggctgggttggtgggcactacagtcaggcaggcagccatggccactagtgtcacggccccagtgagggcccctggcttcgctcacggatgtggtccaagatcaggtcggtggctcgatccagcaacagaggcagcagctcctgctcagcaggggagaagcagcccagcacatgggcctgaaccgcctcagggtgcgccgggcgcccgatacccacccgcagccttggcattgcctgtgggagagccagagaggcccaggaagctttggcgaggtgctgggggacccctggcccacccgacccagttgcacaacaaaagggtagactcacattggagttgaggcagctaatgcaggaacggactccattgtggccccttcaagggatatgggaggggcagttagtgcctccctggggcagtgtccttccacccctccctgccccggctgggtcagagcagcccatttcctgtggagactgggtcagcagccctactccaccccaactgggaggcctgaagccctatcccaaccctgaccatctcaggacctcacctggcactgccccccagcttcagagccagtctccccaggggcttgtccagctcatcatgcaccaggtagacttcctcggcagtcagcccaaacagctccgcttagcacagggaaacggcagccctggttactgcccatctgcccagagaggcactgtcccgactcccatgatgagggaccacaactaatcccacttcacatataaagaaactgaggccccccgaagtacccaaagccatgcagcaactggagctcaacaggtacttggaggtgaacccgcggatctgtcacagccagtgctcccctctggcccccgcgccccaacccccacccccttggcccgcccgcccacccctggcgctctcaactcaccagcccgggccacgctgcgcccgttggcgttcataagccgccgtggccggagcaggaccagttgggcatcccccagcggggccagggcgaggtcggcggcacagtgccggtcgcgcgtccaactctccgccacacccagccgccgcgccagctgccccagcaccgccatgcccacgctgtgtcgcgtgccgggcagtccgggattccccaggccagccacctgcgggcggcaccagggaaactgaggcccaacaactctcgccacccccgatctcacagcgtcccgtgggccccaacgcagaggagcggaaacgcagagcaacgctgcagtggggaaggggcgcgaagaaggggcccagaaacccgacccctgagaactccagaaggctgggcaggcagggcgccctagtgcaggaacggagcttcaagaagtttggagcccgtcgagcactgaactcaccagttaagaaaacagagcagcaatttgggggcactcggctcccgggacataatggccgaactgaagctagggaccgggagcccctacgtcgccgccccacgccactcaccatccaccgcttccccggggggcgaggctccaaaacacatcggctcatggctctactcagccgctgtccggcgcccaaaaagccgcccggcctcatgctgcccccattcactccgacaccgccccctgacgtcatcaccccgcagcagccaatcgtgttgccaactgtttggcgtccaccgccaacgtccaatccgggccgggctacgtggccgccatgcttctgaggggcggaagcggcgaggcggtggccgagtccgggaacccaggcgccttcagtagcgcggcgtcacagtgtcccttcgggacttgtgtgggacgctcggagctcttgcttgaccttcggttgggaggccttgttatgccccccgctatggccctgacttgcggcgaaaatctggcaagtcctttccccgctgtaggcctcaacctctccagctaataaaagttttctacctccctccggctcaaaaagcttggttcccgggggcgtggccagaggggtggggcctgtgggcgtcctggtgatggtgcctagcaacgtcagggccagggccgcgaggtagttggcagaggcctcggggtcctcctggaaggggcctcatgacagattcggacgaggtgcgggcttgggagaagactaacgcaaaggcagagggccaggcagagagaccgaggctgggttcgcaggaaagggtgaaggccgggagaggcaggggcagc

SEQ ID NO: 42802 - DNA, 2300 bp, Homo sapien
tcacagccagtgctcccctctggcccccgcgccccaacccccacccccttggcccgcccgcccacccctggcgctctcaactcaccagcccgggccacgctgcgcccgttggcgttcataagccgccgtggccggagcaggaccagttgggcatcccccagcggggccagggcgaggtcggcggcacagtgccggtcgcgcgtccaactctccgccacacccagccgccgcgccagctgccccagcaccgccatgcccacgctgtgtcgcgtgccgggcagtccgggattccccaggccagccacctgcgggcggcaccagggaaactgaggcccaacaactctcgccacccccgatctcacagcgtcccgtgggccccaacgcagaggagcggaaacgcagagcaacgctgcagtggggaaggggcgcgaagaaggggcccagaaacccgacccctgagaactccagaaggctgggcaggcagggcgccctagtgcaggaacggagcttcaagaagtttggagcccgtcgagcactgaactcaccagttaagaaaacagagcagcaatttgggggcactcggctcccgggacataatggccgaactgaagctagggaccgggagcccctacgtcgccgccccacgccactcaccatccaccgcttccccggggggcgaggctccaaaacacatcggctcatggctctactcagccgctgtccggcgcccaaaaagccgcccggcctcatgctgcccccattcactccgacaccgccccctgacgtcatcaccccgcagcagccaatcgtgttgccaactgtttggcgtccaccgccaacgtccaatccgggccgggctacgtggccgccatgcttctgaggggcggaagcggcgaggcggtggccgagtccgggaacccaggcgccttcagtagcgcggcgtcacagtgtcccttcgggacttgtgtgggacgctcggagctcttgcttgaccttcggttgggaggccttgttatgccccccgctatggccctgacttgcggcgaaaatctggcaagtcctttccccgctgtaggcctcaacctctccagctaataaaagttttctacctccctccggctcaaaaagcttggttcccgggggcgtggccagaggggtggggcctgtgggcgtcctggtgatggtgcctagcaacgtcagggccagggccgcgaggtagttggcagaggcctcggggtcctcctggaaggggcctcatgacagattcggacgaggtgcgggcttgggagaagactaacgcaaaggcagagggccaggcagagagaccgaggctgggttcgcaggaaagggtgaaggccgggagaggcaggggcagcagtccgactcagggaaggccctggccgccatgccaagaaccaggcatgtgaaagatccttgtaaggctcggcggctgcttggacagaggtctctggcttgggtagctggtggggaaggtgacctcaccaaaatgggagaacctggggcagaagtcaggtgaggtgctcagtgtggcctgctggagtgagggtcctgaaggttacccaagggactgtaggacccccaaggcctgagacttgggaccaggcctgagctggagacatcaaagcttggggtgtcagtagccggaagtgggagctgggaaggccctgggggagaacagacggtgttgtaagcatgaggaccctgatccctgaccttgaccacaggagagggagaagggcaggactgcagagggacaggttggagcgtccctaaggggaatggggctgggagcgccaccggaaccccgagtgggagtgcctccttccaggcctcatttccgcctctcctccctccctgcagaatgctggggagtgtgtcagtgggtgggggtcgtctcgggggcctgctccagcttgctgtccttcggttctaggatgccctgaaggttgaccagggcccctcacgggacatcccaaagccatgggtgattccagcccccaaagggatcctgcagcacatctttgggaccagccacgtgttccaaagcatctgtgatgtaaaaccaaaggtcacagggttaacagtgcccctcaaagtcagggaatagtgagtgactaccttgctttggggtcccaggttcctgcccgacacagccattcacatgctgtgcagctttgagccacttactctcttcaggcctcagtgaactcaactgtctaatggggctcttccacctcagtgggaacgaggctgatggcctggctggactccaggaacac

SEQ ID NO: 42803 - DNA, 2300 bp, Homo sapien
ataataataataataaaataaaataaaaataagatataaaattcagttctttagtcacacttgccacatttcaagggctcaacagttccacgtggctggtggctagcatattggacactgtcattatggcagaaagcccaaatggaaaatgctgccaaacttgactcaaccctggcagtaaaccagccttggaggtgagaggggcagcgggggggacccagacacagggacaaggaggaatctaaggagacagagctgggcccaggagccaggagagcccctgagaagtgtgaggtgggtgccctgcatgggcccgggaggccccaggcacctgtaggtagagcacaaaggtgaggcgctccaggtgcttgcagttgtcctgctgtaatgagtaggcccttcgcaggttctgggcggccgaggagaagtcacagagctggaggtaggcctcagcccgtaaggcatagaagtccacctgagggtgaggggacccaggctgctagatcctccccaccatctgcccctggagggtaggggaaagtctccacccccctgagagttgacatccaattcccatcagggacttggtggccctgagaggagggatctggcaggtgcgacagggagggaggaagcatgttccagcaactgcctgtgcccacccaggtctgcctctcaccagctgtgggtccaggtggagtgcgcgggagaagagcagcacagctgtctcccagtctgcctgctccaagcactgctggcctctggagtagctgtggggaaagtggggacaggcagaggggtggccctgactgtggaccagcccagggcatagggctggggtgggggttgtgggaagcaagggagctgggtggagaggcaggaggagtagacagaagcccagggagggcaggctggtgttcctggagtccagccaggccatcagcctcgttcccactgaggtggaagagccccattagacagttgagttcactgaggcctgaagagagtaagtggctcaaagctgcacagcatgtgaatggctgtgtcgggcaggaacctgggaccccaaagcaaggtagtcactcactattccctgactttgaggggcactgttaaccctgtgacctttggttttacatcacagatgctttggaacacgtggctggtcccaaagatgtgctgcaggatccctttgggggctggaatcacccatggctttgggatgtcccgtgaggggccctggtcaaccttcagggcatcctagaaccgaaggacagcaagctggagcaggcccccgagacgacccccacccactgacacactccccagcattctgcagggagggaggagaggcggaaatgaggcctggaaggaggcactcccactcggggttccggtggcgctcccagccccattccccttagggacgctccaacctgtccctctgcagtcctgcccttctccctctcctgtggtcaaggtcagggatcagggtcctcatgcttacaacaccgtctgttctcccccagggccttcccagctcccacttccggctactgacaccccaagctttgatgtctccagctcaggcctggtcccaagtctcaggccttgggggtcctacagtcccttgggtaaccttcaggaccctcactccagcaggccacactgagcacctcacctgacttctgccccaggttctcccattttggtgaggtcaccttccccaccagctacccaagccagagacctctgtccaagcagccgccgagccttacaaggatctttcacatgcctggttcttggcatggcggccagggccttccctgagtcggactgctgcccctgcctctcccggccttcaccctttcctgcgaacccagcctcggtctctctgcctggccctctgcctttgcgttagtcttctcccaagcccgcacctcgtccgaatctgtcatgaggccccttccaggaggaccccgaggcctctgccaactacctcgcggccctggccctgacgttgctaggcaccatcaccaggacgcccacaggccccacccctctggccacgcccccgggaaccaagctttttgagccggagggaggtagaaaacttttattagctggagaggttgaggcctacagcggggaaaggacttgccagattttcgccgcaagtcagggccatagcggggggcataacaaggcctcccaaccgaaggtcaagcaagagctccgagcgtcccacacaagtcccgaagggacactgtgacgccgcgctactgaaggcgcctgggttc

SEQ ID NO: 42804 - DNA, 2300 bp, Homo sapien
ttggattcaagcaattctcctgcctcagcctcctgagtagctgggactacaggcacacgccaccacgcctggctaattttttgtattttagtagagacagggttttactttgttgcccaggctggtcttgaactcctgggctcaggcaatccacccacctcggcctcccaacgtgctaggattacagatgtgagccactgcgcccggcctcttatttttattttaattaatttaaatgtgtatagccacacaaagctagtggctattgtcttggacagaacggcacagatctagagtccagaggctctaagcactaaaaaggtcacagtgacccctaagtgtatttcaaaggaaaaacaatattaaactataaaacaccaacgaagtgttgcttttttccattttgataaccttgatgtcttttttttttttctgagatggagtcttgctctgtcaccgaggctggagcgcaatggcgcaatctcagctcacaacctccacctcccgggttcaaatgattcttgtgcctcagcctcccaagtagctaggattacagatgtgcatcaacatgcctggctaatttttgtacttttaatagagatgggtttttgccatgttggccaggccggtctccaactcctgacctcaagtaatcctcccgcctcggcctcccaaagtgctgggattacaggtgtgagctactgcgcctgggcttgatgtcttttctttatgtcaaaaaatattcagttcttggccgggcacggtggctcacgcctgtaatcccagcactttgggaggccgagttgggcggatcatgaggtcaggagtttgagaccagcctggccaacatggtgaaacctcatctctactaaaaatacaaaaactagctaggcatggtggcacgtgcctgtaatcccagctacttgggaggctgaggcaggagaacctcttgaaaccagaaagcagaggttgcagtgagccaagatcgtgccactgtactccagcctgggtgacagaacaagatgctgtctcaaaaaaaaaaaaaaattctgttcttaaaaagaaacatttggggccctcagaccatgtgtgaatctgtctgttgggggcccatgtcctgcactgccacttcctgtgtacccttgtgcaagtcacttcacctctctgagcctcagttcctttatccataagagaagcatgctagtgccagtgagaaaacaagttcaagttcttagcacagggctcagcacccagggcccaggtccaggctacagcctgtttgtgttagttctgctgatctcttctgccatctgagtgttttgttttgtttttgagatggagtctcactctgtcacccaggctggagggctgtggcacgatctcggctcactgtaacctctgcctcccaggtccaagccattctcttgcctcagcctcctgagtagctgggattacaggcatgcactaacacacctagctgatttttgtatttttagtagagatggggtttcaccatgttggccaggctggcctcaaactcctggcctcaagtgatccacctgcctgggcctcccaaagtgctggaatgggataacaggtgtgagcaaccatgtctggctcagctatctgagttttctacatttctctttgttcctgaatctctgtattcctgtctcttgccaagcgtgcatctcttactgtctcttgctgtctttccccagatctgtatctctctccatctctgtctgtgtctctgcctcttcaagtctctgccagatctaaaaggctctgtccttgtctttgtatctctccctcctgcctcagggctttctgctgccaactggggggtgcagctgggctggggtggcaagcagaattgactgtcccctgtgtccccagggacaatgcctttttgagcagtgtgccttcctggatgccctgaatgtcttctcacatgctgctgagctccagcctgagaaaccatgcttccgttaccgatggtgagtgcccctgccagccccttctcccagcacccacttcctgccgccccacccgggaaacgagcactctgtgccctctgccctcagcatggcctgtctcctggccctcaagcagcatcaggcctgcctcacgctcatcaccaacgagctgaagcaggacaccaccaacgccgatgtctacatcttccgggccagactctacaactttctccagaaggtacagtggggagggcgggcaggggcatgccccccaacctgggagtcctcagtgtgccccaagattgcaggaagaggcaaggc

SEQ ID NO: 42805 - DNA, 2300 bp, Homo sapien
acagctgccacgaaagggggtgaccagagccaggtgagggccagagcagcagacagacagcacgatgctgccctgaccctgcacagccagatttggcccttcccagggctgaagaaggaagagttttgcaatgttttttgtttgcttgtttgttttttttttttttttttttttttttttttttttgagacagagtctcactctatcgcccaggctggagtgcagtggcacaaacttggctcactgcaacctctgcctcccgggtcgaagcgattctcatgcctcagcctcctgagtagctggaattataaccgtgcaccaccatgcctggctgctttttgtatttttagtagagatggggtttcaccatgttggcccggtgggtctcgaactcctgacctcaagtgatccacccgccttgggctcccaaagtgctgggattacaggcatgacccaccatgcctggccttatgattgttatcaaaccagatttctttgggggccgaggagtatctttatgcaccgggcatgactccggagcctacactcctgacgtggcaggaacctacctttggttgcttggggttgaggagcaggacagtggccacatcctggcgggccccaaaaatgttctgcagcagctgccggctcttggcccggtacaggtagtactgggccttctgggggttgtgccggatggccgtggagaagtggttctctgccttctggaactgcctgcacgacacagtgggtcccaagctgctatgagctgggccatctgtggggaaaatggtggctactgggccccactgaggagttagagggaaaccaggctaggtctgctcccctcaccacgcccctctcctctctctccatcaggtacgtccctgatgaagccaacacttcgatgccagtgtgaaactccaacatcaatgaatatctttatgatcttggggtagggaaggcgtttctgagaatggcataaacccatcggctaaaatgaatatattaatttgactatgattaagttccaagttattgagtagtaaaaatatcacaaagaaaagcagtataggccgggcatggtggctcacgcctgtaatcccagcactttgggaggccaaggcaggtggatcgcctgaggtgggaagtttgagaccagcctggccagcatggtgaaaccctgtctctactaaaaatacaaaaattagctgggcgtggtggcaggtgcctgtaatcccagctacttgggaagctaaggcaggagagttgcttgaacccgggaggtggaggttgcagtgagctgagatggcgccattacactccagtctgggcaacagagtgagactccatctaaaaaaaaggaaagcataacggagagagaagctttttttttttttttttttttttgagacggagtctcactctgtcacccaggctggagtgcagtggcttgatctcggctcactgcaagctccacctcccgggttcacgccattctcctgcctcagcctcccgagtagctgggactataggcgcccaccacgacgcccggctaattttttgtatttttagtagagacggggtttcaccaggttagccaggatggtctcgatctcctgaccttgtgatccgcccgcctcggcctcccaaagtgctgggattacaggcgtgagccaccgtgcccagcctttttttttgggacagagtctcactctgtcgctcaggctggagtgcagtggcgcaatcctggctaactgccagctccgcctccctggctcaagggattcccgtgcctcagcctcctgagtagctgggattacaggcacacaccaccacgcccagctaatttttaaatttttttatatttttaatagagatgggtttcaccatattggccagattggtctcaaactctcgacctcaggcgatccacctgcgtggggattacagggatgagccatcgcccccgaggagagaagcagcttgattgacccagggatcccagcagttggcctcctgcccgccctgccctcgggcctgccccgcccaccgtgggggcgggagcccacgcacttgcgcctctgctcgcagaagcccatcttctcctgcagcaggcccatgcgcgtgttggcgccctcgtcctgagggctcagcgccagcgcctgctggtagtccgcctcggcaaaggccaggttgcccagctggaagaagcaatctagggtccggaggcgggggtgagtggacccccaactcccagtgcccgggagccccagcccagccggctccagcccgggggc

SEQ ID NO: 42806 - DNA, 2300 bp, Homo sapien
gcgggagagataaatagctaattccaacccagtgctcctatcccctgccctgccctgggatggatgccatggcaacagttcccacaaatgcacaaccaaaaatccgaggatttggggtggaagggctttttgaaatctatgatcccaactcccctcttgaagactggtacctgaaaggagaagggacttttcccgggtcacagcagcagcagagtgggaaaggctccacctggcttcctggacccagacttctctccttttttctccttgatagtgggaactactcattttcttcttttctttctttctttccttttctttctctctctctctctttctttcttgtttttttttttttttttttttttttttttgagatggagtcttgctctgtcaccaggctggagtgcagtggcacaatcccagctcactgcaacctctgcctcccgggttcaagcgattctcctgcctcagcctccccagtagctgggattacaggcatgcgccactacgcccagctaatttttgtgcttttaatagagacggggtttcaccatgttggccaggatggtcttgatctcttgaccttgtgatccgcccgcctcggcctcccaaagtgctgggattacaggcgtgagccatcgtgcccggcctccttccttccttccttcctctctttctttttctttctttcttctctttctttcttctttctccttccttccttccttccctccttcctttcttttctctttctttttctttctctttctttctttcctttctttcttccttccttcctttctttctctctcttttcatcctttctgtttctcctttcctttcctttctttttctttttgagatggagtttcactcttctcactgcaacctccgcctcccgggtttaagcgattctcctgccttagcctccagagtagccaggattacgggagcctgccaccacgcccggctaattttcgtatttgtagtagagacggggtttcgccatgttgattcacgcgcctcggcctcccaaagtgctgggattacaggcatgagccaccgcacctggccggaaatacttatttctttttcaggctctgatatttggccccagaagtcgtgtgtgtgtgtgtgtgtgtgtgtgtgtgtgactatgtgttgaggttggtagggacagggtctttgaggtgggccatgaaggctgttgtcttggttcccttactccagtgggtgggggaggtgggcaacgtggatcaaaacgaatccaggccaagctggaggcctagggagcctgcgcgctgaacctcaaacgtctggagtcctttgccttctgaatcctttgaccaagagaggctgataacatgcaaccacgcactacggctctggttgcagccagacttgggtttagttctattgtttaccagctgcgtgacattgggtaagaggcttaacctcttcggtcccaaattcctccttattaagatggggacaacaacagaacccatctcccaggactgataccaagcatttggccacagttgctgctaggtgagggacagtcctgtttaatacacaacggaatgttgatgatcatgtattgaccactttctgagccagacaatttgtgtgcctttatctcattggaacaccaccatttctctggatagcagatactattaccatattataaggtatataggcacttagcactaatggcacagagtaagtgctcaccaaaagctgttagtgagggcacttttgtcatatagaagaaaaaaggagcatggaaaaggcgctttgcaaggtgtaaggttccgcacaagtttttgctgtaattgttacgtcgccctttgtggtcgtgatcctttatttattctttctgagccactacgatggtcccctagttaccgtggccatggaaacgcggcccgccgtcccggattggacggttcgcgggttccccctggaggccaccttctggtcctgctgcggaacgacgggcgggccttggaggcggggagaggagcgtcgggagttgtaggcgatgggcgtggctgctgcggagcggtgcacgccgggagttgcagttcccgggcgaggcagttgactgccccacaacgagctcgggcctcacccggatggcggctgcgacgcgcggctgccggccctggggctcgctcctcgggctgctcgggctggtctcggccgcggccgccgcctgggacctggcttccctgcgctgcaccttgggcgccttttgcgaatgcgacttccggcccgacttgccgggtgag

SEQ ID NO: 42807 - DNA, 2300 bp, Homo sapien
cagctactcgggaggctgaggcaagagaattgcttgagcccaggaggtcaatgctgcagtgagctgtgattatgccactgcactccaaccgggcgacagagggataccctgcctctcaaaaaaaaaaaaaaatcaaatgagggttaaaaggaatcaatagttgggttccaaaagccccctcctaggctgggcacggtggcttatgcgtgtaatgcgggcagatcacttgaggtcaagaggtcaagaccagcctggccaacatggtgaaaccccatctctataaaaaaaaaaaaaaaaaaaattagccaagcatggtggcaggcacttgtcacttgtaatcccagctactcgggaagctgaggcaggagaattgcttgagcccaggcggccgagattgcagtgagccaagatcactcaactccacttcagcctgggcaacaagaacaaaactctgtctcaaaaaaacaagaacaggccaggcgtggaggctcatgcttgtaatgccagcactttgggaggccgaggtgggcggatcacgaggtcaggagatcgagaccacggtgaaaccctgtctctactaaaaatacaaaaaattagcgggcatggtggcaggcgcctgtagtcccagctactcggagaggctgaggcaggagaatggcatgaacgcgggaggcggagcttacattgagccgagatattgccactgcactccagcctgggtgacagagcgagactccatctcaaaaaaaaaaaaaaaaaaaaaagccccctcctaccttgagatactcatctttgaggagtcagcttccagaacttcagagttctcaaactattttgtgcatcctttgattctaaggcaaggattcttaaattccaagaccataaaattccaggctgcatgcccagagcttcagatgtatttacagaaaacaaacaaacaactgaggcccagagaggtggactcacccacctgcggtcacacagcctgtcagaaggatttggacctgaggcctgactgatggggaatcagcaatggctccctttgcattgaagagcctatggttctgagacaaaaagtccagtttctttttctttttctttttgagacagagtcttgctccatcacccgggctggagtgcagtggtacaatcttggctcactgcaacctccgcctcctgggttcaagcgattctcatgcctcagcctcctgagtagctgggattgcaggcatgcgccaccacacccggctaatttttttgtgtttttagtagagacagggtttcaccatgttggccagactggtcttgaactcctggcctcaagtgatgcacttgccccggtctcccagggcgtgggattacaggcgtgagccaccatgccaggccaaaaagtccagtttctaagacaggaagcttgaaaataatagcgtgcacttattgagcgcttacttcatgcctggcaacttacatgcaccagctcagcgaaagctcagaagagttctgtgaggtcagcacaggctttagctgcgtttgacaggtgcattttccacaagtgagtcgtagatcccagggaaagagctggtgggagtgggcgcaccagtagttaggggacagttgaatccaggctgcccctctaaccactgggctttactggctctctgcacccccagagtcttgtcagtgaacatcctcgattcccagcagagtctctgattccaaaccagggatgagaaatcctgggctctgggagatttcctgaggccacagagaatttggtccagcacatatacggatttttccagttttagatatgatttaattcaaagtctctgcccgctcccggtctgttagaggtgcggcgagtgggggaggcagaacctcccctcgctggcccatgggtccccacccgatcccgctgcccccggtaataccctccttggcaggtcctccgctccgcgcccgcagctccaggcagcccgagcgcgcggaactggagggcggggggcgaggggctgggagcggggggcgggcggagggaggaacaatggccccctcccctcccctggccggctggagggtggggtctccccgccccgcctccccgctcctcccccgacaaggcgatgaggtaatcgcgccgctgagaggcacgcgcagccggtgcctagccggttggtccctgcgcccctgccccgccggccaccgcccccccacaccgtcccggccccggcagcctggccccaccatgaccgagcggtgcagcctgtggagtgccctgtcggccgccgcctgctgcttct

SEQ ID NO: 42808 - DNA, 2300 bp, Homo sapien
ttagcctctagcatgggccctcagctgctggatgggtcctaaacccagtcactagacccctgccctgaaccccctcacgcaaatcatcaccattagttctgctggacaatacctccacctagtctagaaaaccatttgtcagcttaatttggttatagggtgagttgagttcatgtaaaaatacaaattgtgatgataggacaatagctcccatttagtaagcatttttactgggtatcaaaacaagtatctcactgaaaactccatagaagattcaatcattaaggctgggtgcagtggctcatgcctgtaatcccagtattttgggaggctaggagtttgaaaacagcctggctaacatggtaaaaccccgtctctactaaaaatacaaaaactagcagggcgtggtggtgcgtgcctgtagtcccagttactcaggaggtggaggcacgagaattgcttgaacttgggagatggaggttgcagtgagctgagatcacaccactgtactccagactgggcaacagagcaagactcagtcttgaaaaaaaaaaaaaagattcaattattagccccacttacagattgggaaactgagactcagccaaggttacacagaactgggatttgagcaggaatctgcttgcttccagaggctgcacacttatgtaccacattagactcaccaccttctcaatcctagggccatgcctttcacaccccgggagacccctcaatcccagccaaaggagtccccggcttttcaatccttagaacctttgtctcaaccacaccagtcacatgtgcctgttgaaataaagaaaaaaagtcagctggccgggcgcagtggctcacgcctgtaatcccaacactttgggtggccgaggtaggcagatcacaaggtcaggagttcgagaccagcctggccaaagagaccagcctgaccaacatggtgaagccctatctctactaaaaatacaaaaattagccgggtgtggcggcgggcacctgtaatcccagctactgaggaggctgaggcatcagaattgcttgaacctgggaggcagaggttgcagtgacccaagatcgcgccattgcacactccagcctgggcgacaaagcgagactccaactcaaaaaaaaaaaaaaaaaaaagccacctgagcaaaagtaattgtagggccagagttctgggacctttctttcttttgtttttttctggtaactttcttgagcagctttttcctgagacaccaagcacagcctctgtctctgagctgtaattgcctagacccctgatcagtgaggaggaccatgtaaaggggtagagtgaatccagtccagattctgcctcttactggctgcatgactggacaaatctcttcctctcttggagcctcagtttctcatctgataaatggacgtaacaatagcatctacctggtcgggttgtggtgaggattcaagaataacatacctgtaaaatctcaacacagtggctggcatgctgcactcagtaaatgggaatgctgtatttacgattagtagaactcatgtttttccaccatccccggctgccttctgtcatcccctcctacattcgtcctcattcgggagtaaaggaccaaggattgtatgtagctgagagggcctgatgatgggtcctggggcgttctaagacaccccaaggtatgagactgcaccaggagcctggcccctcccacccagggaagccgagtttcgcgggagcggggcggggcggggtggggcgaggcgaggcggagttgagggcgtgtctaggggcgtggcctaccccaggctgcgcggagagctgctggggaagcgagcgttggagccgggcgggcgaggcggaggggtgtgctagggggcgaggccttcccgacactgactgatggggagggggcggagcgagaccgcaggcggagggccgtgttcgaggcggagagcgtccttccctgccggtggagtaggcggtggagtggggccgggcaaggagcgcaggggcgtgtctgggggcgtggtctacaggtcagtctccgcccccggagtccggcactgagctctgcagctcagtggcccgagaaaggcaggagccgctgggtttaggaggtccccgggttgccggcggcgacagcgggggaagcatgactgctgtgggccgaaggtgccccgcgctggggtcccgagggtgagtgaccgagctgggcctggggagggccagcggggagcaggagaggtcgaaggaggaaatctgcacccctggggcagctgacaaattt

SEQ ID NO: 42809 - DNA, 2300 bp, Homo sapien
tggtgtgaggccagcctgagcgaaggcctggaggcaggaaagcactcgggggtgttcaggacaggggaccatgggctgggctgacctgccctccagtgcaagctgaagagctcctgcaggacagccacccaccggcaggtcctcggtcgcactcctaacggccactccaggcagcacaaagggggctctgagctcagcggagccaccacactgagccctattcattctcctaggggtgccagaaactgccctggcgcccgggccaagagcagacaggccccagcactgacgaggcgcctctgccgcagcaacacagcatctctgtggctgagattcccaggtcttgtgccttgtgcctgcctgtccctgtcaggattccctgtcctgtgccaatctgccccttatctgtgtccatctctcagcaaccacagccagggctcgcggaggcccacggtgtgctggcttggaccagtgtttgcttctctcaccctcccaacaaccccatggagggggagctgctgtggctctatttaacagatgaggaaactgtggcccagagaggcaaagtgtcttgtgcgagatcacacagcaagtcgggagcaggcctggccaggaagcagcatagccttggcagctaacccaagtcacactgcaaccccatcctgggacagaagccgcggacctactttctatcttccgctaggggacaccagccagggagttaggacacttggttgtcagtctgtccagtgtctgcctctgcttttttttttttttttttgagatagggtctccctctttcgccaggctggagtgcagtggcgcgatctcggctcactgcaacctccgcctccctggttcaattctcctgcctcagcctcccgagtagctgggaatgcagttgcacaccaccacacccggctaattttttaaaatgtatttttagtagagacgaggtttcactatgttggccaggctgtgctcaaacccctgacctcaggtgatccacccacctcggcctcccaagatgctgggattacaggtgtgagccaccgcgcccaccctggggctgttactgttaatggaggatgcaggaagtgccctatcagatggcagtggactcctctcacagcctgggttgccagcctggggtccaggataaaatgttgaacccccactggttggcaggttggctgcatacctcccacttctccccattctagaaatcaggtgactgaggcttgggaggtggaagtagctgggattggcagccctgggtcttgggccccgcccccagccccagcagctgctgacaccctttgcagatgtccaggatgacccgtggaggggaggttgcatttcctcatctcggtctgcccacctgagcatgcacacatggcaagtttgtagggtggaaaggcaccagcccgtgggttaaggggcctagaagggagagttgtggcccagtctgggccagcaaccagctgtgttacctggggaaatccctctgcctctctgtgcctcggtttcatcatctctgtccagtgagtacagtggaacacatgatgacatctccctgatagcttggaaagtggtgactgtgctttggtaggcaccgattctgtgccaggccctacacccatggctgaacccgatgaagtgggcactgcgagtacccccggttcacagggaggacgtcacaccgtggcgaaatggccagccaagagtggaacttgggtctggggggcccagagtccacaggcctgaccacagcactctcccatctgcagctgccagtccctctcctgggtacagaggctgagaagcaactgccctgcacacaggcctgactcccctcaccttcccagcctgatggccaggccccctgacagctgttggcaggtccccagcggcccccagcccactgggctccgttcccagagcctgcggcctgctccttagaccttccaggtcccaggggcttgcggtctggcccctgcccctgctgctgaggccaaggaggcggcccacaggggctggggctaggagaggccccagcccccgccccctgcggagagggtggggagggtggagctgtgggagtttcactggtttaaaaatacacagaggaagcgagtaagagaaaggggaaggggaggtgggagaggcacctcaactttgatgtcccgagccttgagtggccactcgcaagctggccaagggcttcacacaatttgccaagatgacagaggggaccaagaagaccagcaaaaagttcagtgagtgtggggtgccgtctg

SEQ ID NO: 42810 - DNA, 2300 bp, Homo sapien
gccattcctgcctcctcctaggaggctttgaggctaagcagtgtggggtgagagctgggagccaccccgagggcttttttttgagacggaatctctctctgtcaccaggctggagtgcagtggcaagacctcggctcactgcaacctccacctcctgggttcaagcaattctcctgcctcagcctcccaagtagctgggactacaggcgcccaataccacgcctggctaatttttgtctttttagtagagacggggtttcaacatattggccaggctggctccaactcctgaccttgtgatccgcctgccttggtctcccaaagtgctgggattacaggcgtgagccaccgcgcccactccaatggcttcttgcaggaagagagggtaacgagagtctgggggagtgtaggatcaggggagcaccgccctgaacgcagaaaggcttggggagacagtagagagatttgcatggccacagcttgaggggtggggtgtgaactggaaagagcctccaatgtcacattcaggttcttcggggacagagaggccagactggggggctaggtctcaggatccacccgcagagggctggagaggagggggcagattgaagcggggcagaggaggcagaaaagacggctttgctggaggctgtccttgggcagagctggagggggaatctgggggccgctggagccaggaagatgcgagggaagggatgggcgcgatgggggagggagatggggggggtgaacggtgagctcgcgcctgcataaggacagcaggcctccccactgctatcctcctggcccaacagcgaatagcgtgagtcaagagaatcccctcactcagacacccaggttcgggtcccaactttgtcgccgtgtgaccttgggcaaatgacctcacctctgagcctcaacgtcttcttctgcaaaatgggttagtgatcctgactatggggctgttgattcaggattcggcgggaacgcccagcacttcctgagtacacaagagtgctgagaaaatggtagctgttttttgcgattactgactcggggcccgaccagctctggcacgactcagcggaggtgggagtcctgcgggtcccatccctgcctcccggagagccagaccccagcgatagaaggcccgggcgttgcttgctcgtcgccgctagtgccgccgcgccccctggcggccgtcggttgccatgtcaacggagggtggcggggaccgggggaggcggaggcgggggccgttctctcctcccagggccggaggacgctccctccgcgcctcccgccttcgcctctgtgggggcactccgagccggggaggaaggggctttccgctgcagccgacatgtgggggtaaactgaggcacgcggcagggcgcccgcagccaggtgccgagcgcggggccccacctccgaaggcggaggaggggccgcgggcggtgacgcgccgagggcggccggcggacagcgagcgggcgggcggtggcggcggcggcaggtgcggccgcggagggtgggagggaggagggcgggggcgggcggaggaggaggggagggcgaggccgggcacctccccctttataacgcgccccctcctgggctctcgggccgtctcctagtcggctcttcccgtctcgccccctcgcccggccgccccgggcccgggtccggccagggagctcccaggccgcggctcgggggctgaccccccgcccgccgccccgcgcagcccggcggaggcggcgccgtcggaggaggaggagcagggcactgcggctggccccggatcgggcgccagagcggcagcagcttcggcagcagcggcggcccgggcccatgcagcgggacgcgccaccccgagccccagctccggcgccccggctccccgcgcccccgatcggggccgccgctagtagtggcggcggcggaggcgggggcagcggcggcggcggcggaggcgcctctgcagctccggctccccctggcctctcgggaactacaagtcccagggggcctggcggtgggcggcgggcggaagaggcggggtcggcgccgcgaggccggaagtggccgtggaggcggaagtggcgcggccgcggaggggcctggagtgcggcggcggcgggacccggagcaggagcggcggcagcagcgactgggggcggcggcggcgcgttggaggcggccatggcaaagcagtacgactcggtggagtgccctttttgtgatgaagtttccaaatacgagaagctcgccaagatcggccaaggcaccttcgg

SEQ ID NO: 42811 - DNA, 2300 bp, Homo sapien
tccaggtgatgtgggtggaaggacctggcacgtggtatgtgccaatccatagcgggcactgcttctgggaggggtcgagtagcagtctgggagcctccgagtggagcaggtattttagtccttttaggcctttatgaagggataagccacgcacctcctgaccggactccatattctctcaacgccccctccctcccaggtgtggccaaacgtggacaactatgagctgtacgaaaagctggagctggtcaagggccagaagcggaaggtgaaggacaggctgaaggcctatgtgcgtgacccatacgcactggacctcatcgacaagctgctggtgctggaccctgcccagcgcatcgacagcgatgacgccctcaaccacgacttcttctggtccgaccccatgccctccgacctcaagggcatgctctccacccacctgacgtccatgttcgagtacttggcaccaccgcgccggaagggcagccagatcacccagcagtccaccaaccagagtcgcaatcccgccaccaccaaccagacggagtttgagcgcgtcttctgagggccggcgcttgccactagggctcttgtgttttttttcttctgctatgtgacttgcatcgtggagacagggcatttgagtttatatctctcatgcatattttatttaatccccaccctgggctctgggagcagcccgctgagtggactggagtggagcattggctgagagaccaggagggcactggagctgtcttgtccttgctggttttctggatggttcccagagggtttccatggggtaggaggatgggctcgcccaccagtgactttttctaagagctcccggcgtggtggaagaggggacaggtccctcacccacccacaatcctattctcgggctgagaaccctgcgtggggacagggctcgcctcaggaatgggctgtttttggcctaaccctcagaaacactggggctggcacaaactcttggtttcttcaacaggagaattttactgtgtttcttttggttccattgtttggagacattcctgggcacagtttggtccgttagaattaaaagttgaattttttttttttttaaatttttttttttcctccaggacttgtgtgttttgttctgcgcacacaccgccaactgttcccccacagtcagcagcaggttgggcctgaccattgggacttgattgtcaagtcactggaggtcttgacttttttatctcagttcatgttctcttccataattggaaaggacctttgtctgtttttcctcttgggtgccttccagaacgcatctcatgtccctggtgagggaattggtgagggcctgctgtgagctgctgtggctgcgatggtcacccagctgggcaaatcactggagtgacaatttgacctgtcacctgagaaggatggtccctcagactgctgggtagagggcctggggcaggctggagagagaaagtgggcagagggtgaagggatcacaggggtcttggaaggtggcagtagtttggacgggggtggggagtatgtgggagaaaaaaacagactgaaggtagaatccttgggaacctttgaggagcggcacattctggcaggcacgttttctgtgagcctgaagttaggaagagacattctggaggtcaatttcctacatcctcttacaggcggagaccttgaagtggggccaggaaggaaggttggcaaaacctttgaccagaactgtccttcatttacagaaactgacccagaccacaacacaaaaggccagtaaaagtaagaaaaaaaaattttttttttttttttggagacggagtctcactctgttgcccaggctgaagtgcagtggtgagatctcggctcactgcgacttctgcctcccgggttcaagtgattctcctgtctcagcctcctgagtagctgggattaccacccaccaccacacccagctaattgtatgtttagtaaagatggggtttcgcagtcttggccaggctagtctcgaactcctgacctcgggtgatccacccacctcagcctcccaaagtgctgggattacaggtgtgagccactgtgtccagccaaggaaaaaattcttgattggtgtatttgttttcctgagacttctataactaattgctacaagcatgctagcttaaattaacagatttattctgttggttcccaaagtcattggtggcagggttggttccttctggaggatctgagggagagagaatccttcccgtgactcctggtggctgctggcagtcctt

SEQ ID NO: 42812 - DNA, 2300 bp, Homo sapien
ctgtcctgacagcagtcactaggaattgagtgtggataaactcacagggctggcctaattgtattttctttgaaggataaaaagcttctctaaaaggttcatattctttgactcagcaattccacttacaggaattttttaagagcaattacacaatgatagtctttatctcattgaacactcactgcaatttcgatggtctcattcgttcattgagcatatttattaggtgtgtcttccaagggtcatcccattcgggacttaatacagctggaaacagtggtggcccgcccccaccccagtggagctcaccttccagtaggtctaaactggtttgattgagttccatggaaaacaacaaagtggggtaaggggaaaagtagtggggagctgagggggtcagcatgacatggaagcagaaatcaagagacaaggctttgtggggtgtgggtgtgggtccaagtgccaagggccagggagctttgtagagtgtgtggttatgtttctcagtgtttcctcatagttggttaactaatacatttgttcatgcaattaagccatcttttcattttctaacatttttaaaaatacatatattttttagagatgggggtctcgctttgttgcctaggctggtctccagctcctcagctcaagggatcctcctgccttggcctcccaaagtgctgggattataggtgtgagccaccaggcccagccaattaagctgcattttaaaacaaccaagacagaccttaaaccttggagctgctgacccaagctcatcctcacccctcttccccagagtctaccccagggaggaacagggactggccagtcaggtgagggttctctagctttggcctcaagctctggtgtgacatgggtgctgttttcacctgtggagggaggtatgtcgcctggaataaaggctcgccagagggcagggccttgtgcggcttttctcagcacctagatagtgcctggcaccatgttctcagcacctagatagtgcctggcacacatgagtctctgggatacagtggagtgagtgcagtgaacagatggctgaggaggctgtgtagatgggaaaggccttcgccagctcgcggggatgagcttaggccgggggactgagttctgtgtcctggctttttgtttgttttttaagagcctggagtcacatcctgccctttttttttttttaaaggaaaaatggtggttttattcatttgtacttaaaccagccaaagtagtactgatgtgattatgattcagcaaatacaagatctctttccacaaatattagcataacaatcaaaatagggactatagtaaaacagccaaaaagggctgagggaatcaagtatgttacagtttaactccacctcagtataatttttattttattatttttttttaagacagagtctggctctgtcgcccaggctggattgcagtggcgtgatctcggctcactacaacctcctcctcctggggtcaagtgattttcctgcctcagcctcccgaatagttgggattacaggtgcctgccacccactcctggctacctggcttctttttgcccaagtgatttggtgaaacaaagcctcttcctccagcggacttggactcttaagtcaggggtgtcgtgtgtccacgctgtactttgtatacgcctctccctggccaggatctcaccctggcagggcaagggcaaaacgggccctaactgtaaggtgggtgggctgggataaggaggcctggaagaggccagataaagccagccccaaggtctggaagcctcccaagcatagccccctcccctcccacccacctgcctgtctgcgtgcttacctttaacctccacccagttgttacttaactcgcggtaaggttctgaccagtcccatgctccactccagaaacccgccagggaggctaagtccctgggctgaccctaggatgagggcaggaacctatcaggtaaaacctttctccctgcacactggaaaggccagaacttctgcccccagtcctgtcaggggaggggaggccttggcgtctcccaaatcacgttttctgggtcaacaagcctcacagctctagttaaatcctgggcagagctggcttggcagagatgcccacacctgtgcgtcacttcgtgccctacccagaaggggagcaggaaaccaagggatgaaaggtgctgggtccctggctgcctccttgcccatggctgagaagttctggtgggaaggaaccatggagggcccatctggatatccttcctcagctaa

SEQ ID NO: 42813 - DNA, 2300 bp, Homo sapien
acttaaagtgtttgcgaagggctgggcgtggtggctcaagcatgtaatcccagcactttgggaggccgaggaaggtggatcacctgaggtcaggggttcaagaccagactggccaacatggcgaaaccccgtctctactaaaaatacaaaaattagccgggtgtgatggcacacacctgtagtcccagctacttgggaggctgaggcaggagaattgcttaaacctgggaggtgcaggttgcagtgagccaagatggcgccactgcactccagcctgggtgacagagcaaaactccatctcaaaaaaaaaaaaaaaaaagtgtttgctaagtaaatgtcttaaaaaaataataagcttgtcattgagtaagaaagttaagttgcagccaggcatggtgactcatgcctgtgattccagcactttggtaggcccaggtgagaggattgcttgagggcaggagtttaaggctgcagtgagctatgattgtgccactgcactccagcttgagttatagattgggaccctgtctctaaaaataaacatttttgaaaagctaagatgcaaaaatattgtcacctgcattggcaagaccctatagatgtctaggtgtgtctggtttcatgagcatagaaaactatgggacacatacttagtcgtcaacaggattgccagaggaggaactgtgtgtgtgtgtgtgtgtatgggggaagggggaagggagtaagcaaaataaaaatatttaaagcctcatgattattattattattattattattttcgagacaaagtcttgctctgtcacccaggctggagtgcagtggtgtgatctcagctcactgaaacctctgcctcctgggttcaagcaattcccctgcctcagcctcccgagtagctgggattacaggcgcctgctaccacacccggctaatttttgtatttttagtagagatggagtttcaccatcttggccaggctggtctcgaagtccttacctcatgatccacccactgcggcctcccaaagtgctgggattacaggctcctgctaccacaccggctaatttttgtatttttagtagagatggagtttcaccatcttggccaggctggtctcgaactccttacctcatgatccacccgctgcggcctcccaaagtgttgggattacaaggcgtgagccactgcgtccagtctcttgattatttttatgcagtcattaaactatatacatgcatatgtatagagaaagtttcaatgactaaaaataaggaaaccaagaaagaacttctctatctgccatggggccagggtcggggcaccccagcagtgtgtgaagagcagaagtccagccaatgacagactcttcccaaaacatcacttgcttatttcgaaatcaaacaatttctcataaatattttctcccaatgctgggaagagggagaggggaaggaggtacggaaactccatcaatcatttgaagggctgccttttatcagactgattttccgtagtgggttgtttgcagcttcctcctccccagttctgggcctcagctgtcaaaaggatttcaccatgcaactttttcatgctagcagttggggccaagaagctaatagatgggaaaaagctctgaaaactccaggacgacaaataggtgtcctcctcacagaaaaggattactgccccaccatccccaggtggccctcaaatccgttctctaaacggcagcagctgtttagaggtgtccaccaggtgtccgcagctttgtcatcctatccctgttcggggcagagactgagggctgctgacccggaccggctattttgggacgtgctgcggggggccttgggaggttggtgacgaaaggagtgcgtgcccgctaagggaggggacgccccggagcgtacactcataaacctggtcccgaggcctgcccctcaccaggatggtgcacgcggaaggggcggctttttagtggcgcaagggggctggtcggtggtagtttggggcggtgctgattgatggcgggcggggcggggcggtgctgattggcggggggggcggggtgaggcgacgctgcgctgattggctgggggcggggcggggcgtctcccgcccgggcctagagcgctgccgggggcgccgggactatgtcgcgggcgcggagccacctgcgcgccgctctattcctggcagcggcgtctgcgcgcggcataacgacccaggtcgcggcgcggcggggcttgagcgcgtggccggtgccgcaggagccgagcatggagtaccaggtatcaggcggg

SEQ ID NO: 42814 - DNA, 2300 bp, Homo sapien
gcttgtcattgagtaagaaagttaagttgcagccaggcatggtgactcatgcctgtgattccagcactttggtaggcccaggtgagaggattgcttgagggcaggagtttaaggctgcagtgagctatgattgtgccactgcactccagcttgagttatagattgggaccctgtctctaaaaataaacatttttgaaaagctaagatgcaaaaatattgtcacctgcattggcaagaccctatagatgtctaggtgtgtctggtttcatgagcatagaaaactatgggacacatacttagtcgtcaacaggattgccagaggaggaactgtgtgtgtgtgtgtgtgtatgggggaagggggaagggagtaagcaaaataaaaatatttaaagcctcatgattattattattattattattattttcgagacaaagtcttgctctgtcacccaggctggagtgcagtggtgtgatctcagctcactgaaacctctgcctcctgggttcaagcaattcccctgcctcagcctcccgagtagctgggattacaggcgcctgctaccacacccggctaatttttgtatttttagtagagatggagtttcaccatcttggccaggctggtctcgaagtccttacctcatgatccacccactgcggcctcccaaagtgctgggattacaggctcctgctaccacaccggctaatttttgtatttttagtagagatggagtttcaccatcttggccaggctggtctcgaactccttacctcatgatccacccgctgcggcctcccaaagtgttgggattacaaggcgtgagccactgcgtccagtctcttgattatttttatgcagtcattaaactatatacatgcatatgtatagagaaagtttcaatgactaaaaataaggaaaccaagaaagaacttctctatctgccatggggccagggtcggggcaccccagcagtgtgtgaagagcagaagtccagccaatgacagactcttcccaaaacatcacttgcttatttcgaaatcaaacaatttctcataaatattttctcccaatgctgggaagagggagaggggaaggaggtacggaaactccatcaatcatttgaagggctgccttttatcagactgattttccgtagtgggttgtttgcagcttcctcctccccagttctgggcctcagctgtcaaaaggatttcaccatgcaactttttcatgctagcagttggggccaagaagctaatagatgggaaaaagctctgaaaactccaggacgacaaataggtgtcctcctcacagaaaaggattactgccccaccatccccaggtggccctcaaatccgttctctaaacggcagcagctgtttagaggtgtccaccaggtgtccgcagctttgtcatcctatccctgttcggggcagagactgagggctgctgacccggaccggctattttgggacgtgctgcggggggccttgggaggttggtgacgaaaggagtgcgtgcccgctaagggaggggacgccccggagcgtacactcataaacctggtcccgaggcctgcccctcaccaggatggtgcacgcggaaggggcggctttttagtggcgcaagggggctggtcggtggtagtttggggcggtgctgattgatggcgggcggggcggggcggtgctgattggcggggggggcggggtgaggcgacgctgcgctgattggctgggggcggggcggggcgtctcccgcccgggcctagagcgctgccgggggcgccgggactatgtcgcgggcgcggagccacctgcgcgccgctctattcctggcagcggcgtctgcgcgcggcataacgacccaggtcgcggcgcggcggggcttgagcgcgtggccggtgccgcaggagccgagcatggagtaccaggtatcaggcgggccagcgggccagcgggcctgggcgcgacgacacgtgggcctgcgctgagccgcagaacatccgggctccgctagccgagagggtatcgggagccctggactgggggactcggggggcggaacatcctggaggctgggggtggggacagggaccaggaagttgggcccgggccgccggggctgggaattcggagactatagcgtccccgccccgggttgggaagtgggaagtggcacaggagctaggatccagaagcccagaggctcagcggtgcttctggagttccagtgatcccggagtctgaaccggcagtgagagtggggaaagagggtagggaagagactcaggaattca

SEQ ID NO: 42815 - DNA, 2300 bp, Homo sapien
ctcccagtgccttctgggaagggagagggcctctgcctgggacactgcgggacagagggtggctggagtgaattaaagcctttgttttttaaagaaatggcaaagccttcgactgacccttgaccccctgctccctcagcagagacggagggaggggctgctggtggtcagggacctgcactgtgtagagggagcctggctgtgtggcctggaacaagtccctccctccctgtgcgcctcaggtggcctgtctgtgagatgagaagaagaccagactgaagcctgttcaccatatgccaggcagtgctttctgcagacccccttgcagagaccttgtgatggagaattatacacatttgacagacgagggaactgtggctggtttcaagaagccatggaggccgggcacggtggctcacgcctgtaatcccagcactttgggaggctgaggcgggcggatcatgaggtcaagaggtcgagaccatctggccaacatggtgaaaccccgtctctgctaaaaatacaaaaattattagctggacgtggtggcgcatgcctgtagtcccagctactcgggaggctgaggcaggacaattgcttgaacctgggaggcagaggttgcagtgagctgagatagagatagtgccactgtactccagcctgggcgacagagcaagactccatctcaaaaaaaaaaaagccatgggacctgcctacagtcacaggccaacaaggtggcaggtccaggatttgaacttagagcagtcgagggcctgtgttcggaaccccagagtgagagtgtggatggggcctcctggtgtttgctttcttgcagcctagaccctggggtgtgctgtcgagtgggtgaatggcagaggggaactggctgaatgaaaacctgctgtgccctggatgctgctactgttcaggatgccacccctgccaccaggccagcccagtgggggccaactacaaaagcagccctgtcctgtgccctcaccccaccctggctttgaatgtcactgcccttctcccagcccaacccatcactggtttcatggtctgatttattggtggtgaatacacaggggcaggcccaggacaagcagcttggctactccccctctgctggctgcccgaccggcagagggggctccatgtggcaggagctaggctcccaacgcccactgttcttgccaccctctgggctcccaggctgggctccgctaggctcctgtctcccctgccagttagttaggcaagttcaggtgtggaggccgcagggatagatccaggtggctctgggctgggccctcttctcttcccagcggggaggtgctgttggcctggctgggctggcctgaatctgtttcaagttctcccttcctgcccagctcagttcaccagtgctggatccaggttcaaatgacagggacttgggtttttacaacagcgtggcaagtggtctgtctcctgggcagccatatcccagacccactgggttgaaggttctgtggggtggagggaccccaaggtgttccaagccagtggctgcactggcagcaggcctctgagagggaggcgggaagggtaggcgcggagagcaggctccattctgggtcgagtggaggactggctcccagggtgagttcacaccagtgctcccagctggcggctgctcagtctctcctgctgggcgagcgcggggggccggggctatgccatgctgctggtggagcagggggtgctctgggtgctcccgatgctgtggttggtgctgctgctctccgaggaggccggggcagccaccgccaccacgggctcccgcttgctgggggaacctgggagcgggagcgggggcaggggcggaggtcagggtcctggccagggcccctcaatccctcagaggcttcactgggctcccccgggtggatggaggggcccggcatgctcactgtgggggcctggggtactcacgcgtgtgcgagtagatgtaccagagtgcagcagtgagcagggccccgatgaggaaggcaccaaaggtgatgcccagcacggcgggcaggacgaggcctttgcttgtgcaacctagagagggccgacgccatcagcactgccactctgcccctgccccatcccctaccctgttgtgctggcccatgtgggctttggtgccagctctgctcagccatggaccctcgacttctctgaacctcagtctcctcttgcagcaaacgggctcatcacagccaggcctggcattgagccatggttgctaggactgtccacctagagggccc

SEQ ID NO: 42816 - DNA, 2300 bp, Homo sapien
agaccatcctggctaacatggtgaaaccccgtatctactaaaaatacaaaaaattagccgggcgtggtggcgggcacctgtaatcccagctacttgggaggctgaggtaggagaatggcatgaacccgggaggcggagcttgcagtgagctgagatcgcaccactgcactccagcctgggcgacagagcgagactccgtctcaaaaaaaaaaaaaaagagagtcaggcaactccacagggccatgatgcctgttcctccccacacccctcgccctcctggctggcgccgccagattgaccaagtctccctcccgtcctcccccagaaaaaggtgcactgcctcaacatggacagcctctctttccagctgggcctctacctcagcccacacttcctccaggcctccaacaccatcgagccggggcagcagagctttgtgcaggtacctggcatgcctgtcacccctcgggcctcccagctcctggaacttcctctccgcctttcttcccaccatgactccagaggagatgagactcccagagtcaggagggagacagcctgggtgcacgggagagggagagacagagaaggcattgctcagggacactgacaaggatgtggccctgtcctcctcctctgccccagacaggtccatgtctttctttccactgtgaggactcaggggtgggaactcttaattctagccgatatttgaaggcagcaggtggggtggggtgaagagcagctgcccatgccgcgtggccctacctacccatgcaggtcagagtgtccccatccgtctccgagttcctgctccagttagacagctgccacctggacttggggcctgagggaggcaccgtggaactcatccagggccgggcggccaagggcaactgtgtgagcctgctgtccccaagccccgagggtgacccgcgcttcagcttcctcctccacttctacacagtacccatacccaaaaccggcaccctcagctgcacggtagccctgcgtcccaagaccgggtctcaagaccaggtgagtggggcctgggccggccccagcttcaagtgggagcttccaggtctgtggtttgcaggaagggacatggcagcccacagggatgtggggccagctggtgaggggcggagccttaatcaggcatgtggcctggcagtctggctgccagcagcactttctgccacccgagagctttctggtgggactgctgtgtctggggcactggcagactatgcagctgccactgtccatctatccatccatccatcctttcacttacccgtccgtccatccatccatccaccctcccacccaggaatctaaccacccgcacatccatgtagtatggtcaccagtgtaatctcaaagaacaggagacctgagggaagagaggcggacaaaggacacacactcctggctttctgtatttgccagtcacaacacttcaccatctggtgacccccactctcaggcaatctatcctggacgcccccagagtcacccccaggcccttgcacagacaggcctccaggattacaaacttctctggtcataggaagctagggaagccttcaactcccctaagtgggcctctccctccagccagagtgagcctgggactctgggctgacctggctcatagctccaaagtgttcacaagggtgagggatgcatagtgcttccacagtgctcctgggcatcaaggcctccaggaactcacaggaaacatttcagcagcagccagggatcgtccactaggcaccctcccacagcacagatcttccaggactcacccagaggcatccagctacgaagcggtggagatgggattcaaagccaaggctctagggtgggctggggtcacggagccagggagtaaacctggaagccgcctcccaaaggtgccacatactgctctctctttctcctccaggaagtccataggactgtcttcatgcgcttgaacatcatcagccctgacctgtctggtgagctccctccaggtctctcgggtttgttctagtggctgaggtcacagtagggcacagcgggcagccctgagaaacggcctgggcacatagcacatggcaagggggaccccagagaaagcggcccagaaggggcaggaggagggcttcccagagccatagcagcctagagcaggggccagagctgcactttgcagatggagagcccttgcccgggaccgccctgtggggtgggagtctaggcctctgcccccactcacggctccactccatccccacagttattggctg

SEQ ID NO: 42817 - DNA, 2300 bp, Homo sapien
gcctgagactggattatgcttgcagggtttgcatgcccttggggctgtgagtgatgattatatgtggaacttgaaggaatatatatatatatattttttttttttgagacggagtctcgctctgttgcccaggctggagtgcaatggtgcgatctcggctcactgcaaactccgcctcccgggctcacgccattttcctgcctcagcctcccgagtagctgggactacgggagcccgccaccacgcccggctaatttttttgtatttttagtagagacggggtttcatcatgttagccaggatggtctcgatctcctgacctcatgatccacctgcctcagcctcccaaagtgctgggattacaggcgtgagccaccgtacccggcctgaaggaatatttttaatagttctgtatttattttgatagatataagaaaatttggccaggcgcggtggctcacgcctgtaatccctgcaatgggaggccgaggcaggtggatcacctgaggtcaggagtttgagaccagcctggccaacatggtgaaaccctatctctactaaaaatacaaaaaagtagccgggcatggtggcacgtgcctgtaatcccagcaactcaggaggccaaggcaggagaatcgcttgaacccaggaggtggaggttgtagtgagccaagatcgagccactgcacctgggcaaaaagagtgagactccatctcaaaaaaaagaacttttaagtggtgtaggatgatgacatctaacaaaaatgaagagggagcagggcaggggaatggctgtgacttgggacccctgggttgtggtcagtccttggtgctggggtgtggcaggccacagagaccccagtgcctcctgatggtgcccctctcttccgacccagcatttgaagtgcaccatcacgggcctgaccttctgggaccccagctgtgaggcagaggacaggggtgacaagtttgtcttgcgcagtgcttactccagctgtggcatgcaggtgtcagcaagtatgatcagcaatgaggtaagagctggggccaaaaaggtatcaggaccagcctggttggtgccccctcaggtgccctccctgatcccccagggtggaggtgtgtttgggagagcaggctgcaggggctcagaacacaagacaagcttggccattggttggcttagtctccccatctgcaaaaatgggcgtattgggtgggataccctctggggtcctttctggctctgaccagctccctggctttatccccgcaggcggtggtcaatatcctgtcgagctcatcaccacagcgggtgagatggacagtcacgtgctaacccacctggcccaggggctgctgctgggccggggcctcttcctggcctgggagggagcaggcctcgggaaactcctggcaagccatgtgtgtctggaatgcctcggtctccccttctgtatgaccggagcaggactgctgagggtgacgctcttggtctctcaagtcagagggcttagcacatactggctgtgtggccttgggcaagtcactttagttttctgggcccaaaggtggcctaagaaaggactctgcgccacagggtgcttctgggcagccaatgaggtgctgtgtggaagctcttcacacagcctggcagctggtgcctccttgataaatattagtttaaaaaaaaaaaaaagggccgggcgcagtggctcacgcctgtaatcgcagcactttgggaggccgaggcgggcagatcacgaggtgaagagattgagaccatcctggctaacatggtgaaaccccgtatctactaaaaatacaaaaaattagccgggcgtggtggcgggcacctgtaatcccagctacttgggaggctgaggtaggagaatggcatgaacccgggaggcggagcttgcagtgagctgagatcgcaccactgcactccagcctgggcgacagagcgagactccgtctcaaaaaaaaaaaaaaagagagtcaggcaactccacagggccatgatgcctgttcctccccacacccctcgccctcctggctggcgccgccagattgaccaagtctccctcccgtcctcccccagaaaaaggtgcactgcctcaacatggacagcctctctttccagctgggcctctacctcagcccacacttcctccaggcctccaacaccatcgagccggggcagcagagctttgtgcaggtacctggcatgcctgtcacccctcgggcctcccagctcctggaacttcctctccgcctttcttcccaccatgactccagag

SEQ ID NO: 42818 - DNA, 2300 bp, Homo sapien
tgggccaaggtcagtttccccagcaacctctctgggctcatgatactgctcaggaggaatctgagctcctctggcccacacctcaaacttgggcaccaagagtgcaggaggggacacgctgtgccacagttcacatgccacaagccagtgctgccttgggacagtgatggctcctccaccaaatatcagattgaagcatgtggaatatgccaggttctgacctaaaaccccagcattttcatacgatctattgtgcatctactatgtgccaaagccctatcatgctaggcacttggggacacactcaggccctgccttcctggagctgatactgtgatgagggaggtgacaataaacatgtacatgtacacagataaatctataatttcgggtcttgctgggtggtttcggggctgcagcctaacatgtgtcatgggctcatcccttatgttaacacacggaggcccggggacttgcacagggtcacttggcaggtgagtggtggaagggaagttcgaacctaggtcctctgacgcctctccccctctgcagcaccgtcctgcctgccccaccactatctttggctgtgggtgagggcggggctctgttaggtgcagggctgctgagggaagggactgaggtgcgcgtgtctctgcagcccaggggtcactgtccttctgcatgctggaagccagccaggacatgggccgcacgctcgagtggcggccgcgtactccagccttggtccggggctgccacttggaaggcgtggccggccacaaggaggcgcacatcctgagggtcctgccgggccactcggccgggtatggctctcgccccgcccctgacactagtccccaccccgagagaccacccccctgaccccccccgccccctctccggtcccttataaagccccaccccagtcccagccccagccccgccgcagccctgtgagagcacagtcgctttctcctactctaggctacgccccctatgggccccttccctttgggcacaagcctggccccagtcccatccctatcccataaacccacacctggccaggtaagagtgcagccgccgcccacccgacgccaggcctcgctccccgcctggcctgtccgcttcagtgttccatccgcgtctgtctccccgcaggccccggacggtgacggtgaaggtggaactgagctgcgcacccggggatctcgatgccgtcctcatcctgcagggtcccccctacgtgtcctggctcatcgacgccaaccacaacatgcagatctgggtgagttgtgcgcagctcccgggacacaaaacccaaactcccaacctctggatcagggaagtttcctggaaaggtgaacccccgagctgagctgaaggacaaatcacctatgcccatacgtgagggaaggggccaggcagaagacgcagcaggagtggggacacagcaggaccgaggcctggcataaccctggctggcctgctgtggcacagactgtgtccatggccccctgttctgcctctctccccaccattagaccactggagaatactccttcaagatctttccagagaaaaacattcgtggcttcaagctcccagacacacctcaaggcctcctgggggaggcccggatgctcaatgccagcattgtggcatccttcgtggagctaccgctggccagcattgtctcacttcatgcctccagctgcggtgagcacccttcccctgcccctcccttcccttcccctcccttggatcagtggccacactgttggtgaagcacctctgtgtgagcttgggcaaggtacatcagcctctctgagcctcatttttctcatctgcacatgggaacaatgggagtagctaatcatagaagagcctgagaatcgcttgaacctgggagatggaggttgcagtgagccaagatcgtgccactgcactccagcccgggtaacagagcaaaactccgtctcaaaaaaaaaaaaaaaaaaaaaaaagcctggtgcgggcacacagtgatcacacagtgaccagccgcctggcctgcctctgctaccccacaggtggtaggctgcagacctcacccgcaccgatccagaccactcctcccaaggacacttgtagcccggagctgctcatgtccttgatccagacaaagtgtgccgacgacgccatgaccctggtactaaagaaagagcttgttgcggtaagggaactcctgcccctctggctcaggatgacatggacatctggttcctcccctagcccaagactcttggggtcctagccca

SEQ ID NO: 42819 - DNA, 2300 bp, Homo sapien
caccctttgcctcgcagtgcccatggccttgtctccgaggttacaggaaaaggcagaggagatgcccttctcagggtggccctctgggagaggacactctcccttgacctcaaagccacgcttggctgcaaactggccaggcagccacaaggctgggcaagcaaaactatccctaatccccacccaaagagccacaccgaccctcccagccgctgtgacagctcctgcagagacaaacacacggcctactcttgtcacccgggccggccaataagcacggagaggcaaggcctcagaccctggacagacatcctccctccagaggcacccagggcctcagccttctcctccctccctgggcctcaatttctccacctgtgacccagggcaggtggatccagggagaagaaccttctggctccatctcaccgtgggtcctgccagcacacacaaagatttggcctctcaaagcctagctctgccagcgtccttctgctcaagaactctccatgactcccagtggccctaaggacaaagtcctggcatttgaggccctcccaatgcagggccagactctgcctctccagcttcctgtccccaccacacccctgctggtctcacggtggtccgactgtttcctgcttctgtgcctttgcttagtctggcacccctgcctggcatgctttcctcaccccttcttctccccaatcccaactcacccagtctttcaaagggcaggcctaaataccaggccctccaggtggcccaggattccttctctgagctttcatgggcctggccctgggtgctacctgtgagtagtcccacggtgggtacatagtaggtgcgcttactgtttgcagaatgaacatgggacagtttggggactgtcacccagctcagggagcactgatggggaagcatctcctgtatgtcccagggctcagtgctgtagtgtcctgaccctcagaaatctcataatggcttggtcaggaaggcatcgtgccccactttgcaaacagggggtgctgagaattgaggggccttgtccaaggtctcatggctaggagcaagcagaatcggatttgaacccagggccacgtgacttcagaagtgccattaaagtccccataatttggagctgtcttctttttttttttcttttcttttttttgagaccgagcctcactctgtcacctaggccaggagtgcagtggtctgatctcagctcactgcaacctccgcctcctaggttcaagtgattctctagcctcagcctcccaagtagctgggactacaggcgcacgtcatcatgcccagctaacttttgtatttttagtagagatgggttttcaccatgttggtcaggctggtctcgaactcctgacctcaagtgatccgtctgcctcggcctctcaaagtgctgggattataggcttgagccactacactcggcctggagctgtgttttgtcggtgaaggattttccacccatgaaggggtcagacgtgaagtgtgtggccctgggcagctcctctgagcccagagacgccagccctagccgccttgctgtgccactttgggacttccctccctagcctgagcttcagttttcctgcctgttaggcagccccatgtcaactgcacttagtaggccgggtttgatgcccgacaagacgtgaagtggtggaggtgggcaggatcccagcgctaccatcttcttgaaccagtgatctcaacacatcggatttctgtttcctcatctgcaaaatgggatcagtgagctcaggtgggtcacaaattctacaggaactactttagccaagaccggccccctgaaagttcccctcggtgggctgttagggtgattgttttcatctgtggggctccctgatgcgtcccacccaccagccttggagagggtgggatgggagggtggggtgcttggggagacaagcctagagcctgggccctcccaccccactgcctccccccatcccagggccccccacccagtgacaaagcccgtggcacttcctctacccggttggcaggcggcctggcccagccccttctctaaggaagcgcatttcctgcctccctgggccggccgggctggatgagccaggagctccctgctgccggtcataccacagccttcatctgcgccctggggccaggactgctgctgtcactgccatccattggagcccagcaccccctccccgcccatccttcggacagcaactccagcccagccccgcgtccctgtgtccacttctcctgacccctcggccgcc

SEQ ID NO: 42820 - DNA, 2300 bp, Homo sapien
cacgacccaagttattttggatcaaggaagtggcaggtgccatcagggcggagggggcttagattaccaggaggggggcggggcagggcggggtcgaggccacttctcagggcttcactgtggttgtccctggcccaggacgctccccctcccatgggcagctgctgaggggcacttggcagctcctacccccgctgaagcacactcagcaggaaaagtggctgccactcctgcctggggcagcaggggcatcagcaaagccacttcagctgctactgggtgccaggcccagcgtagcagaaactcagggccgagttggaccctagctggccctcgaaccagtctgtcctcctccccatgcctcagtttcctcccaagatggcagtgaggatggaacgaggctccccagccctgtgctcagcccatgccaggcccagtcaatgggatcccaggcccgcagcacagaagaggggcccagtacagcgtggttgtgcagtgcagggcaggtttccaggaggcacctgccagtgtgggagtggagggcagagtccaggaaggcttcctgaaggaggtggcacctgagctgagtcccacacaatagcaaggtggggaaaggcatccaggcattgggtacaacatctgccagtggcagctgatagggttgcagagggcagcagaggtcagctcaccgggacctatccactatgtcaaggggcccaggctttgtctgggagccgagagggccacacatgcaaggttgtaagcgggtgtgtgatgtggtctgatacttgccagagaaaatcctgcaaattgcgtggcagggtgtggaggcttcaaggcccatgtggaggcgggggcagtggcccaggccccttacttagcacaggacatagtggtgaggagacagacggagagagcctggggaggggagggttgggcagtgggtgtgcagggctgtggagaggagagaggagccttcacactgactcagcctgtggcttggccataggggcctggagctgggacttggggagggctgttcagagcctgagaagcctgtggggcttctggggcctgtctcgggggcatggatgtctggggctggagagaaaggcctgggctgcctgcacagggatgggggtccttggagcctgaagccaagtagagagggtggtgtgggtgccttgggtggaggtcccggtgcgggtggggtcgctggctggaggtcaaggctggaggggagtgtggctgtggtggttgcgagtggccttggggagggctggtggctgggagtgaagaagtggaggccaaaggtgtccagagggcagttctgagataggggggcgaggtaggggaggtcctgggggctgtggcagcacagggtggggtcgcaggtgtgattgggctcatgggcaggctgagggcaaggtgggggcagtaaagccaggtcctcaaagggtgggggtgcaggggacatgcgtggggctggttgttgggcctgtagaggtgaagagcctgggaccgcctcactttgacaactgtaaagggctgtgttcatgcgagcggctcctgtagattccttcaccccaggcctctgtcccttagaggatccccatccaaacctcatcccagacacacatagttcctggccacctcccacctcctggcagcttccctctggccctggggagcgttgtcaaggtgtctgggcagacgctggccctgcgccctgttttctgggagtttcgaggggagcagctctgcagttgtgtggccgctgtttatgtccctcggtgccatcctcactgtcccagcccctccagcgggaacccaggtggatgggagggggctactgcccttctgtgacaggtgaggccatggaggccagagaggaaaggtgacttttccaaggtcactttcccaaggtggctttctcagggaaggggtcctgggccttccctgcccccagcagccccctctgccctcagactgcatgtcgggcctggcacacaccagttgccttgggtgtggcttagtggaaggtgagtcagggtgaggaggaaaatccctccccaacctgtgcccttgtcttacagagcactgacacggctcccgggacctcggcaggatggaaggtatgagcctcctctccttttgcccattgcctgggcctcagtgtgcctgactattaagggggtgcgctctcagggagacattctgggaggggttggaggaggctctggggctgccggagggggcctggctgggagcctccagtatcctcctctggcctctcacgg

SEQ ID NO: 42821 - DNA, 2300 bp, Homo sapien
ctcccaaagtactgggattacaggcgtgagccactgctcccagcctccagtcatttttatgcaggtgggatcagaagagtgcagtggggctttttgcctatttctttttttttttttttttttttttttttgagacagagtttcgctcttcttgccttgttgcccagtctggagtgcaatggcgtgatctcggctcaccgcaacctctgcctcctgggttcaagctattcttctgcctcagcctcccaagtaggtgggattacaggggcgcaccaccatgtccagctaatttttatttttagtagagacggggtttcaccatgttgaccaggctggtctcgaactcctgacctcaggtgatctacccgcctcaggctcccaaaatgctgggattacaggtgtgagccaccgcgcccagcctttttgcctatttcttaccaatgctatgggtgtctgaagcctcttgtcccattaaccacaaacaacttggacttcctttctcactcagaccctatgggaaagttgctaactcctcacccaccgtggctgtgccatcatcccagtgagtccctgctggcactttaaaactttcctatgcaaatttgtgcccacatgtttccttgaaacaaatttcttaaagtagaagggcgcatttgaagactgtgtgtgtgtgtgtgtgtgtgtgtgtgtgtgtgttttatttttagagacgggatctcgttatgtttcccaggctggtgttagaattcctgggctcaagtgagctcaagtgatcctcccacctcgtcctcctgaagtggtggggttaacaggagtgaccattatgcccggtccatttgaaattttgatttactttgtcaattgctttccccaaaggtgccaatgcacacacccttgagagggcctttcaaacagcttctaatgcaacacctctgaccccactgcacctgcccccccacagatggggaaactaaggtcccaagaagtaaggacttatctgacatcacaggtagcagagacccaggcctcctggtctcctggctgctgtggttgctgaggcaccaccactgaaggtggtctcaatctcctggtagtctcactctcttgctcaaatacctcctatggctccctagggcctataatacaaattccaagttcaacccacctcaccatctggggctgctgcctgggctcccatccctgcccggctacatcactgagcacctactactatgtgccagtctccctgcaaaacgctggataaacacgtggctttctaccagggaacctcccgcaaggtatttgacatgctcgcctcccgttctctgctgtgtctaaggattcacagatgcggctggagtctgctgcttagcacagtgagtgctcattatgggagctattcttcttatcaagaccgcaaatcccctctctggctatccacagccttctgaatgtcccgggcaactccaggggagcagggctggttttctataatcttctaccttactgggtggtctttggggtcctggcgggttccagtcccagaggagctcgaagggtccctcccaacaggggaagaggagtcccaggtgggtctcggccagggcctctgggcaggctctgagggcgggcttggggactgtggccagcaaagcccctgagtcgatgcctcagccctctcgctccctggtctggcctctctctggcaccaatgcgctgtgggattttgcggaaagagccgctcttctctgagcctcagtttctccagctatcatagggaaagcctggccttgtaccctggagtgtaccttgagcacagtcggggtatcgcaatggaaaactcttggcaaactgtaaagtgtagttcgcgtgtgtgggcacagccacctgggggtccacggtgcggggcacacggtgccgggtgcggtgtcgccgcgcacccgggctcgggctcggtcccgccccgcttcccggtccctggtccgctctccctccctccttcccgccctccctgccttcgggaacgccggctcccggcatgccgcgcgctgacagccttataaatagtcgcctttgccggccgccgcgaggacgggcagggcacgcactggccccggcgcccacccgcacccctccccaggtcagtgcgtgcccgcgcgtgtctgggggggcgcctctgcggggaggggcagcggcaccgggggagggcgggggcgtgctggtgcggggctccctgggggctgtgcggctgtgtatccgtggttgtgatccgtgtgtgtttgcgtggctgtgttccccgg

SEQ ID NO: 42822 - DNA, 2300 bp, Homo sapien
ctcccccagaatttggaagccagggtttttaaaggatagtttggcaggcagggggactagagaatggttggggatgaaatcataggggtgttgaaactgtcttcacctgccgagtcagttcctgggtgggggccatgggtcactggtctggttggcatccattgatctaccagattgcaaggtctgaaaaatatctcagacactcaggttttacaataatgatgttatctatgttaaaaacaacgatgatgttatctatattttaaaaagcaacctaagaaacaatgactggttataattcaactatagctacatcttagcagaaaagcaagctaagagataatgactggttatggtttatgcctacagcttgacagaaaggtgtgcggggggtgagacaatcaattcttagtgaccaccttctatcgaactgactatatgcaggcaatcatgcatctacgaagagaaggacaaaggaaaaggaaaataagtaaaacaaatgattttactacacctgtatcctagcagagtccaggcctctgtctcagttgttaccttgtggccttttattaactttacaaagtcagttttagtccccaaacaaggtggagttcagttttgggaagcggctgttatcatctttgcttcagagttaaactataaagtaaattcctctcatagttagcttagcctatggacaggaatgagcaagggtggttagactgtgaggtcagaaacaggatggagtcagttatgttagattcctctcactagattcttttttttgttttgttttgttttttgagatggagtttcgcttttgttgcccaggctggagtgcaatggctcgatctcgggtcaccgcaacatctgcctccggggttcaagcgattctcctgcctcagcctcccgagtaactgggattacaggcatgcgccaccacaccttgctaattttgtatttttcatagagatggggtttctccatgttggtcaggctggtctcgaactcctgagctcaggtgatccgcccacctcagcctcccaaagtgctgggattacaggcgtgagccatcgcacctggacttccaggccaccactcctaaagtgccctggctgcagtcgctctttggtcacttgcccctgtttcccctcccttcccctcccctccctctcccccctctctgtcccctccccctgtcttcttcccctccccctccccctccccttctccctctcctctcctttcctttcctttttcccctttcctttcctttttcttttccttcttctttcctttccttgtttcttttctttctttcttcttacctttctttatttcgacagagtcttgctctgtcatctaggcttgaatgcagtggcacgatctaggttcactgcaacctctgcctccaggttcgagcaattcttgtgccttagtctcccgagtagctgtgattacaggcacgcgccaccacgcctggctaatttttgtattttttggtagagatgggatttcaccatattggccaggctggtctcgaacttctgacctcaggtgatccgcctgcctcggcctcccaaagtgctgggattacaggcatgagctacaatgcttagccatttgccactattttctttttttttcctggcatgtattatgtgcattcttatctgtctccccacctgtttcttgaaggcagaagcctggtctgttttgctccttgctctgccccaggacttggccattaaccagcttgctatcaatgtgtgctgaatgtggaatgaatgggctcagtttccctgtctttaaaatgggcataacaattcctgggtcctggaggcctggatgtatggagcacagggccagcacagagtggccgtgataatgttgactttccttatccaccagacactgccctctcggtgccaccagtgtgtgattgtcagcagctccagccacctgctgggcaccaagctgggccctgagatcgagcgggctgagtgtacaatccgcatgaatgatgcacccaccactggctactcagctgatgtgggcaacaagaccacctaccgcgtcgtggcccattccagtgtgttccgcgtgctgaggaggccccaggagtttgtcaaccggacccctgaaaccgtgttcatcttctgggggcccccgagcaagatgcagaagccccagggcagcctcgtgcgtgtgatccagcgagcgggcctggtgttccccaacatggaagcatatgccgtctctcccggccgcatgcggcaatttgacgacctcttccgggg

SEQ ID NO: 42823 - DNA, 2300 bp, Homo sapien
ccggaggtgagcaggcgccgcgcgggagcaggccgcgggggcgggggcggaggcgggggctggggcggagggcgccgggagaggagattgctaatcgccggggatggggatggatgcgggtcccccggcggcacccctagaccccttcccccttggtagccgcgccccgaggttccggtcctcgcgcccagggtctgtcgcggggtccgctgggcctcttgccgccgactaccccgtcagcggtcctgcctctcttttcttcccagctggggttagggctccggacccccggagtgcaggagttggggagggggatgaggcgaggcgcgcgctgggtgagccccccaccaggtggacgcacgggctcagcgtcccgcatcgtcttggatttaggagcccccctcccccttctccctggagccctcctcccacgcgggttcgtgggggcgtcccgatctgcgggaggactcccggggctggaagaaggaaagcccccaaacagagggcagggtgtggcccccaccctcggctcccgctcagctcgcctgcacgtccagccttgggctgagtccatgctcctggcccagcgctcggggctgccgcctccccagcgtgagcaagccgctccccaacaggccggcacccctagacccccgccctggtgcctgtgccgagccacgtcctgggcacacactccatggcctctgacccgttccagccgagagggatcctccagggagacgaagtcaggctcagccctgggcagctccctgtaaacaaggctctggagccggctctgggcggccccgcaaggcgctttgcctctctgaacctcagtctccttatctgtaaaatgggcaacaagagctcctaccatgcattgcctggattcagtgcgtgggtgatgcttagaacgcattcccacacattccttgatattccgggaaagtcgctgcactggggtcaggggaggagtgtttcactgacacactggagaggcgggccttgaacagtgattaaccacaagactaacagctgttggcattgtgggagcactttcttttctttctttctttcttttattttattttatttatttatttttgtttttgtttttgagacggagtctcgctctgtcgccaggctggagtgcagtggcaccatctcggttcactgcaacctccgcctcccgggttcaagcgattctcctgcctcagcctccggagtagctgggacaacaggcgcacgccaccacgcccagctaatttttgtatttttagtagagacggggtttcaccatattggccaggctggtctggatctcttcacctagtgatctgcccacctcggcctcccaaagggctgggattacagacgtgagccaccgcgcccggccaatgtgggagcactttcaagccccgcgtgtcccttgccacatctgcttgaatccttccaacaaccccttgagttaccgactcttattgttcccatttcacagatgaggaaactgaggctcagagaggtcacatggcttgctcgaggccccccagccagtaagtggtgaaaccgggattcgcactggcagctgacatgctgtactgaccatggccttctcagagcaggattgtgacggggcggaccagggggacggtggtcctggctgagggcacagctcgggcaaaggtgggaaagtgggcggcgggcagggggcatccgcaggaaagggtggccacgcgtagtaagatataggcggctggacccctgggcgccttgaatgccaaggtctcagggcagatggggccaccccaggattctggactcctgtcttttgctctaacggtctgtgagggcaagaacaagccgctccctgcttctgatgaggccccgttttctgctctgtaccgcagggcctggactagataggagtctgggcctccctgactggcagtgaggggcagccgctggagaaacccgaagccgagctccggatgaggggcgctcccacggggagggggcggggttggagagggggcggggccatgatctaaccaatcaggagcgaggtgtgtgtgccaagcctcctctggcccgaggttctctggctattcctggtggccgtgtaggagtaaacagcggctaggtcaaagggctcagagaatacaggaactgagaggcccctggagcaggggacggagctgaggagggccccctaagccccagtttcttccctctgcactcctgcccgccctgcccccggcctgtctgctggaggtaggctggacacagtacattttcccttt

SEQ ID NO: 42824 - DNA, 2300 bp, Homo sapien
ggtgatccgcctgccttggcctcccaaagtgctgggattacagggctgagccaccgcacccggtctatttttattttattttattttattttatttttttgagacggagtctctctctgtcgcccaggctggagtgcagtggcacgatctgggctcactgcaacctctgcctcccgcctctcaggttcaagcgattctcctgccttagctttccaagtagctgggattaagtagcgtgttccaagtaagcatgtgccaccacgcctggctaatttatttgtatttttagtagagacggggtttcaccatgttagccaggctggtctcgaactcctgacctcaagtgatccgcctgcctcccctcccaaagtgctgggattacaggcatgagccaccgcgcccggcccctattgtgtagtttttacttatcttccaatacctctttttcactccttgtgtctctaagattcatccatgtaattgtagatcattgattttaccctgttacatattattccacagtgtgaaccttccattgtataaaacaattccattctcttgttgatggatatttggggtttttccccatagcgatgctgctatgaacctccttgggcacatctgcaagaatttctccagggcatgtgtactcagctgtggaatgcaaatgtttacaactttgtttccaagacagtttttttttttttttttttttttttttttgatagggagtttagcccttgttgcccaggctggaggctggagtgcaatggcatgatctcggctcactgcaatctctgcctcctgggttcaagtgattctcctgcctcagcctcccaagtagctgggattacatgtgcccgccacaacgcctcgctaatttgtgtatttttagtagagactggaggcggggtggggtggggggttgggggagggggtttcaccatgtggaccaggctggtctctaactcctgacctctggtgatccacccacctcagcctcccaaagtgctgggattacagccactgggcctggctggcagttctttaacttgctttcttcacgtaaatatcctataaatatcctggccatcctttcctgccaagacatactgacctgcatccttcttttttttttttttttttttttttttgagacggagtttcgctcttgttgcccaggctggagtgcaatggcgtgatctcggctcaccgcaacctctgcctcccaggttcaagcgattctcctgcctcagcctcccgagtagctgggattacaggcatgtgccaccacgccaggctaattttgtatctttagtagagacggggtttctccatgttggcctggctggtctcaaactcctgacctcaggtgatgcacctgcctcgacctcccaaagtgttgagattacaggcgtgagcgaaccaccgcgcctggcccgcatccttcattttaacagcctcctcgtgcacttcggcaggctgtgccttaacttaagcagtcccctagcaatggctacttaagttatttttccctatcacgtagagtgatgtcatggatgccctggtaattacaagaaggaacatcttaagttttcccagctctgtgaagttattcttctccctattttccagaggcagggagaagggaagttatgcgctaaggctgcgcagctggcgaatggcagaggttaacttgaatctgagggtgaaccctaagtttgcccaggtgactacagggtgcaaggcagggagctggaggccctctgtggggagcccaggtagaaactccactgagtgcaagcacagcgtgctccggaactcagtttccccatccggggtcatggtggcaataaagagagctagaagtgggcccgatccacactgcagggagccgaaaggctgttgtattttggtggtcaccccgggctgcccagtggggtgaccgaggcgctcaccaggcggcggcacccgggtccgcctcccctttcccttccccgcccgcgccgcccgtgggcggagccacccgcggccccgaggctccgcccacctcccaggcctgggccgggccgtgacggcggcgctaggacccggcgggccgcgggtgcggcgaggcctgggcggcctgaggagcgcggaccccggcgctcggctcccggcgccatgtgagggggctcgggggccgcggggggccgggcgctccccgccggaggtgagcaggcgccgcgcgggagcaggccgcgggggcgggggcggaggcgggggctggggcggagggcgccgggagaggagattgctaa

SEQ ID NO: 42825 - DNA, 2300 bp, Homo sapien
tcctgctggtggccccagcccagccccttccccagcaggtcagggctcctctggggggctggtcccttcactgctctggcccaggaaactgaccctaagtcggaggcttctttgggaaccccgttctgtacccagtgagaggagagccagggccaggaggaagcgactctgagtgggagggaaatttctccacccatattgcttccctggtcctgggtcaaatggcaagttaaattagccattaaatctggggttgggcctggcacagtgggggctaaggcgggagtgttgcttgagaccaggaatttgagaccagtctgagcaacgtgacaaaaccagtctctacaaaaaaaaaaaaaaagtgggccaggcgcggtggctcactcctataatcccagcactttgggaggccgaggtgggcagatcacttggggtcagaagtctgacaccagtgtggccaacagggtgaaatcccatctctactaaaaatacaaaaaattagtaggatgtggcggtgggtgcctgtagtcccagctactcagtaggctgaggcaggagaattgcttgaacccgggaggcggaggttgctgtgagctgagatcatgccactgcactccagcctgggcgacagagtgagactccatctcaaaaaaaaaaaaaaagaaagaaagaaagtgggtttggtctccctgcaaaacaggaaggcagagggcagccctgggtggctgctgtgagggagtctagtctggctcaggccttactttcgtcatctgtaaagtgagaaaaaaagtcccaccagcggaaccttgccatcctcagaggaggactggtgctagctggttttacagatgagctgaggccactcagctgaagccggacaactgtggagcggctgggccagtgtgcaataccaggtctgagagctgagcccgaggacctgagccctgcacccctgggctggagagagcccacaagcatcaccccttccaggcatcactacttcatctggggacgggaagactcagaggactgggccagggcctcgggctgtcagctgggatgcagccctggggttctagctgccagctccagggatcagggccctatgctaatgctctgctgttgccaactttaaattcttagggttttttgtttgtttgttttgttttttgttttttttttgcaagaggacttgcattttcattttgcactggatcccagaaattatgtagccagtagtcccgggggctctgggtgacccggcatactctccctcccgcccttggctttcacagagggggctgagacctggcacttggttcacagcaccgcttttgtgcccggcttcctcctgcccagtgccaggtggacccagaagtttctgcaggaatgggaggggggaggagagccctgagctggcgaagcaaggagcaggctggcagcggagccacagcacggagcgaggagctctcaacaggtgtcaggcagaggtaagggcgggatggagtctggtaggcggaggtggagggggtttccgggctcagagggagggccctggagtcaaggcctgacttctttctggccccactttctgctgtagtggtcttggcagattagtacccctctctgggcctgttttgtcatttgtaaaaggttaaaattgtccccacctcacagattcagacagtggactatccccatggcttaggacatagcaggcacttgacatgtggagccagcatttttcgtggggttcatctgccctgggctggccctgcccttccttggtggtgacagatggcaggaagcccctgccccattggttgtctccctactccctgcctcatcctgggtgtccaaggcccagtgtccactggttctgatgggatttgaactccactctctcctgggaggctgcctcctcttccttctctatcccctgggaaaaggctgacccagcccttgggcccaggacacagaggctcctctaacctggccctaccctcgggtggggtatttactgctgggttggcccaaatggtgtgtctttctgggggtggtgacctggcaggagtgatgcgtcagtcacttcctccaggcagatggagatgatccttgacaggtctggtggctggttcggggtctactgaaggctgtcttgatcaggaaactgaagactctctgcttttgccacagcagttcctgcagcttccttgaggtgagcccagggcaggagcctccccacagccccagggatcacctgaatctgcagccactctttgggcctctgttttcctgtt

SEQ ID NO: 42826 - DNA, 2300 bp, Homo sapien
ggtgatgcttgagctgaatggtaagagaagccaccatatgactagcgcagtccagcagaggacacagtgagggcagaggccctgcagtaggaatggcttcagtaatgattggcggtcggagggtggccagggcaggtggagggtgactgaaggagttcacactgtgtaggatcgtgtaggttgtggtaagcagagtaggtttttgccaaaagcaaagtgaagatctttatctggggctgtgggacttcctggtcacagttctactgtggacttatgatcctcatctaccctgggagcacgggccatttgggcatgtccctgtctccatgtggccctagcaaggatggagttgcctctccggggaaggaatcatcacctcaccagccattgtgggcagtgagtgaatccatagggaacttctcaccattgtgccctcagggttgggcctatgaggaaagaaacttgaagaacgaggactgagaggaaagggctctggctttggggacccactgccttgtgtgagtgaggggccatggtgactgagcgtgaaccactactccccatgtgtgtccaggctggagtggcagtgacaggagagtttgtgctcaaaggaggcccctagggggcagggccactacagcagccctcctcccagcccctggataggggaggcactgaggcctagagcaccaggcccaggggtgatttggctttgaacctggagcagggtagactgggaaggttgctgagctggggacagataccctggcatcctgcccaggcctgagcctctgagaaaaaggaaaaaggagtttgaaatggagaccagggcaggagcccaagctggttcccaggctagctccctgcagaggaggtgggtgtggttgggatggtgaaatgatctttctggccaattcaacattttgcacaaaaaatcataaacaagggctgggcgtggtggctcacgcctgtaatcctagcactttgggaggccgaggcaggcaggtcacttgaggttaggagttcgataccagcctggccaacatggtgaaaccctgtctctactaaaaatacaaaagttagctgaaaatcgcttgaacccaggaggcggaggttgcagtgagccaggatggcaccactgcactccagcctaggcaacagagagagactctgtctcaaaagaaaaaaaaaaaaaatcctagacaggaagtgtgccctctcacttccccataggcccacccctgctactgtcccagtgctttctgccaccagcctggcgcttgaaggcagttgcctctgagatcccaagggaccccaataggacacactgcagcatctgcctggggcctgagctgacttgacttggatttggaggacattccagcgagggagccttcgagaggtaagagtaggtggtcacagccccgggtctggagtgaaacttcctgggttcgaatcctggctgtgacaggagctgcctctacacgtgtgtctcagaggagaaaaacagactcaggtgactgtcacactgacataatcataataaaataatcatattgaaaataactcatgtattcgttgtttatctgaatttccaatgtcactgggcgttctgtatcttacttgataaatgcagcaatcctaccagttgaaacgtgggctgcctgacccgaagccctgcttaatttccctccccaaccaccatttcagaaatggagacactcaagtccggacagccaggccgccactgcctggtggcccccgacaccctctaggtctctttcccctgcggcccgacagcctcgcccaggcaggagcctgctggaaattcggcaggaccgaaaagggagatgctggtactcagactccgccccggctctgaagccccgcccccggccctgaggccccgcccctagctggaggcctcgccgccagccattcacgtcccgccccgtcccggccgcgcagagccctccccaggtcgcgcaggccgcgctcgtaggatccgcctgcggcgcgcaggccccgcccccggcgcgcgagtctccgcccctcctcgccggccccggccccggccccgccccctgcctctggccgcgcggatcagcttccagcccagtcggcccggcccgggggccatggagctccgagcggcggatcgcgagcctcctgcgaaccccagcctgcacgcccggttagcattcggccgggagatgcggcagtggaatctggaagggcggtgaaaaacctacgtcctgccctcgcccggcctctccattcgtcccccgggtagagaggta

SEQ ID NO: 42827 - DNA, 2300 bp, Homo sapien
agggatatcaaggggaggaaggcagagagggaggaacattgtggtgtgggagctggaacgtctggggtgcgttgggggtgtgaggaaccccctgactcaggtggttgctgtgtgactctaggtgggtctctgcctctctctgggcctcagtgtccccatctgtataatggggggagattatactccttggtttctgaggccctcccagccctgccagggtatatggttgaaaagggacccccacccccaccctgctggcctagcccatcctctctggagctcaggctgaggcagggctggctcagcagaaaggtggcccaactgcaagctcagcagctgggcgggcctgggtgagcatgtgtgtggtgttcgtgtgtgtgcatgtgtgcgcagtgggaccacattccacagaccacatccgggcacagggacctggagatccagggaaagtgtagagactcgagggagttctctaaatcacaaactgacctcatcacctgctgaaaagcttccatggctccccaatactcagcatgacctccagatccagctgcatccagccttgttcacactccatccctccctcactggcttcagccacttgggccctccttcccttgccggcagccaccagtgctgtttctactggtgcgagcaccctgctcctcctctccactaccctttagatttcagcttagaggtctccacccccaggaaggcttctctgattttgcccctcccaggttgcatcaggcaggtcccttggcttcagggccacccccttgtactggacagaatctggcttcacttggccagcctgtgagtctgggaacgtgcctggcttgaactcatggcctggtgctggtgatccagagtggatgagatacactcaggccttgccgtgggtcactcttgtccccctggcatccctgggaggtgagcaatgcatctgcccaactcaggcactctcagaaactccggtcccggtttgctgaaggaatccaattggaggaggtgggggacgggccaggtgcaggacatctggagatcctggggcaggcagcaggggactgagggttgccctgagctcctctacctctccctgcaggggccgccctcccgggacgatttctcggaggtcctaacccaggttcacgaggtaggaggcccagactcccgtgtgggagggacgtgtgctggtcttgctctctcctctgcagttttcccatctgtgcagtgggagtgaaggcttgtccctgagacttgagccttgcaggaagggtgtggtcaccctgaccctcctgtcccaggaccaactgcacacacccgggcccacgcagacactccagaggaggctcttcctcccctgcagggcttcgagctgggcacgctggccggccccgcctttgcctggctgcgccgctccctgggcctggcggaggaggactatcaggctgccctgggccccggcggcccctacctgcagttcctcagcacctccaagagcaaggccagcttcttcctgtcgtgagcttgcggcaggggtggggcaggggtgggagtggtacccctggctgggagggcagaattcccagtggcggggaaggccccctgaagagagaaacagagcggccctaatctgggagggtcagggccggatggtggacagatcggggaggagaggagggcgagggccgaaggcgagagaggcggtgccgagacctgggagcgagatccacgtgcacaggtcggggaagggggccgggtgggagccgctccagccaggcctgggcagtgacctctttctcttgccccccagccacgaccagcgcttcttcctgaagacccaggggcgccgagaggtgcaggctctgctcgcccacctgccccgctacgtgcagcacctgcagcggcacccgcactcgctgctggcgcggttgctgggtacttggctgggggcggggctcggtgggggcgggtcctaggtcatcatatacctggggagggcggggtatgtgggcggggcccaaatgggcggatttggggttgtagggcatgggggtggggccatacgtgggggcggggcaccactggggctgtgtttaggggtgggatcgggtcgggatccggaccagccaaggaagggtccaggtgccgcggatcttgagaaggaggcgtggcctggcgctgggattggcgccggatgcaccccgggttgtggagtttggggatcctcatccggcgccctctccccttccaggagtgcacagtctgcgggtggaccggggaaagaaggtggg

SEQ ID NO: 42828 - DNA, 2300 bp, Homo sapien
ctcagggctgaccccgactcatggcccctttaaaccctgaaggccgattctgccccttcctctgttatatgcacaactgaggaaggaggtaaaagtgggctcctaggtgagcccaaagtctcctgagagataagggaaaagaattggactgtaggtttaaaaaagttgctcttggccgggcacagtggctcacgcctataatcccagcactttgggaggctgaggcaggaggcagatcacctgaagtcaccctgaccaacatggagaaaccctatctctactaaaaatagaaaaattagctgggcgtggtggtgagtgcctgtaatcgcagctactcaggaggctgaggtaggagaatcgcttgaacccaggaggtggaggttgcaatgagccaaaatcgcgccattgcactccagcctgagtgacagagcgagactccgtctcaaaaaaaaaaaaaaaaaaaaaagttgctcttgtcagctttgggagggcagactccatagttggagatgggcttccaaccaaccaaggagataaatgccagagggagcgaaccatgccaggctcaaagcacatctctccccaaactccccaggtggggacagcaggccaaaggcctccacataacccctcagggaggcctggagtccagatgctgtactccagtatctaaacaatcactcaatcttaaagctgacaggttcaaagctcttactttgggccgagcgcagtggcttacgcctgtaatccaggcactttcggaggctgaggtgggtggatcacctgaggtcaggagtttgagaccaacctagccaacatggtgaaaacccatctctactaaaaatacaaaaattagctgggcgtgttgacacgtgcctgtaatcccagctactcggtaggctgaggcagaagaatcgcttgaacccaggaggcagaggttgcagtgagctgagatcatgccactgcactccagcctgggtgacagagtgagactcccgtcttgggaaaaaaaaaaaaaaacaaaaaaacctctttctttgggccaagcctccactgagtgccagggatacagcagcaacctcagaccctaccctcggggctgacagggctggatcaacaattgcatcagtgaattaaaaggcacaggaggctgggcaccgtggctcacgcctgtaaacttttggaggccgagttgggaggatcgcttgagcccaggagttcgacaccagcctggataacatagaactccgtctcaaaaacaaacaaacaaacaaaaaaaacgttcccgactggcttccctgaggaacgtggcgtcccagtgagaccggatgggtgaggagcagccggcctgtgagtggtgggggaccgcgttcctatctcggagctgaagaagcgtggaagatgatctggcccaacatctctttgttctcagaggaagggccttccaagaccggggaggggcctgtgcgtgggtcccggtccgaaacgtgtctgggctgctgcgagagacagtcggtgaaggaagggaggggacatccgaagggtggcccgggaggccgggcgatggtgaggagggcgcctcctctccaccaaatcctccccatccatgcgggctagggacagaccctcccccgcccaccctaggctggaaagtgaacgttctctgcacctctcccacctacagactaagtagggcacccggtttccgtgtcggcttcaccactgactcggaatgggatctacctttctctgagcctcacttttcccatctgaaaaatggaacttccgatcccgcactcccatcccactctggccccgggactctgggatacttagagattggcttttggtggggcggcgacaggactgtggccatgaaggccagggagtctgggtccccaactcggtcccattccctagagagattcgggcagcaaccggccccacaatgctcttgagaactacacttcgccgatatgcaaagaagaggaggcggttcctgctcgtctccgacgaggtgggcccgagcaggcctggggactacgactcccggcgtgctccgcagtccaaagccggaagagcgtggacccggaaccggatgtggcttgcggctcgggtggctgagcgcgcggggaaatggtgagattggcaccgtgtgccggagataggggcgtctgggggtggggtcccgggtctgctcaggagctggggcatgggcacttggaacggggattgctctcccgcccccactattgtacggacgacaacgcggaggcctagcattctctcccagcctagaa

SEQ ID NO: 42829 - DNA, 2300 bp, Homo sapien
ttcttttgctgttttgtttttaccttgttactttatcatattgactttagggtcaaaggcaacatcagaagaagtcagatatgtatagtgacattccaggggtggggaaggtgtagggatccagggttctcccggtcttggccacaggcacaatcatcaccttcatcgttccagattcctggggagaaaactgagaagatcgttacctgccagcctcatacggagcaaaagctctgtcctcagggccaagttctaaccactgctctgtagaccttctctgcaatcaagtggcctctaaggagcatgcctgaggacaaataactgcgcctcagtttcctcacctgcagatggggttatcaaataacacgagtgtgcagcctgacctgtaggaggtgtgagtgtgttcccaaactaaagccccaggctgccatcatttacaggcttggcttgccccgggcccctcacccccgtttctgaccatcccaagtctctctgggacaggcaagtcactctggttctttaataagcttggaggtgttgggaagcttcagtggtactggccaggccaggaggaatcaggccaccagggctccatctctatcctgggatagcattcaccccactcctcctcagggctgaccccgactcatggcccctttaaaccctgaaggccgattctgccccttcctctgttatatgcacaactgaggaaggaggtaaaagtgggctcctaggtgagcccaaagtctcctgagagataagggaaaagaattggactgtaggtttaaaaaagttgctcttggccgggcacagtggctcacgcctataatcccagcactttgggaggctgaggcaggaggcagatcacctgaagtcaccctgaccaacatggagaaaccctatctctactaaaaatagaaaaattagctgggcgtggtggtgagtgcctgtaatcgcagctactcaggaggctgaggtaggagaatcgcttgaacccaggaggtggaggttgcaatgagccaaaatcgcgccattgcactccagcctgagtgacagagcgagactccgtctcaaaaaaaaaaaaaaaaaaaaaagttgctcttgtcagctttgggagggcagactccatagttggagatgggcttccaaccaaccaaggagataaatgccagagggagcgaaccatgccaggctcaaagcacatctctccccaaactccccaggtggggacagcaggccaaaggcctccacataacccctcagggaggcctggagtccagatgctgtactccagtatctaaacaatcactcaatcttaaagctgacaggttcaaagctcttactttgggccgagcgcagtggcttacgcctgtaatccaggcactttcggaggctgaggtgggtggatcacctgaggtcaggagtttgagaccaacctagccaacatggtgaaaacccatctctactaaaaatacaaaaattagctgggcgtgttgacacgtgcctgtaatcccagctactcggtaggctgaggcagaagaatcgcttgaacccaggaggcagaggttgcagtgagctgagatcatgccactgcactccagcctgggtgacagagtgagactcccgtcttgggaaaaaaaaaaaaaaacaaaaaaacctctttctttgggccaagcctccactgagtgccagggatacagcagcaacctcagaccctaccctcggggctgacagggctggatcaacaattgcatcagtgaattaaaaggcacaggaggctgggcaccgtggctcacgcctgtaaacttttggaggccgagttgggaggatcgcttgagcccaggagttcgacaccagcctggataacatagaactccgtctcaaaaacaaacaaacaaacaaaaaaaacgttcccgactggcttccctgaggaacgtggcgtcccagtgagaccggatgggtgaggagcagccggcctgtgagtggtgggggaccgcgttcctatctcggagctgaagaagcgtggaagatgatctggcccaacatctctttgttctcagaggaagggccttccaagaccggggaggggcctgtgcgtgggtcccggtccgaaacgtgtctgggctgctgcgagagacagtcggtgaaggaagggaggggacatccgaagggtggcccgggaggccgggcgatggtgaggagggcgcctcctctccaccaaatcctccccatccatgcgggctagggacagaccctcccccgcccaccctaggctggaaagtgaacgttctctgcacctc

SEQ ID NO: 42830 - DNA, 2300 bp, Homo sapien
gggaggcctggctccgctgttggcctcagtttccccatcaagttcagagagggggccctgacagtctccagggtttggcaagcacctgcagtgggttcacgtcatgctgattgcatgccctctcttctcttgtggtcccctgacagcagccccacgagctgtggtatctttgattagtcccagcttcaaatgggagggagttaaggcacagacgttaagtcatttgcctgaagtcacagacagagctggcacctgaccaccagccagttgacttcttggcccagctcctaactcttccccaagtgacacgtggtagcctggcccccagtggattatcagtgaaaatgatggctgctgagggccccgggggcaggtttccagtggacagggcagccccacccccaggcagctgcctcgttggccttttgggaacagaaatgtctgggtgtccgtcaccagcacacctctcttcctctgtttccacacctttcacctggccgggaaaacaggctgtcctaacagcgcctctgcaaggggacccagggagagcctatggtatctggagcagagctgggcaggaggtggtgagcaggggctctggggcctcctagaccctttgcagagggaaccggagatgccagaaagggtccaggctgattgtcttgggagctggagcctttcagcctcagtcaggctgaaaagcacaggcacagtagccctgtgcacctcaggccagatcaagggagcctgggggccaggtagccttgggttcaagggaagctcccccacatcctgtctgcaaggtcttgggagtcacttcccctctctgagtcttggttccctcatcaacagccttgggctagctaggatgctttcatggccgagtgaataagccatagaaagcctcaacctagtggtcaccctttctttttttttttttttttttttgagacagagtctcgctgtcacccaggctggagtgcagtggcacaatctcagctcactgcaagctccacctcccaggttcatgccattctcttgcctcagcctcccgagtagctgggactacaggtgcccgccaccacgcccggctaatttttgtatttttagtagagatggggtttcaccgtgttagccaggatggtctcgagcccctgacctcgtgatctgcccgccttggcctcccaaagtgctgggattacaggcgtgagccacggcacccggccgaaagcctcaacggagtggtcaccctttcataagtggtgacgtcaggatctgtgctcctcttttccacttgctcatctctgcctgtcactccatctcagcctagattttagggcccaaatcttgccacatttgggctgttgttagtttgcaatggcttcatgctttttcatcagactttcaccaaaccctgcccaccacctgctgtgccaggccccatgagccctcttccctctcctgcctgctgggttgagctctgtggtccttacacagggccggggtgagtgtgtggcttcaccatggagaagctcattgtctaggcctgtagctgatggcagtccgctcactctgccaggcgcagggctgagcccaggcctcaccttgctatgccctcccctctggtctgccaggcaggccttggttccatctctgtcctccacacagggaaactgggctcagagaggttagtggctttgccagagcccccaagccaggagggggcagagagacaggattggaatccaagcccttctgaggccagagccgaaaggctgcagggggccctgcgcctgggcaggctgtgggtggtcagggcatagctgattgctcccctcgccacaggtcaccattggtatgttcctgctctctggagatccctgcttcaagacgtgagtgctggcacaggcctagggagcggatgggagcccagtcccgggcactaggggtggaggaacagggactctgggtgtcctctgttttcatctggtcctgaagcagggcaccctagtcacacctgtctgtcttcccaaggccaccatcgactgccaagtccatctccatcccaggccaggattcctccctgcagctgacgtgtaagggtggtgggaccagcagtgggggcagcagcaccaactccctgactgggtcccggccccccaaggctcggcccactattctcagctcaggtacagttcctcatctgtccgcccctcccctgctagcggcccgaggggtttacctccatgtcatgcccaggtccccagggagacgctgactgaggggagagtgatggtggg

SEQ ID NO: 42831 - DNA, 2300 bp, Homo sapien
ttgcacccgggagggtggaggttacagagagccgagattgcgccactgcactccagcctgggtgacagagcgagactctgcctccagataaataaataaataaacagatttgcagcttggttttttacttaatccattctgggcatctttttgtgttatcacaaatttccatgtgctttctaatggcagcagtgtcccgtggcatggctggcgatggttgactcagccagccctgctgctggacatgtgcattgttaccagggtttcactgtacccacagacagttcagccctacatagtattaagagcttttctactgggcaaagagggagaagacagctctggctttgaataagcctgctctgccttccatccctcttctccatggtggactcttggcctcccctcctcagctcctgaggcttagcccagtggcaggagggtgggcttcatcagccgggaggggaaatgccttcgcctcacctctcacccgagggaggcgctatacagggcgtggcccttcccactgaccagagctcaggaactcagccggctgggcagtgcactctgccctggcccggggcgctgacgtccctctccagaagcagaggacagtatggctagaaccaggctgtggagggtgctgtcacagtggaaatttctctgattcacacgggtgaggacagctgtgcagccaggaaaggaattaccagcaaacacctgggagcatctcacctccactggcaaacatttaccaggcacccagcacatggcaggcactgccaggccccttcccttctgttctgtaattgaactcccactgcaggctttactcccattatacagaggaggaaactgaggccctgagaagtggctggacgtggtgctgatcaggcctagtttcagtcctgtctctgttgggttagctgtttggccctgggcaagcttcttcccctccctgaacttagttttcttttcttttctttttttttttttttttgagatggagtctcgctgtcgcccaggctggagtgcagtggcgcgatctcggctcactacaagctccgcctcccgggttcacgccattctcctgcctcagcctcctgagtagctgggactacaggtgcccgccacctcgcccggctaattttttttgtatttttagtagagacggggtttcaccgtgttcgccaggatggtctcgatctcctgacctcgtgatccgcctgccttggcctcccaaagtgctgggattacaggcgtgccaccgcgcccggcctctgtgaacttagttttctcatctataaaatggggatcactctgagtccatggcggggctaggatctgaatccaattccctgattctggagtgtgtgccctgaacactgcagtagagacttgcaggcagcagttacttgacactcatccctgattggttcggttgggttcaaacattggttcaaacatttcattatctatctcttctgagcctgttgtatctggagcagagctgggcaggaggtggtaagcagaggctctggggcctcctagaccctttgcagagggaaccggagatgtcttccaagtccccaagtctggcaccacctcgtctcaatctcactttcccctccaggtctagcagacttggcctccatccacagggccttcttagcgcatgccctcttcgcacttactcccacttccctccccatccctcgatcctctgtccagaggtcccaagggcctgttcagaccctgaactctgcccagcagcccctcactctgtcctctaccagggcgccttccctggggctcctgctcatcctgcagtgcccctcccctcccaacccctgtgggggtgtcccatcactttccccagcacccacttcccacaggccttccctcctcccctgcctgctgacccggcagctcccgacagcacggccttgtttcccagggaacaatgcatctgtgtcacggacaacaatgtcctttcatgtcaggcgcactggccccggtgcacgccgggacgtggcacaaagggtgctttgtgcagctcagggatgtgagttcctggctttgccatgttggtgctgccgacccggggcctctgtccttgggtcccagttatgcaacagtcagtcgaggctgtggggctggcccaggggctttatctgtctccctctccaacttttgccaagttacccttctgggcttccgccagccaggagcccacactccctcagccctcccacacgctcctctcacctcctagctgggcttcgctgacttgaacctgg

SEQ ID NO: 42832 - DNA, 2300 bp, Homo sapien
gcccttacgggagcaggggtatgaagggcgctcatttagtcattagttagttactgacctaccgtgtgcccagcaccatccttgcgacaggggaagcagcagtgagcaaaacagaggcccttcctccaggacctccacactctgggagacaggaacctaagacccaggcctagaagaggaaacttgcagtgtgtagggggtgcccttgggatgggctgggatggagggtaaggatagagaggacagaggcagccccatgacttgagtctagtcattcgaggggccaggccctggggatgggaatccgttcctcctctctctccccttcctccttgggtgaatcaaccaccacccaggcatgagtcagccaggagtggctcaggcatgcctaggccacctgctggtccccctccctggatgtcccaaccagggtgtcccagccaggtttaagatctaaggaagccaggcgtggtggctcacacctgtaatcccagctacttaggaggctgaggcaggaggatcatttgagcccaggaaacatagtgagaccccttacctcaaaaaaaaaaaaaaaaaaaaaaagacctggggaaatatcctgatctatggtcctggggtggagaagaaggtaggggactgtgtgaccagcttttcctgctggaccatctgcctcagaggggaactccaggtgcctgtcagtagttacttctggaggtctagtccctgcccccattcagcatgggtgtccactgtgccaggtcctgtagcaactctgtgagacagggacagaactgcgactgaggcccagaaaagtcaagtgtccggtgggtaccagagcctggctttgagccccagtctctgcttcccaatgccttgtgggcaggcctgctgggagactggtgggtgcaggaagggaagtcccccgagcagagccagccccgaagctctgtgtttgctgtgggcatggatcctggggaggggaagctgctaccacagcccagtgtgacacccattgtgtcttcttgctttgaactgctggggtcttgggtccaaccctggcatgggagcccagcttgcagctctggggtcagacagccctggctttaggtcacagccctctcccggccagtagaccttgggcaggtgacttccctgctctggggcctcaatttccttggctgcgatggggtaatgggctgacagcacccatctcctagggctgggtgtggattcttggggtcagggagagtgcttggctcggtgcctgacatgcagcaagtgttcaggagatggagcgctcatctttggaagttctgcagagcttgcctgctggggggccttttcccacttctccctcctaacttgggacttcctaacatggtccccaacaccagcaggtcttgacggatttggctcagagccacaccccattggccccacactttgacccagtgaccatccctcccttggcataaacctggtctcaaagcctcttccctgggattgagactcaaggtgaagggtcagcccacacagcatggggtccagggtcgctagcgtgacagatgcccatgccacaatctctggagaatggctgtactgccttggcagatttcccaggggttctgcaagatcaggaagtgggggtgggttcctgaaggggggcctgggagtacagaccacccgttacctcccatgtgacctgcagcgactgcctggactccccaagtgtctgtttcctgatctgtgaagtagaagcaggaagatgatgcttgagaattacttggcacacaggagggtgcctgggaaacagccaggctgggccatgctgggtgccaggggcatctttgcccaggtgcatgagattcttggttaaagccagtagtttactttgggtcccttcaatggcctgctcgcctcttgggctgtaagagcaagagagagtgatcatttgcatctggagaatggcgttaacagggcgtttgcctgggcagtagctcaaggcatctgcacaacctgactctgggtacagaggacagagcagggcagccacttgcctgtgcttgtaaaatagggatgcccacacctgcctgcatgggcttttttttttttttttcggagatggggttttgctatgttgcccaggctggtcttgaactcccgggctcaagcagtcctccagtcccagtctcttgagtagctgagattacaggtacgcaccaccatgcccagcttgtgtggggtttcccttgaagatcagtctcaaggttgctgcttgaccggtgagcagcaggattcag

SEQ ID NO: 42833 - DNA, 2300 bp, Homo sapien
ccacaatgctgaggttgcactgtcatcatctcttgcctgcatcaccaaacaaactcctcatccacctgtttcccagcttgtccccttcacactgcccacagccagagcaagcttcttaggacaaaaagcaaatctgggccttgcctcgtggctcacgcctgtaatcccagcactctgagaggccgaggtgggcggatcacctgaggtcaggagtttgagaccagcctggcgaacacggtgaaacccggtctgtactacaaatacaaaattagccgggcgtggcggcgcgcacctgtaatcccagctacttaggaggctgaggcaggagaatcgcttgaacccaggaggcggaggttgcagtgagtggaaattgcaccactgcactccagcctgggcaaaaagagcgaaactccgtctcaaaaaaaaataaataaataaaaaataaagcaaatctgaccaggacactctccatctcaacgcgtgtccgtggcttcctccttacggtcttacaagactctgggagatctggcctttccagccccatctcttgcccctctctccaactgccacagtacagccagatgtagttgcctgaaactttctgcgggcaccacgatctccagccaccaggtctctggcagctccctatgcctggaccctgcgtgactcagggcacgcatcctgtggatggcttggctccctttgttcgagactttctgagtctgcgccccaacccatgtcaggtgcctcttatcccctgttacaactcttacccatagatttgtcgctgcctgtgtccctgtctgcttctccacctggtggtcttgagctgggagcatttgggaagggcaagcccaccaggttctccactaggtcccagcctggcttagtggagactgcccctaaacatttggggactggatgaatgaaccacaatatgccgaggggcctgggaggtacgaggctttcgagtgggttctgcccccagaacagctaactagtcagtgagaccagtcacgctgggcaagaaactaaaggacaacagaaagcttagataacagcttggaatgttacaagctgggtcacaaggctgcgtgatggactgagccagagccacctcctcggcgaagccttccagacgcttctctgctcattgctgaggggcactagagattcagggcgagcaagcgacctgccaggggctctctctgggcgccagctttctgagaaaggagactcgctaccttccgggcctgcttcagggttctacgagctcaagtctggcgggaccctggaaggccgctgcagccacaaactgtttctccttgtcattgtttcttcttttcttctgctcgcgctctccctgccccgccagccctgcgacctcccactgccttcccagggcccctctcccttccctcagccccgccccgccctaggaggcgggcccggccgcgcggtgcaccaatccgagagccccgagccgcctctgcctcccgcgagtcccaccccacgccaccgcccaccaatcgcgctgcgcgcccgcctagccgggccgcgcaatagcgggagggctgagccgccggcgccccgcccctgccgtgctcggcggcggctaggcgggcggccgcgcggggcccaggcattctccaagcggcgcctcgcagcatcgggctctggctgcagcgtcggggccgcagggggcggcgctgctgctcgaagggtgccgggcgaggcgggcgccaccggccgggccgaagggcgcctcagctccgccggggcccgcggcgcgggtcccaggatcgaggaggaggcggcgcctccgctgcccggggccggcccggtgcctgccctgaggaggcccgaggccggacgttcccggcccgcagcgaccccgacgcgcctcctggagaggcccccgagctcctggcagccccctgggggtgccccaccttccccggcttcacctgcgctggccgcccggcacccaggtgcgggggcgtgagcggcgagggcacctcccccggccgccagcggggcgggggcggggccgccctccgccctcagccttaccggccagccagcccgcccgccgccctcagtctcaccggtccgcccggccgcgcggcgtgagctccccggacatcgcgtctcgggatgctgcaagccagcgcggccgctcgcgcgcagccccgcacctccgcccctgcctctgcctcctgggccatgccctgctgtttacatgccggtgaggtccccggccgctccgaacccctccgagccccggctccccgagggtg

SEQ ID NO: 42834 - DNA, 2300 bp, Homo sapien
ctctctgaggaggctccagatggagaacctggaagtcagagaggcgacgtcactcacccaaggtctcccagctcctagctggtaagggtgtgaagagtatgcaagcacatctgcctgacttcaaacccagtggttttgtttttgtttttgttttgttttgtttttacatagagacagagactaagcacggtggttcatacctcccaacacttgggaggccaacactttgggaggccaaggaggacagatcgcttgagcccaggagttcaagatcagcctgggcaacatagtgagaccccatctctacaaaaaattagccgggcatggtggtgtgtgcctgtaggcccagctactcgggaggctgaggtgggagaatcacctgagctcaggaggttgaggctgcagtgagcagtgattgtgccactgcactgcagcctgggagacagagtgagaccctgccttaaacaacaacaacaacaaaaacaaaacaatacataaatcaatagagacagaatgttgctatgttgcccaggctagtcttgaactcctgccctcaagagatcctcctaccttagcctcccaagatgttggaattagaggcatgagccacaacatctggccaaagccagtgttcttagtttttacttcaagttattcattcattcattctttctttcttctttctttctttctttctttctttctttctttctttctttctttcaggaagtatttattgacacccccacctgcaccctgtaccgtactgcactatatgccaggctctgagctggcaatagagcaatgagcagaaccccacactgaggttatgtccaggggcagtgggagacagagaataacaacaacaacaacaaacatatatgcagatcacttaacaacattccaggcataggccaggccctttatatattctctaaatcctcccaacagtcttatgatgcagtgacttcttattgtgcctcacagatggagaagctgagactcagagaagctagaaaacttgcacaagggcagagctcatgtgcagtggaggcaggatttgaaccaaagtccagggctcttcaccatcacactcaactgcctgtctaacaacaagaacaaaaaatgacatgagtggacaagataatttcagatagtgacccatgcatgctttgaaaaaaataaagtagggagatgtgactgagtgtgccaggggtccggggacagggagtgggtggtcagggccaggctccccctgttggtgacatttgaactgaggcctgaatagcagggagccagcaaccatgggaagaggtggagaaagacatcccaggcagagagcatggcgtgtgcaaatgccctgaggcaggcacaggcaggtgagaacaggcttctagaaaccagggggaaggagaaacagaaagggaggtgggatagtgggtgggggacaccctgggggcggtgccagccaccggaagggttttggattttacttgaacagttcaaagctactggaggatttaagcagggaagtagggatcttgaaaattgtggcttttgagttcttttctgagaattttcaaggcttgaatttttattttaataatctcataaaattaccagccttcatactgcaccttgtggaggccaacaacccggagcccggcctgtgttagtatttctgcttctatccgagccaaacaggggtatgtcaagggccccaggccaaagagaaaataactgaaaagacagggaaactattagttagctatggctgcctgcatatcatccacccacccacccccaacttagcagcttaaaacaacaaacttttggccgggcatggtggctcatgcctgtaatcctagcactttgtgaggctgaggcaggtggatcacctgaggccaggagttcgagaccagcctggccaacattgtgaaaccccatctctactaaaaatacaaaaactatccaggtgtggtggcagtggtacttgtgaggctgagggaatgtgatgaaaccccatctctactgaaaatacaaaaattagccgggtgtggtggcgggtgcctgtaatcccaactacttgggaggctgaggcagaagaattgcttgaacctgggaggcagagattgcagtgagccgagattgcgccattgcactccagcctgggcaacaggagtgaaactctgtctcaacaacagcaacaacaacagcaacaacaacaaacttttgtctcccagtttctgtgggtcaggaatccaggtgcaccttagctgggtcctttggctcaaggtctt

SEQ ID NO: 42835 - DNA, 2300 bp, Homo sapien
ggagacattgactgggtactttagctactgctgccccattcccacctccttttctgcttcgccataggggcctaggaagtcaagtcaagaaagcatcaaagggctggcatggtggctcactcctgtaatcccagcactttgggaggctgaggtgggcagatcagtggaggtcaggagttcgagacaagcctggccaatatggtgaaaccctgtctctactaaaaatacaaaaattacccaggcttggaggtgggcgactgtagtcccagctactcgggaggctgaggcacaacaatcacttgaacctgggaggcagaagttgcagtgagccgagatcgtgccactgaactccaacctgggtaacagggcaaaagagcaaaactccgtctcaaaaaaaaaaaaaaaagcagaaagcatcaaaggaggtaggactaatgtggctgcaaagagcgtgtgtagagtcccacccaagatgcctgctgcatggtaccacagagagcatgtgacccagcctctggggtgcctttctttctttctttcttttatgagatggagttttgctcttgttgcccaggctggagtgcaatggcatgatctcggctcactgctgcctcagcctcccaagtagctgggattacaggcatgcgccaccatgcccggctaattttgtatttttaatagagacgaggtttctccatgttggtcaggctggtctcgaactcctgacctcaggtaatccacccacctcggcctcccaaagtgctgggattacaagcgtgagccaccgcgcccggccgggggtgcctttcttagctaggagcagcccagcgtggaggtcaggagcacatcgggctctgctgttggggagacctgggtttgcctcttggctctgctgaatgagctctgtgaccttagcaagtcattctacatttctcagtctgtttcctcatctctgaaaaatgaagatgacagcaccaacctcttggtgtcattttgaggatttgttgagctaatgagtacaaagtgcctgacatgtagtagttgctctaaaagttttgctagtattatgatcaacatctttgcttttgccagatccagggctggccctttgattaccaagtagattaagattctgaaccccggccaggcgcggtggctcacgcctgtaatcccagcactttgggaggccgaggcgggcggatcacgaggtcaggagatcgagaccacggtgaaaccccgtctctactaaaaatacaaaaaattagccgggcgcagtggcgggcgcctgtagtcccagctactcgggaggctgaggcaggagaatggcgtgaacccggaaggcggagcttgcagtgagcggagatcgcgccacagcactcccgcctgggcgacagaacgagactccgtctcaaaaaaaaaaaaaaaaaaaaaaaaaaaattctgaaccccttagattctagatttatatgtgaatagctatgcagccaggggaggcctggattcccctttatgtccctccaggacaggactttatggcctcctccccaccccatacagccagctttattccttccagaaagtgacctcccttggcctctgttctttctactgtgcagtccccacagagaccacctatcacacgctggaggagggcgtggtggagtactgcacggctgaggcgcccccacctctgccaccagagacccctgtggacatgatggcccagcatgcagacacgtcggtcaagccgcaagcgctcaagagccgcattgctctcaactccgccaagctgatacaggagcagcgggtcaccaacctgcatgtgaaggagatcgcacagcacctggaacagcagaacgacctactgcagatgatccgccgctcccaggaagtgcaggcctgtgcccaggagcgccaggcccaggccatggagggcacacaggctgccctgagcgtcctcatccaggtcctccggcctatgatcaaagatttccgccgctacctgcagagcaacacagctaacccggcccccgcctctgaccctgggcaggtggcccagaatgggcagccagacagcatcatccagtgagggcaggggtcaggccagccttctgccatgatgggatgaaaactccatggacttgtaagtgggtcctgtgattggccttggccttagaccggccacgtgcacagctccctctttaataaacgcttaggggttgcactgtttttgagaagaggaatttgttgggctcctgggacccaaactcatactccccctacttgagctgccttgctaa

SEQ ID NO: 42836 - DNA, 2300 bp, Homo sapien
gcggcggtggcggcggcgtccggcggcggggaggccacacagcggcacaacacactgctcaccatcgggcgcgaggcaggggctccgggcgcgggcgggagcgggggcggcgggccggcggtgaccgcgcgggaggcaagccaggcgctctgcagctgggagcgcgggctcggagacgccggcaagctggcggaaggggcggcttccgggagccccgcccctccgcgccccgcttcgccggccacgcccgggcgcaccgaaggccagtcacaggctcggatggggaggagggaggggcggagcctgtctaaggacagcccacgcgccacggactacccggatcaatggggtgggcggggtcacccggctccgcctggggccgattcaaactgagggaggcggggattggctgagccgggggccaagagagagaaaatcacgcagcgataggcatgagtaatgtgattggcaggcggaaggccccgtgtccagtttccattgatgaactaactctgtttagactgcgggatcttaaggatgggaggagcggtagtgtacggagagatcgtagcctccagtgggaaacaggatttgtgtgagagcatttgtgaactgcagttgcgaggcagagtttgtgccggtgggaggaattaaaagttaattgacccatgggtcacggccgaaagcactaagtatcctcaggaagcagggttttggtaatctaactccctaaaccaccaataaaatagctgaatttaacggcttaatagtcgtaatactgacaattgaacgacagaatgattttccaatggaagtgaataaaggttaggtgggcggggccctctgggcgacggacacaattttagaccaatgatcaggcgaattacagtaagcaggcgtgctctttagctgagcgacagatcgaaagaaccagtgatcgacgtgatatttgagcagctaccaaccgggaaggccggttttcccggagaagcgctgggaggcgggaagaggggaagtgggcggatctccgcacacctcggcggaagaggcagattcaggaagccattacgctgctggctggcagcggccgggccggtcggggctgggccctacgcactttgcgtagcgaggggggttaccaaaggcctagtgcttggcctcgagcaagcctggcctatcccctgtagggggtgggtgaggggcgaggctgaggaagaagagaaggggaattggggcgcttgaggggattataatttctttaaaaagaggggaggggagaggccatggccgtcccagccaagaaaaggaagatgaacttctcagagcgggaggtggagatcatcgtggaggagctggagctgaagaagcacctgctggtgaaccacttcaacgccggggtacccctggccgccaagagtgcggcctggcacggcatcctgagaagggtcaacgccgtggccacctgccgcagagagctgcctgaggtcaagaagaagtggtctgacctcaagaccgaggtccgtcgcaaggttgcccaggtccgggccgccgtggagggtggtgaggcgccggggcccactgaggaggacggagctggggggcctgggacaggcggtggcagtggtggcggtggcccagctgtagccccagtgctgctgacccccatgcaacaacgtatctgcaacctgctgggcgaggccaccatcatcagcctgcccagcaccacagagatccaccctgtggccctcggaccctcggccaccgcagccgcagccacggtcaccctgacacagagtgagtgacctctcctgcccaggcggcgtgcataagtgggaagggccagcaagctctggggtggcctggggaaggttggctgccaagggtcagaggtcagatgggggtcttggaagaccatgaggccttccaagagcagcacccagacagaagtgatcttgctctctttgggacttcctcagcacgtgggctggacttctgacgtgctggatagctcgccactgagcattgccaccatgtttgtccatgacttacctccacttgccgaactgggtggtccttgaaaacaagagaccgtgtctgtatccccacaggacttttcacagggcccggcttgtagtagacagccaggccatatttgttgaaaaaattgatgggaataatactgcccaagtgagacaacgattctggattctgttttcagtgtgggggatctttcatcaggtgctgctcaggagcctcatggttcctggtgttaatctactccattcattcattcattcatt

SEQ ID NO: 42837 - DNA, 2300 bp, Homo sapien
gaatggagtagattaacaccaggaaccatgaggctcctgagcagcacctgatgaaagatcccccacactgaaaacagaatccagaatcgttgtctcacttgggcagtattattcccatcaattttttcaacaaatatggcctggctgtctactacaagccgggccctgtgaaaagtcctgtggggatacagacacggtctcttgttttcaaggaccacccagttcggcaagtggaggtaagtcatggacaaacatggtggcaatgctcagtggcgagctatccagcacgtcagaagtccagcccacgtgctgaggaagtcccaaagagagcaagatcacttctgtctgggtgctgctcttggaaggcctcatggtcttccaagacccccatctgacctctgacccttggcagccaaccttccccaggccaccccagagcttgctggcccttcccacttatgcacgccgcctgggcaggagaggtcactcactctgtgtcagggtgaccgtggctgcggctgcggtggccgagggtccgagggccacagggtggatctctgtggtgctgggcaggctgatgatggtggcctcgcccagcaggttgcagatacgttgttgcatgggggtcagcagcactggggctacagctgggccaccgccaccactgccaccgcctgtcccaggccccccagctccgtcctcctcagtgggccccggcgcctcaccaccctccacggcggcccggacctgggcaaccttgcgacggacctcggtcttgaggtcagaccacttcttcttgacctcaggcagctctctgcggcaggtggccacggcgttgacccttctcaggatgccgtgccaggccgcactcttggcggccaggggtaccccggcgttgaagtggttcaccagcaggtgcttcttcagctccagctcctccacgatgatctccacctcccgctctgagaagttcatcttccttttcttggctgggacggccatggcctctcccctcccctctttttaaagaaattataatcccctcaagcgccccaattccccttctcttcttcctcagcctcgcccctcacccaccccctacaggggataggccaggcttgctcgaggccaagcactaggcctttggtaacccccctcgctacgcaaagtgcgtagggcccagccccgaccggcccggccgctgccagccagcagcgtaatggcttcctgaatctgcctcttccgccgaggtgtgcggagatccgcccacttcccctcttcccgcctcccagcgcttctccgggaaaaccggccttcccggttggtagctgctcaaatatcacgtcgatcactggttctttcgatctgtcgctcagctaaagagcacgcctgcttactgtaattcgcctgatcattggtctaaaattgtgtccgtcgcccagagggccccgcccacctaacctttattcacttccattggaaaatcattctgtcgttcaattgtcagtattacgactattaagccgttaaattcagctattttattggtggtttagggagttagattaccaaaaccctgcttcctgaggatacttagtgctttcggccgtgacccatgggtcaattaacttttaattcctcccaccggcacaaactctgcctcgcaactgcagttcacaaatgctctcacacaaatcctgtttcccactggaggctacgatctctccgtacactaccgctcctcccatccttaagatcccgcagtctaaacagagttagttcatcaatggaaactggacacggggccttccgcctgccaatcacattactcatgcctatcgctgcgtgattttctctctcttggcccccggctcagccaatccccgcctccctcagtttgaatcggccccaggcggagccgggtgaccccgcccaccccattgatccgggtagtccgtggcgcgtgggctgtccttagacaggctccgcccctccctcctccccatccgagcctgtgactggccttcggtgcgcccgggcgtggccggcgaagcggggcgcggaggggcggggctcccggaagccgccccttccgccagcttgccggcgtctccgagcccgcgctcccagctgcagagcgcctggcttgcctcccgcgcggtcaccgccggcccgccgcccccgctcccgcccgcgcccggagcccctgcctcgcgcccgatggtgagcagtgtgttgtgccgctgtgtggcctccccgccgccggacgccgccgccaccgccgcctcttcgtctgcctc

SEQ ID NO: 42838 - DNA, 2300 bp, Homo sapien
gaaatacttgggaaaatggcagctacacccgccaagtcagactgaagggggaagagacagaagggaaagaaacagcctctgctctgaggttctcatacagaaaggccagcacttctcttcctggcaggcccagggatgaccatttctctgcgcccctatgcccacacctcggccaagagcccacaatagtaacaatctcgctttgacttttagaaaaaaaatttcccccggattctttcactccgtccacactccaaccccgcggggatcacgatcccattttctggataaacagggcaatggagatgagcctaaaccatgagaactgtcagtcttcgccgccaacgtccacacggatcagcctgaaaccccaataccaatttttttttcaactcccacatgttcctgagaggaaccagatcagggcccacggctggcatggaaacgagagggaaaggagggggtgctgctggggactgatggatgaacccatccttgggtgaagggagcgtccagcttggccttgaggtcaggaggtgacaaaggcacactcctgagacctggccttctactctgggcaagaaagggcttttcgcccatcagaaagcccataggatgcccacctgtgtccacgaagaacccggctcaagcacccaaagaagtcaggaaggagccccgctcccaccagggcataagtggggtgtccctcagtgagtcagggggcacccttcctctggacagtgggggttccgcccagcccaaggggccgtcccccgagacctgtcacccggccctcgaggggctccctccccgccagtgctgaggacgcgcgcagcctacctggagctcgccctcggtgcggtgcagtcccaggcgccgcagccccaccgccaggtcgttgacacacaggccgccgtcccggttgacgtcgagcgtctgaaagagtctccacaggcgcagccggtggtccgggcccccgcagatagcgccgccgcaggggtcccccacggacgccggcgatgaggcagacgaagaggcggcggtggcggcggcgtccggcggcggggaggccacacagcggcacaacacactgctcaccatcgggcgcgaggcaggggctccgggcgcgggcgggagcgggggcggcgggccggcggtgaccgcgcgggaggcaagccaggcgctctgcagctgggagcgcgggctcggagacgccggcaagctggcggaaggggcggcttccgggagccccgcccctccgcgccccgcttcgccggccacgcccgggcgcaccgaaggccagtcacaggctcggatggggaggagggaggggcggagcctgtctaaggacagcccacgcgccacggactacccggatcaatggggtgggcggggtcacccggctccgcctggggccgattcaaactgagggaggcggggattggctgagccgggggccaagagagagaaaatcacgcagcgataggcatgagtaatgtgattggcaggcggaaggccccgtgtccagtttccattgatgaactaactctgtttagactgcgggatcttaaggatgggaggagcggtagtgtacggagagatcgtagcctccagtgggaaacaggatttgtgtgagagcatttgtgaactgcagttgcgaggcagagtttgtgccggtgggaggaattaaaagttaattgacccatgggtcacggccgaaagcactaagtatcctcaggaagcagggttttggtaatctaactccctaaaccaccaataaaatagctgaatttaacggcttaatagtcgtaatactgacaattgaacgacagaatgattttccaatggaagtgaataaaggttaggtgggcggggccctctgggcgacggacacaattttagaccaatgatcaggcgaattacagtaagcaggcgtgctctttagctgagcgacagatcgaaagaaccagtgatcgacgtgatatttgagcagctaccaaccgggaaggccggttttcccggagaagcgctgggaggcgggaagaggggaagtgggcggatctccgcacacctcggcggaagaggcagattcaggaagccattacgctgctggctggcagcggccgggccggtcggggctgggccctacgcactttgcgtagcgaggggggttaccaaaggcctagtgcttggcctcgagcaagcctggcctatcccctgtagggggtgggtgaggggcgaggctgaggaagaagagaaggggaattggggcgcttgaggggattataatttctttaaaa

SEQ ID NO: 42839 - DNA, 2300 bp, Homo sapien
attctatgaagtactaactccattttgcacataaggctagtgaagcacagagagctgaagtatcttagccaagattacacagctaataagtgatggccaggattggaatttggggtctggctccagtgactgtgcatttaatcaacatgcaaaactgcttctggacaagttctgtttatctagtgagagggcaactgatacaggctccttcagctttcagaacaagccttaggaccccatctcaaccatcttactttctctccagattgtcttttttttttttttttttgagacaggatctccctgtcacccaggttggactgcagtggcacgatgatggctcactgcagccttgaccacccatgctcaagtgatcctcccacctctcagcctcctgagtagctgggactacaacaggcaccacgatgcctggctattttttttttactttttgaagaggcaggtttctccacattgtccaggctggtctcagactcgtcggctcaggcagttggcccacctccatctcccaaagtactggaattacaggtgtaagccactgcgctcggccttctttttcaatgattgttttatttacatgtgtatgtgtgtatgcctgggtcatacatgcttatggttcagtttcgcaagatataagaggatgttcggtgaaaacacgtctctcatctgcctttctcctctcaaagccccaagtgtcctccccgccccacaccctctcttcaatttaattatctttccagaggccgtcttcacaaataaaagctaggaataaatggcagcacacaatcccctttcttctatactttgtcatttaacaagttggtttttttttgttttttgtttttgagatgaaatttcgctcttgtcacccaggctggagtgcaatggtgcaatcttggctcactgcaacctccgcctcctgggttcaagtgattctcctgcctcagcctcccaagtagctgggattacaggcgcctgccaccatgcccggctaatttttctatttttagtagagacggggtttcaccatgttggccaggctggtcttgaactccgcctgccttggcctcccaaagtgctgggattataggcatgagccaccacatccggccttgtgtttgtatttttaaaataatggttgtggggccatgcgcggtggctcgctcctgtaatcccagcactttgggaggccaaggtggatggatcacttgaggtcaggagtttgagaccagcctggtcaacatggtgaaaccccgtctctactaaaaatacaaacattagataggcatggtggcaggtgcctgtaatcccaggtacttgggaggctgaggcaggagaattcgcttgaacctgggaggtggaggttgcgttgagccaagagcgacccactgcgctccagcctggatgacagagcgagactccatctcaatcaatcaatcaatcaataaaggttgtgaacactatcagagggtcacctcagcgaggaatgacagtagccagtgcatttatctgttagtaaactaagaaacaaatgaccatagattaattcctttttatttatgaccttttactcagttcggtctacagacttaatctgtgcctggtcctaggggtagaaaggtctgtgacttggtccctgcccccaggcagctcatcttctggagggagacgcagcagaagtagctgctgtgatgtggcatgtgctctgctggagaaaactggatcttgaaacaaggaaaaatgtttctagaatgctcttaggacatgctgccaaggactcttgatggtgttgcacttgatggtgaatgccttctggaagcaacccgagtggagggcagggagttacttttgctacggagccagctcagagtggattctgtaagctgagcctcatctggagcttgagtccgcacctccctgcagaattgccgggcttcatgcaggcaatcagctgcctgtgattggagggctggtgctggtagggataatgaacttggtagtgtcggcagaggtgattggccgggctctgctgcagtgagaatgcagactggatgctcgggtcctcggcttgggtgatgagcgaggacagctgaataactgggagctcgaagttgcttgctgcctccgggagtggtctgcttggctgtcgcgttttccttttctttttttttttttttaaaaaaaagccaaacgtttgctcaccatcacctgcagaagtgagtttttattgaagaagctccagctgctttctccttattgccggcagcctggcaagcctc

SEQ ID NO: 42840 - DNA, 2300 bp, Homo sapien
ctcaactactcgggaggctgaggcacaagagtcgcttgaacctgggaggcagaggttgcagtaagccgagatcgtgccactgcactccagcctgggtgacaagagtgacagtctgtctcaaaaataataataataatgatacattatcttgtccatttgaatataatgccctgacaactctatttgcagatgctcagaaaaataggccttcatcaagcatggttataagtttgtttcttggggtcttagagccccctgagctaattcactcatttggaagctgttcatgaagcaccttatttgatcaaggcaggaggttatttccagacaaggaggtccaagggtttgaagtaagagccttctaccttcaaggaccctggtggtagagataagaggcgtgttaaaatagcccaaggcagaacattctggattgggcagcttaagagatagctgagtgtcatggatttagcggaggctgagcaggaatctgcctggataatccagtgcgacctcataggatccgtcactagggtagcccaagacctgttctcacagactcgttatcagatctctgttagaaggcccaaatgtcatatcacttgtcataatctctgtttcataatgttgtgtgtaagtatcaacatcttgtaacaccctctttacgagttaacaacaagcgttttagtgcattaaaaagtccttttacttctgtgatccccaagtaataactatccatttttatccatcccggtagtgggaagatatagtctatattaggaagtggcgcactgtagaaggaacaagggtgagactgagcctgttctcatcttggtgacgtggtctcttcctccgcagcacgaatctgtggggaaggaatgagtggagaattcaggccggcctgcagagagggtcgtcctgccctgaaagggtcgttctcgagctgtgttgcccagtgaagtttccgctgtggcagaaatgcccagtgactatgcgtggctatcctggggaactgagtttgtaatttcatgtcattttaatgaatttacttttttgcatgagacacagtttcactctgtcacacaggctggagtgcagtggcacaatcctggctcagtacaacctccgcctcctgggttcaggcaattctcgtgtctcagcctccccagtagctgggattacaggcgtgtgccaccacgcctggctatgactttacatttaaaaagcttctgtattgaacagcaaagttctagctgtgactaagactgggctcctacgtgttctgagcggacgtgggcgttgaagactgtgggtctcatgtgaggcctcgactgaccccagattgatgcttctggggagtcctttggcatggtgtcctcttaccaaccccatcatgtcagctcctgggcactctggggctcctaggtgaaggctggtgctcacattgcagaatggcctggaagaggtttcaatgcaatgtgggctgtggagggctgcaggttccctggagcaggagccagctagaactgtgcctggagccgtgtgtggccagggcagctcccctgtgggatacatgggcccataggggggtccactttccagggtggctaggcacctggctctcggccacccctcagcctcctatcctcacagctgaactgggcccgtttgcagtggcaatcagctctgtctctctccaactactgattttttggttgggaatgatttactaaaaggagaaaaactgttgtgtgacacgtttggggaccttgtgtgaaagcagccataggctgtttgttcatctgaaggggttggcagctagagggtgaaggtttgtttgggctctgtacctggtacccaggcaggcagaacgcaccacccggcctcttctccaagagttaactgcagggagggagcggtgacgtcagccctgatctttgtgcctctcacttgagcaacctgatgccaccttctcccccgggctctgtgttcattggctgttggcaggacttgccgtgggagggcttttttcttttttcaattaagtaaaagggcagggcttaagcagccaatgacagctgaggccaggcttgtcttatgcaagtttcccgggaccggcagcatttagggaacttgctcccggtggtgagggcagtggagcacccagcaggccgccaacatgctctgtctgtgcctgtatgtgccggtcatcggggaagcccagaccgagttccagtactttgagtcgaaggggctccctgccgagctgaagtccattttcaagctcagtgtcttcatcccct

SEQ ID NO: 42841 - DNA, 2300 bp, Homo sapien
ggaggcgggggcggggggggttacttttggaacctcattgccaaggaacagtctctcaaagccttcttgggacactaaagtgcttttcagtgagtgagcgggagagccagggcagctctatcacctggcttccctgagagcagggactggcagtaccatcatacacatgcccttggctccttacacttccccggcctcgggtgctgtggcagagtctggctctgcccccgattttcacctgcccaccaaattattctcggaccaatgccagttttaggagagaaacagcgagctgcagagttcctgtcagaaactggactccatggccatccccaagtctcagcagggagcatgtgtggttgaagcctgggtccagggacccagggacggcgctgcagcgaagccaccctgctcaccctggctgtacggcacgcaggtcttcagactgagaaagtgcccagctgtccctgtcggcctctgtccggagggctcttcccaggctccttgtttcctctctgcttgagagggagacaagattggcccttgcctgggttctggccagcacctggggttctaggtggtggctctggcatgtaagtcgattgccatggtggctctgagagtggagcagaagcatcttgggtccttggggccagctctgctcgcaattagtgaagtcattgcctggggatggggccccacaagggacaaggaaaggctggtccaggagccaaaagacaaaatgttacctttcttttctagaaaattgtacaagctggagataaggaccttgatgggcagctagactttgaagaatttgtccattatctccaagatcatgagaagaagctgaggctggtgtttaagagtttggacaaaaagaatgatggtaagtgttgccttcagagctgtggccggtccagcctcgggcctccccgtgcgcctggctcctgctcacggcctctgttcttgcaggacgcattgacgcgcaggagatcatgcagtccctgcgggacttgggagtcaagatatctgaacagcaggcagaaaaaattctcaagaggtgagtgctcagccagcctctgtgtttggtttaagtgtgatgaagggaaggctctgagactaaccctccgatgccattccctgggctgaccctgaacttggccttctcgtggtttgaaaggatgaataagtaacccctgtgggaggccagcccctccccagggttgcaggcctgctttcattggaagaatcacagatcacctggaattttgcccatcggccagtggcccatgaagggaaaactaatttgggggtggttcaaataggtaaaaggccagcaaggagcacctgtgcgtgtggagggggcggggcggggcggggggctcacactgcagcctcgttcccaggtgaatttcttccccatgctggtaacttgcacttaacactttagtcagaggcgctgccccaaaagatagctccctggtgcggggcggctgccaggaaatctcatggaacagccctgggagttgccgtctgtcctggctggaccttccggaaaccctgcggtctgaacactggctggtcctcggggacagcagccctgggctcagctgctgtggcgggctcgtctcgtgccgtgctgtgcccctgtctctgggtgtgtgcttgcttcactaacatggctccgagcacttatgcgtgttgtttctgctctctcctccgcatcctttgtctgtctgtcagaatacgaacgggccatttctggggccctgtcacctagtaagtatccatgtcgctcatgactgcctcccttgacttccatgcctgatcagagcgggattcttgtgggccattatattgccattgttgtgctaagtggggtgtggagccccctgctctttctcctgggggcagaggcacctcgtgtggtttctgggcatccgaatgcctgcccttggctcactgggaggtggggggatgcagctggcggatgggcatgtgggcacgtgggcagcctcgcctctgtcttgcagcatggataaaaacggcacgatgaccattgactggaacgagtggagagactaccacctcctccaccccgtggaaaacatccccgagatcatcctctactggaagcattccacggtgagccccacgtgcccagggccctcatctgctcccagggacccttagcccagagtcacccagtcgtccccatcccagagtgcagctggggctttccagccacctcctcttccacaggagactgtcccctcttctgccagcccagtagagct

SEQ ID NO: 42842 - DNA, 2300 bp, Homo sapien
attggaagaatcacagatcacctggaattttgcccatcggccagtggcccatgaagggaaaactaatttgggggtggttcaaataggtaaaaggccagcaaggagcacctgtgcgtgtggagggggcggggcggggcggggggctcacactgcagcctcgttcccaggtgaatttcttccccatgctggtaacttgcacttaacactttagtcagaggcgctgccccaaaagatagctccctggtgcggggcggctgccaggaaatctcatggaacagccctgggagttgccgtctgtcctggctggaccttccggaaaccctgcggtctgaacactggctggtcctcggggacagcagccctgggctcagctgctgtggcgggctcgtctcgtgccgtgctgtgcccctgtctctgggtgtgtgcttgcttcactaacatggctccgagcacttatgcgtgttgtttctgctctctcctccgcatcctttgtctgtctgtcagaatacgaacgggccatttctggggccctgtcacctagtaagtatccatgtcgctcatgactgcctcccttgacttccatgcctgatcagagcgggattcttgtgggccattatattgccattgttgtgctaagtggggtgtggagccccctgctctttctcctgggggcagaggcacctcgtgtggtttctgggcatccgaatgcctgcccttggctcactgggaggtggggggatgcagctggcggatgggcatgtgggcacgtgggcagcctcgcctctgtcttgcagcatggataaaaacggcacgatgaccattgactggaacgagtggagagactaccacctcctccaccccgtggaaaacatccccgagatcatcctctactggaagcattccacggtgagccccacgtgcccagggccctcatctgctcccagggacccttagcccagagtcacccagtcgtccccatcccagagtgcagctggggctttccagccacctcctcttccacaggagactgtcccctcttctgccagcccagtagagctgtccgcatgttccccatgttctggcactccagccaacctgaacagccccatcgttcacacacacaggcttcctcttccaggaacaccctccgtccccacatgctccctgctccctgctcctcatgggccacttcaaataccccttcccatgatgctgtctgttctcccaaagctggtatgagccttccccccggtgggagggggctggggcagaagctactctacagagaacacctaggcagagctgtgaggtgtccccacggtcacacatttgctgccctctcgcccccgtccactgtggtttcatgttcagaaatgtgagtctgtgctggtctctgccccgagcccttcatgcttggcgtgtccctctctgagtcctggtgtgcagtcctgtccctctggaccatccgctccaggaggggaggccagaggcgctcctcatctgcctctcgcagtgccaggccagggcttgttaggtgagattaaatggacagctccaggggtgggagtagctggcccagagctctggcctttagccctgggatcagagcagaggtggctctgatcagcccggatgtcacccggagaaaggttacgcaggcagcgagccctcgtgtttgctgaggcgttgcataatgttctgccagcgtgatctggttacacgtgagatctcagacggctctcaccccggcctgatcccttcagcgcagccagcctggcaatctcacacaggcctgtgagctgttcttgcagtagctccctggcagcattggaaagggccggtgaatggttttctaaccggcacctcccggctgtgttcagctgaggttctatacctgtgcctctccaggaccccagcaggggtgagagctctgctaccttcagagtgaagggaaagaccccagcccgcttcccacccagagtccttggccttctccctgtcctgtggtccctggcctggagccgtgctagagggtagacggcgacaggtgccagcagccttgccccaagggtcctgagtcaggcttgtgccatctttcctcacagatctttgatgtgggtgagaatctaacggtcccggatgagttcacagtggaggagaggcagacggggatgtggtggagacacctggtggcaggaggtggggcaggggccgtatccagaacctgcacggcccccctggacaggctcaaggtgctcatgcaggtatgtagggaaaaggccccagacccctggggggcc

SEQ ID NO: 42843 - DNA, 2300 bp, Homo sapien
aggacagcaggacggtttgttttcagtggaatcccatccctgggttcccctggttcccactcttcccaagcctcccgggactgggacatgtttgcaataaaggaaaggtttgtggcgcctgtcatggcaggcatctcatggagctccgtgtggctgagtgctgcgtggggctggcggtcaagggaggcatcaggcttgggctgtgccagcccttgtggtaactaaccgctggcctggggcttcccaggtgtcaggcacggtacggctccgcaggctttgtgtggcatcgtccccaggataccactcagggcacacagctgggccgtggagcccagcagccagagtgcaggtcggggcaccctacccacggtggggctctgcagtggggtcactcatcaagcctcagtttcttcgtctgtccccgccttgtgggagagttcagtgataggagcaggtgcagtgcacagagccgggtcacctggtccagggcaccaggctattcagacccctgctctacagacagaaccaagccctctcaggtggcggccccgggcttcagctccaggctgggccaggctttatgggagaagaggctctgccttccagggtgagtgtgggttgtgggtgggaccccctttcctgcacagagtacccaggatggggctccccagtcccgacttaactgaggtggggtggcctgctagggaccctccagaggccagtgagcccaactccacccactggcccttccgactggggggactgggcaacgtccccataccctcttgagaaacttttttgttgtttttttttattttttgagacagggtctcgctctgtcacccaggctgggatgcagtggtgcaatcatagctcactgcaacctcgacctcccaggttcaagtgatcctcccacctcagcctccaagtagctggaacaggtgcacaccaacatgcccagctaattttttgttttttatattttgtagatcctgggttttgctgtgttacccaggctggtctcgcactctagggctcaagggaactgcccgcctcagcctcccgaagtgctgggattacaggagtgagccccgacgcccagccaggaaacttttaaagttttattttctttattagtatttttaaaacaaaataactcatgttcctgtaatagctaccatttgagtaaggtagaagtgagcgctcgaggcagggagtgtgacgtttggaagcaggtggctgtgcagttggtgacctccgtttttcccacggggttggtctgccaccggctgtgttctcatccccatcctgggcgtctgcctgtcggcgtatgtcacattggcttgttctcatggcgcatagtgccctgccgcctggatgcaccacagtccttcagccagcccccactgtgtgccctctgtgggtgttaactccaggtacttgggctgcagggtagaggaggcagccaggcctgaggctgtgcccatctgtggccttaggagtcacagcagccgcttctgagaggccaacaggtatcagggcacccagagccaccactgtgtccagaacggcatttccacttcactggccaggtctaaagtcctgaggggcctttgctccagggacccagggtacctccctcagcagggcaggaactaggccaggaataccatggggcactgaaggaggagcctccctctatccctgtaaccctccatccctgtacctctccatccctccatccctgcacccctccgtccctgtgcccctctatctctccatccctgcacccctccatccctgtaccccatccctgtacccctccgtcccccatccctgcacccctccatccctgtacccctccatccttccatccctgcaccctccatccctgtacccctccatccctccatccctgtacccctccatccttccatccctgcaccctccatccctgtacccttccatccctccatccctgcatccctctgtccctgcacccctccatccctccatccctgcacccctccttcgttgtacccctccatcctccatctctgcatccctgcacccctccatcctccatccctgtacccttacattctccatccctgcattcctccatcgcagcatccctgcatgcctccgttctctgcatccctccaccccagtatccctgcacctcttcatccctccattcctgcatccctctatttttccatccctccattcctgtatccctgtgccctccatcctccatcccagcatccctccatccctgctccccactctcacttccc

SEQ ID NO: 42844 - DNA, 2300 bp, Homo sapien
ataaatacacagccttaggatttgggggcagtggggagagaggatgatgaacgtttggaaagtgaaaaaggctttccctttcctgtgatctcccatctcttaatcaaaaaagtcttaaaacacggtagaggctgggctccgtggctcacacctgtaatcccagcactttgggaggccgaggcgggtggctcatttgaggtcaggagttcgagaccagcttggccaacatggtgagacccccgtctctagtaaaaatacaaaaattagccgggctgggtggcaggcgcctgtaatcccagctactggggaggctgaggcaggagaattgcttgaacccaggaggcggaggttgcagtgaaccgagatcgcgccactgcactccagcctgggcaacagagcaaaaaaaaactccgtctcaaaaaaaaaaagtctccttaaaacatggtaaaggctgggcgcagtggctcacgcctgtgatcccagcactttcagaggccaaggtgggcggatcacttgaggccaggagttcgagaccagcctgggcgacatggtgaaaccctatctctacaaaaaatacaaaaattagcagggcgcagtggggtgagcctatagtcccagctactcgggaggctgaggcaggaggatcccttcaacctgggaggcagaggctgcagtgagccgcgatcgcactccagcctgggcgataatgcgagaccctgtctcgaaaacataaataaacaaaccaaaaaaaaaaaaaaaaaaaaaaccacggtagaagaacgattttatgagaactcgaacaattccaggtagtaggcatcaggagtgcccctattttacacaaaagaatacagagggttcggagacttcagaccaagtcactcgcccaaggtcacaagcaggcagaggcaactcctgaccctgcgggttcccaggagtcccgagttcggcgctgatcagcatccccatccccggccgggccaggccttacctgcgcggctgagcgctctgcgtggaggtcctgggcgcgcaggtgccaccgcgccgtgtggtacagccccagggctccccccagggccagcgccgcagctcccagcagccgcgggctccccttacgagctgcagccacggggctcgggccgcccgccgcccccgcgaagccagcccggctctgcgtgggtagcagcggctgggggcggcctcccagcctccaggccaaggcgcacccaccaggccacagcgcccgcaccacccgcgcagccgggtccatgttcgctccgccggcgccgcgggcgggcgcgcgaaacgaagacgccgaggcacgcgcggcgtttaaagggccaggactctggcgccccgcgggttggccggggtgagggcgacgctaagggaaccctcagcgctctcgggactgggcgtgtgcccggcgcccaagttcgaaacgcccgccagagccgcagaggcccgctcgggaacgtttgcagaccgttccatgcttccgcctccaaaggctcttgggtagtgacccggccgactgcaggggggcgaacgtctcctcgccccaccttgaccgcctaaagggcggcgtggccgtctgtaacacgtacttgcccacctctcttacgggcgcccattcaaaacaactccagcccttcctagagtcagtacaggcgccgcgacttccggccactgaaagccccggaaacgacccgacccggcaccaggtgttgcggttctctctgccctcccgcctcattgtccgcttcctactgtgacccgaaccataaaattttcccgaacccgaaggggccttggaaaccacgtgtctctgatttcgcccacgcgaagcggccggcccgccgaccccgagatttccagggagaggatggcaaagtggggtgccaggctgctcggtccttctgctgggctcccccgccctagctgaagcccggagcctccaccgcataggcgtctccgcggacagccccgggatggccccgcccggcgcccgagagggggcgggactcgcagagtgggcggggagaggggcggggcgaggggggagctctgagtcccggctctgctgctccgccgcgtcccactcttctcgctccgctttcgccccgcatcttccaccttccttccagtccttgcggcgaccgagcccgcagtgtcagtccccagcggggacctgagtatgccggtgaagacgagagcggaaggcgaggacgacggcttcggggaagcgggtgacccgaggagactgctggagcgaccttggcgtttccgggggtgccttc

SEQ ID NO: 42845 - DNA, 2300 bp, Homo sapien
ctccacctcttgtggagggcctgacatcagtcaggctcgcccgcagttatctggaggcctgtctccctgtgatgctgtgcttcagtggtcacgctcctagtccgccttcatgttccatcctgtacacctggctctgccttccagatagcagtagtcaattagtgaaaatactaatagtccctgatatgcagaaataatggcgtaagctgtctttctctttgtctcctctccctctctgcctccgctgccaggcagggaagggccccctgtccagtggacacgtgacccacgtgaccttacctatcattggaggtgactgacattctttaccctgccccttctgccttgtatccaataaataacagtgcagccagacattcggggccactaccggtctccgcgcattggtggtagtggtcccccgggcccagctgccttttctcgtctctttgtcttgtgtctttatttctacactctctcgtcgccgcacacagggagagacctaccgaccctgtggggctggaccctacagcgccctgtgtcacctcggcagcttaagcacgtgcaactggttgctctgtaagctgctcacatttggcaaggctgcgaggccacaccagcaaagccaggtggctggagatgctgacccagcagagcatcgcgctccccgccccgggccagaccctcctactaagcccagcaggccaaacacggacccgcccccctcaagtgcctaggtgtccccggggcctgaacacatcaagttacattttgatggagttagaatccggaaaatcaagagtgtggaagatcaggagcaattaatgtaaacaggaggaggatgaagctgggaggagcaggagctagcaagcaggagctagcaagcaggagcgtgagagtggcgctgggagaaggcctggatagggatagagtagagcacagaacatgggggtcaccctcaaccacccctaaacactctaagctcgagcagtccctcaactcctggtctgtaaagtggctgaaggaagtgggtggagcaaaacccatatgggcgagtgtcccagcagctgcctcagtttccctatctgtaaaacggggctggggacctgcagctctcacgggactggttacccgctcgcgggtgctcgccctgcatccgagacagcacctacaactccaaacccactcggggcgggtcgaggtgggcccttcggtcccttcgaagccaacatcccgattccccttcccgggaaggcacccccggaaacgccaaggtcgctccagcagtctcctcgggtcacccgcttccccgaagccgtcgtcctcgccttccgctctcgtcttcaccggcatactcaggtccccgctggggactgacactgcgggctcggtcgccgcaaggactggaaggaaggtggaagatgcggggcgaaagcggagcgagaagagtgggacgcggcggagcagcagagccgggactcagagctcccccctcgccccgcccctctccccgcccactctgcgagtcccgccccctctcgggcgccgggcggggccatcccggggctgtccgcggagacgcctatgcggtggaggctccgggcttcagctagggcgggggagcccagcagaaggaccgagcagcctggcaccccactttgccatcctctccctggaaatctcggggtcggcgggccggccgcttcgcgtgggcgaaatcagagacacgtggtttccaaggccccttcgggttcgggaaaattttatggttcgggtcacagtaggaagcggacaatgaggcgggagggcagagagaaccgcaacacctggtgccgggtcgggtcgtttccggggctttcagtggccggaagtcgcggcgcctgtactgactctaggaagggctggagttgttttgaatgggcgcccgtaagagaggtgggcaagtacgtgttacagacggccacgccgccctttaggcggtcaaggtggggcgaggagacgttcgcccccctgcagtcggccgggtcactacccaagagcctttggaggcggaagcatggaacggtctgcaaacgttcccgagcgggcctctgcggctctggcgggcgtttcgaacttgggcgccgggcacacgcccagtcccgagagcgctgagggttcccttagcgtcgccctcaccccggccaacccgcggggcgccagagtcctggccctttaaacgccgcgcgtgcctcggcgtcttcgtttcgcgcgcccgcccgcggcgccggcggagcgaacatggacccggctgcgcgggt

SEQ ID NO: 42846 - DNA, 2300 bp, Homo sapien
tgatactttgatacctgtatgaaacatgtaatgatcaaatcaaggaaattaagatcttcatcacctcaaacatttatcttttttgtgtgtgggcggcaagccacccaggcaccgaggcaagagacagaggacacgagctcttccagtataataaaatataaaacaagaatagttataccagatatagatcttagatatgattatatatgactatcattaatcattagtttgtagcaattactttttattccaatattatgataatcctcgctctataatcatagcctaggaaaaaccaggccatacagagataggagctgaggggacatagtgaggtgtgaccagaagacaagagtgcgagccttctgttatgcccacacagggccaccagagggctccttggtctagcggtgacgccagcatctgggaagacgcccgttaccaggcggatcatggtccagcagtagcaaaaggtgtcaaggaacaacacctgctacttagcagaccgggaaagggagggtgggggtctccctttccccgggggagtttagagaagactctgctcctccacctcttgtggagggcctgacatcagtcaggctcgcccgcagttatctggaggcctgtctccctgtgatgctgtgcttcagtggtcacgctcctagtccgccttcatgttccatcctgtacacctggctctgccttccagatagcagtagtcaattagtgaaaatactaatagtccctgatatgcagaaataatggcgtaagctgtctttctctttgtctcctctccctctctgcctccgctgccaggcagggaagggccccctgtccagtggacacgtgacccacgtgaccttacctatcattggaggtgactgacattctttaccctgccccttctgccttgtatccaataaataacagtgcagccagacattcggggccactaccggtctccgcgcattggtggtagtggtcccccgggcccagctgccttttctcgtctctttgtcttgtgtctttatttctacactctctcgtcgccgcacacagggagagacctaccgaccctgtggggctggaccctacagcgccctgtgtcacctcggcagcttaagcacgtgcaactggttgctctgtaagctgctcacatttggcaaggctgcgaggccacaccagcaaagccaggtggctggagatgctgacccagcagagcatcgcgctccccgccccgggccagaccctcctactaagcccagcaggccaaacacggacccgcccccctcaagtgcctaggtgtccccggggcctgaacacatcaagttacattttgatggagttagaatccggaaaatcaagagtgtggaagatcaggagcaattaatgtaaacaggaggaggatgaagctgggaggagcaggagctagcaagcaggagctagcaagcaggagcgtgagagtggcgctgggagaaggcctggatagggatagagtagagcacagaacatgggggtcaccctcaaccacccctaaacactctaagctcgagcagtccctcaactcctggtctgtaaagtggctgaaggaagtgggtggagcaaaacccatatgggcgagtgtcccagcagctgcctcagtttccctatctgtaaaacggggctggggacctgcagctctcacgggactggttacccgctcgcgggtgctcgccctgcatccgagacagcacctacaactccaaacccactcggggcgggtcgaggtgggcccttcggtcccttcgaagccaacatcccgattccccttcccgggaaggcacccccggaaacgccaaggtcgctccagcagtctcctcgggtcacccgcttccccgaagccgtcgtcctcgccttccgctctcgtcttcaccggcatactcaggtccccgctggggactgacactgcgggctcggtcgccgcaaggactggaaggaaggtggaagatgcggggcgaaagcggagcgagaagagtgggacgcggcggagcagcagagccgggactcagagctcccccctcgccccgcccctctccccgcccactctgcgagtcccgccccctctcgggcgccgggcggggccatcccggggctgtccgcggagacgcctatgcggtggaggctccgggcttcagctagggcgggggagcccagcagaaggaccgagcagcctggcaccccactttgccatcctctccctggaaatctcggggtcggcgggccggccgcttcgcgtgggcgaaatcagagacacgtggttt

SEQ ID NO: 42847 - DNA, 2300 bp, Homo sapien
atttttgtatttttagtagagacggggttttgccatattggccaggctagtccctgaggatacattttttttttccccgagatggagtctccctctgtcgcccaggctggagtgcaatggcgcaaccttggctcactgcaacctccgcctcccaggttcaagcaattcttctgcctcagcttcccgagtagttgggattacaggcatgcgccaccatgcccaactaatctttgtatttttactagagacagggtttcaccatgttggtcaggctggtcttgaacacctgacctcaggttatccacccgcctcagtctcccaaagtgctggagttacaggcgagagccactgcgcccagccgaggatacctttttttttttttttttaagacagaatatcgctctgttccaggctaaagtgcaaaggcgtgatctcggctcactgcaacctccgcctcccaggttcaagctgttcttctgcctcagcctcccgagtagctgggattacaggcgcctgccaccatgccctgctaatttttgtatttttagtagagatggggtttcaccgtgttggccagactggtctcgaactcctgacctcgtgatccacccgcctcagcctcccaaatgctgggattacagatgtgagccaccgcacccggcctggcagaggatactttttaaggtcaaagacagtagcagaggtggagttcctgggaacagggtcatgaggggaagagggggttcggagggagcgagtagccactggctacctctagaaagggaaggctttggtgcaacatcgttcccctgcagttttactcatctttgcttcctgccctttcatcatccaatcgggcaggcaggacagggcctgagggggcagggatccagtgggtgcctctctagactaaccccagctcaggactcccagagccccttccctgaggccctgctgcccccaagcccagattggggatcccaagcagcacgtaggcagagccagtgaggtccccgttagtcccattgaaagctctaaaaccagcgaaccctcagtccagcctcaggtcaggcatccaggacggcctcagccctcatgggtgagccatctctgcggacactgcacagggcctacgatccatcgctgcctcccgaggatgccagccaggcccccgttgagataactgcttccctgctggacaaggctgggaccagccatctcggtgacagttccagaacccctggcctgggctgctgggttcaatggaaaaaggctgtgactagagtcagggggatggtctcagtgacctcaaggataaggccagatccttgcactgtcagtgacccaaagcaacaggtgtccagagcagcagtgtggcgccttcacgcccccacacatcagcccaactcacccaggacagggactgtagcctcagcactcaacccatgtgccctgtgtggggtctcttcccactgcactcacaggagaggaagggtccctcaggggtccactggggtcccctcctgcaaatggggcaaggagaggggcaaggggctgtctcaaggcccctggagcacatgcaggtcctggactggggctcctgggagggccatgattctgggctccatgagttcagagcagacgccttgtttttccttgtccactgtcagccaccccacccttccctgacccttaaaagaaccaggaaacagcacatgatctgttggaaggaggcattcattctttcctttctgtgggtgtggggaggggaccacagggcacataccccaccctgggatccagctgagcaggggggtcagagatgacagctcttccggctcacaggccaccggcccacatacagggcaatcagaagaaagaaacagcacaaggaaggcacagagggagtcgttgtccctgccagaggtgcagcactccgggaatgtccctcactctccccgtccctctgtcttgcccaatcctgaccaggtgcagaaatcttgccaagtgtttccgcaggagttgctggcaattgcctcacattcctggccttggcaaagaatgaatcaacccaccctagatcccataaatagggccacccaggtgagcctctcactcgccacctcctcttccacccctgccaggcccagcagccaccacagcgcctgcttcctcggccctgaaatcatgcccctaggtctcctgtggctgggcctagccctgttgggggctctgcatgcccaggcccaggactccacctcagacctgatcccagccccacctctgagcaaggtccctct

SEQ ID NO: 42848 - DNA, 2300 bp, Homo sapien
gaggtaggtccaggccgggcatggtggctcacacctgtaatcccagcattttgggaagccaaggcaggtggatcacctgaagtcaggagtttgagaccagccagggcaacatggtgaaacctcgtctctactaaaaataaaaaaaattagctgggtgtggtggcaggcacatgtaatcccagctactcaggaggccgaggcacaagaattgcttgaacccgggaaggagaggttgcagtgagctgagatcatgccactgcactccagcctgggcaacagagcaagactctgtctcaaaacaaacaaacaaacaaaggtaggtctgctccaggccaaactttttatttatttattttttgagacggattttcgctctgttgtccaggctggagtgcagtggtgcagtctcagctcactgcaacctctgcctcgtgggttcaagtgattctcccacctcagcctcctgagcagctgggattacaggcacacgccaccacgcccggcttatttttgtatttttagtagagacgggttttcaccatgttggtcaggctggtctcaaactcctgacctcgtgatctgcccgcctcggcctcccaaagtgctgggattacaggcgtgagccaccaggcctggcctttttttttcttttttttgagacagggtcttgctctgttgcttaggctggagtgcaagggcacgatctctgctcactgcaacttctgcctcccagttcaagtgattctcctgcctcagcctcctgagtagctgggactacaggcgtgtaccaccacacctggctaattaaacattttatttttaattaattaattaatttttttttttttaaagacagggtctcactctgttgcccaggctgtagtgcagtggtgcagtcatagctcactatagcctcgaactcctgggcccaagtgatcctcctgccttagcctcccaaacagctgcaactaaggtgcatgccaccaggtctggctaattttttttgtgctttctgtagagacgggggtggggggggctgagtgggcgggggtgggagtagggtgtctcactatgtttcccaggctggtctccaactcctaggctcaagcaatcctcccacctcggcctcccgtagcgctgggattacaggtgggagccaccccgcctagctaatgttcctgtttctcttgtccagagctggagtccagcctgattcccacccacaggttgtaaccaatgagccctaagagaagcgctgaagaccaggaaggcccagatccaggggtaggggtgttgggtcctctccactggggtgcaggcagagaggcaaagaggaaggagacccttcgtgactctcagcgaggctgtgaagaagaatatccggaagccacaagaggtatatccggaagccacaagaggtgtggaaaccccgtttccaaggctgggcccagtagctcgtgcctgtaatcccagcattttggtaggctgaggcgggtggatggctcgagctcaggagttcgagagcagcctgggtaacatggcgaaacccctcccccccccccccccccgtctccaaaaaatacaatagccagcgtggtgcagccgtctgtagtcccagctactctggaggctcaggtgggaggatcgcttcaggctgggaggcagagatcaccccactgcattccagcctggaagacagggccaggccctatctcaaaaaataacaaggaaaccccgttttcgatttcgccaacgcggaggggccgaagcagcagatgggcttggacggtctcccgccgctcctcccggacctccctactcctgggcttttccaggggcagccccgtggtggccccgcccagcgcccgggagaggggcgaggccgggggcggaatgggcggagttcgactgtgagggaggtggaggcgggagtccggtggtgggggtggagtctggaggtagggcggggccagaacagcggcgggggcggagttccggctgggggcggggcggggcggagcgggagctgcgggattccggcttcaggggcggggcaccggcctctgggcggagatctgctgccgcgttctacccttccggcccgtgttctatccgccgcctccaccttccatccggcgccggctttcggcgcgacggtcgccgcgttccatcgtcgcgcggcccttcgggcgcccgagcccgcaatgtcgggccccaacggagacctggggatgccggtggaggcgggagcggaaggcgaggaggacggcttcggggaagcaggtgacccgagggggctg

SEQ ID NO: 42849 - DNA, 2300 bp, Homo sapien
gggcaccccagccaactctcagccagcacccagcctctctgggccatgtggtggcagaaacagaaggccagacaggctccctgggaaccagggactctggatcatgaggcacttcacctgtctgaacttgggtatccctcttttaaaaaaatttttaggcggggcgtggtggctcacacctgtaatcccagcactttgggaggctgagacgggtggatcacctgaggtcaggagttcaaaaccagcctggccaacatggcaaaaccgtctccactaaaaaatacaaaaattagctgggtgttgtggcgggcgcctgtaatcccagctactcgggaggctgaggcagggagaattgcttgaacccgggaggtggaggttgcagtgagccgagatcgtgcctgtgcactccagcttgggcaaaagagtgagactccatctcaaaaaaaaaaattttaatttttgagccaggcggggtggctcatgcctataatcccagtactttgggaggctgaggtgggcgggtcacctgaggtcaggagtttgagatcagcttggctaacatggagaaatcccgtctctactaaaaatacaattagccaggcatggtggcgcgcacctgtaatcccagctactcgggaggctgagacagtgaggcaggagaatcgcttcaacctgggaggcagaggttgcagtgagccgagatcgtgccattgcactccagcctaggtgactccatctcaaaaaaaaaattttaatttttatttttatttattttttgagatggagtctcgctgtctctcaggatggagtgcaatgacccgatctcagctcactgaaacctccacctcccaggttcaagtgattctcctacctcagcctcctgaggagctgggattacaggtgcacaccaccacgcccaactttttgtatttttagtatagacagggtttcgccatgttggcgaggctggtcttgaactcctgaccttaaatgatctgcctgccttggcctcccaaagtgctgagattacaggcgtgagccaccgcacatggctaatttttatttttttgaggcggggtctggctgtgttgctcaaactggagtacagtggtgccaatcttggctcactgcaacctctgcctcccaggcttaagccatcctcccacctcaacttcccgagtagctgggaccacaggcgtgcgccatcacgcctgggtaattttttgtatgttcttggtagagatggtgtttcgccatgttccccaggctggtctcaaattcctgggctcgagcaatccgcccactgtggcattccaaactgctgggattataggtgtgagccactgtgcgtggccaagtttccctcttaataacgtatcagagctggggaagttcctttggctggaggcctagcaaggtcaagtgacttgctgaagaccacgcagttggtaagtggctgggatttgacccgggcctgagctctccgacccatgctggcctgtctctccagctgcaccctttggagtgcaggagtggggtccttgctgctcaggccctctggttctcttcttggttcactagcaggcaccccaccctcctggtcaggcgaccctaagatgaatcatgggtggatggggcctgggctgagttggccctttacttctgctatttcctcattagaaagacccatagagataaacgaccagaccaaccctattactggggagacaggccaagagtgggagggcaatgctgaggctgcatagcatgtcttagcatgttggctgtcttggtgaaaggccctagtacccagagaggctgagagcatcacacaaggtcacacagcatgtccaacagtctcaactgggcttctgggctaggaagcagctgctggccaggaatgtatcaggtagggaggaagccctgccctcacctgcaccttctgtgtccagaagtacaggtgaccaagaaccccagccctaccacctggcctctgagccgccagtataggatcaacacctgaacacctagacagtcctgttcgcctccagcagctgctggggttctcgtcctgggatacagaggagagaggcacagcggtgtgggagacccatttaatgtggacactcaaggcctgggcagagtggggagcgcccaggagttgggtgggcaggcaagtgggtgggttgcaggcccactcttggccccaggagggcatgccaggtggtgggggctggcccaggtaggccaaggggaggcccaggcaggaagggtggcccaggcaggcagacccaccaggg

SEQ ID NO: 42850 - DNA, 2300 bp, Homo sapien
tgccccctttgctggccactccagggcgggccacttctggaggtaaggcattttccttcagcgaggggccccgcctccagccttccaacgggcctgtcatcacagatctggtctagtgtctaacccgccctgccctcatttttttacgtatggaaaaacccaggcttagagattggggtgcggttggtcctgcgccccacagctgtctaggtggacccagagcccaggcctcctgactctcaggctggtgcctgtttcgtgcagggtgacagctaggtagtttctgaagggcagagtatggatgtgtccagattaccattccctgctcagtgctcattccttgggcttagcaggagggagggagggaggctgcaggcttctggtggcctcctggggtgccttggactggccagagagagctgtgtgttcatttagcagacatctggaagcccctgcaggggactccctggtgcagatgatacatctggcctggccctccctgaggtcttggacaggaatggggagggtggtgagagatattaatgcaaataatgctccaaccaattaattaagactgtggaggccgggtgcaatgactcatgcctgtaatcccagcactatggaaggccaaggcaggaggatcagttgagcccaggagttcgagactagcctaggaaacacagtgagaccctggctctatggaagaaaaaaaaaaagaatacagaaatgccacgaaaaggaagtaggttctggacccattctggagtctggagggcttcctgcaagaagtgcttctgaggctctaagtgaaggcctaggggcagggacgggcctggggcttgaccagagagaaggccaaggtagataagcagagagggctggttgcgggggcatggccggggcaggtagtgtgcagaggcccgtttgtgcagggaaggggtgggtgtgcagagtgttttcaggcttggcgtaaggcgtgcaccagggctgcaggaagccatgggagggctttaagcctggaagaagagacatgatcagctttgcattttagaaggaccccactgggccaggtgtggtggctcacgcctgtaatcccagcactttgggaggccgaggcgggcagatcatctgaggtcaggagtttgagacctgtagggaccagccccacagggtcggtgcgtctctccctgtgtgcggcgacgagagagtgtagaaataaagacacaagacagagataagagaaaaggcagctgggcccgggggaccactaccaccaatgcgcagagactggtagtggccccgaatgtcgggctgcgctgttatttattggatacaaggcagaaggggcagggtaaagaatgtgagtcacctccaatgataggtaaggtcacgtgggtcacgtgtccactggacagggggcccttccctgcctggcagccgaggcagagagggagaggagacaaagagaaagacagcttacgccattatttctgcatatcagggactattagtattttcactaattgactactactatctggaaggcagagccaggtgtacaggatggaacatgaaggcagactaggagcgtgaccactgaagcacagcatcacagggagacggttaggcctcctgataactgcgggcaagcctgactgatgtcaggccctccacaagaggtggaggagcagagtcttctctaaactccctcggggaaagggagaccccccccccccccccgcctttcctggtctgctaagtagcgggtgttgttccttgacgccttttgctactgctggaccatgatccgcctggtaacgggcgtcttcccagacgctggcgtcaccgctagaccaaggagccctctggtggccctgcccaggcataacagaaggctcacgctcttgtcttctggtcacttctcactatgtcccctcagctcctatctctgtatggcctggtttttcctaggctatgattattgagtgaggattatcataatattggaataaaaagtaattgctaccaactaatgattaatgatactcatatataatcatatctaagatctatatctggtataacaattcttgttttatattttattatactggaacagctcgtgtcctctgtctcttgcctcggtgcctgggtggcttgccacccacagataccagcgtggccaacatagtgaaaccccaactctactaaaaatacaaaaattagccaggcgtggtggcgtgtgcctgtaatcccagctatttgggaggctgaggcaggagaattgcttgaacccagga

SEQ ID NO: 42851 - DNA, 2300 bp, Homo sapien
gtgcccccgcgcgccctgcccgcccaacgtcggcgcggaaggcagggcgaggagtcgcccaggctgtgacacgcacaaggcagggagccacagaaaagggagccggaattgctacttagtccaggagaggtggctcacccctgtaatcccagcactttgggaggccaaggcaggcgaatcacttgaggtcaggagttcgagactagcctgaccaacatggtgaagccccgtctctattaaaaatacaaaaattagccgggcgtggtggcccgcgcctgtagtcccaggtattctggaagctgaggcgggaggaccacttgaacccaggaggcggaggttgcggtgagcccagatcgtgccactgcacttcagcctgggcgacagagtgagactccgtctcaaaaatataaataaataaaaaataaataaaagaattactacttagtagccaaggattgttacggcgcggggatggggggatacagcggttgttaagggggttcttgggggcaggaccattttaggtgcaggataagggagcagggctctgttttcctctccttttctttttaaaatttttacttttttttttttgacagctcttgctctgtcgctcaggctggagtgcagtggcgcgatctcagctcactgcagcctgtgcctcccgggctcaagtgatcctcttgccttagcctcccgagtagctgggactacagacgcccgccaccaccctggctaatgtttgtattttttgtagagagggatttcgccattttgcccaggctggtcttgatcctccagcctcggcctcccagagtactgagattacaggcggaagcgcccggcccctagggctattttttgataattggcctcgaccctcctcacctactccttccttagccaaatctactgagaaaagacttggagggggactctccctccacccctccgtgggcaaactcctgacggactgtaagaccttggccgccctctcgcctggcctgggtccctcgaatgaatgtacatccgccaactgcgcgccccctctcaccgcagccccgcgcggggccccaggatcgcaggaccgcggcggccgcagggaggtgggttgggaacaggaaggaagtccccctcgatgccccgcgggatggctgacccttccgggcggcagacggaccttggtctccgagcctccccttcgcgatgcggaggacgcgggacagagggtatgagccgcccaggaccccctcgcacctgctagcgccccgcagccgccccccagcgtgacttgtgcactgggcgggctcgggtggcgcggccggaggcgcctggacctcccgtcccccagagggcgctgccccggccggccccgcccgcatttgggccttacgagcccacaggccccggagtagcagcggggaggccgggagcccgcgggccggagccgcccggccgaggcgtgggggctgcggggccggcccatccgtgggggcgacttgagcgttgagggcgcgcggggaggcgaggtgcggggccgggggcggctgggtcgtggggctccgcctgcgagctggctgtgtctgcggaggaggcggctggcggggtgggagcgggcggagtggggcgcgaggaggtggcggtggtggagagaagccgtcccacggagctcaggaccacggtgaccgggttggacgggtgccgatgttattgacacccgggggcccagagagggttgcggtattgaaaaggggctgtgagtgaggaagtgatgggcgcagagagaggctgaggctgagggtgggaggatggagccgccagaaatggagagatggagggacttgaaggaggggctgttggcagtgtctggggggcattggcaggagggtggttgaatcttgcccctagcaggactggaggtaacttggaaggatgggccaagcgagtgtggcaggctcttggcaggactgggaatgcagctgtgaagctcctcagcagtctctgcgggctgtggctgcggggagtggcggtggatgggaggggagcaggcctgacttatggtggggaccccttgcctcactctgctttctgcccctagccaccatgttcagccagcagcagcagcagcagctccagcaacagcagcagcagctccagcagttacagcagcagcagctccagcagcagcaattgcagcagcagcagttactgcagctccagcagctgctccagcagtccccaccacaggccccgttgcccatggctgtcagccggtgagttcccctctcgggcgcgatggc

SEQ ID NO: 42852 - DNA, 2300 bp, Homo sapien
agtgatgtgatctcggctgcaacctctgcctcccgggttcaagcgattcttctgcctcagcctcccgagtagctgagattacaggcgcccgccaccacatccggctaattttttttgtatttttagtagacacgtagttttaccatgttggccaggctggtgtcgaactcctgaccttaagtgatccacttgcctggaccccccacaaagtgctgggattacaggggtgagccgctgtgcccagtagagcctgggcagtcttgactcgcccctctctcctcactgcttctgtcttggttttcacgggagcgggttttctaattggcagatttgatgctgtcactcatgaggttcacacccttctccagtgctccctacccttagaggataaagcctacttctcagcccagcattcgaagtccccaccctccaggctgcctgttcacccataggcgccgacgtccccggggccctggacgccaccctgcgctccggcctcgctgagtcactttcgcgcctctaagtcctagctcttccacgactagtccaggttgagttaggctcctcagccgccgcccatctgccgcagagccagtccagagctttggagcggcgctcgtcacatgactgcagtgatttatggacgcgcgaattctgctgcccgagcgccctccgtcaacgcgctccgcctgcccgggtctgcgcgccgccagtgcccccgcgcgccctgcccgcccaacgtcggcgcggaaggcagggcgaggagtcgcccaggctgtgacacgcacaaggcagggagccacagaaaagggagccggaattgctacttagtccaggagaggtggctcacccctgtaatcccagcactttgggaggccaaggcaggcgaatcacttgaggtcaggagttcgagactagcctgaccaacatggtgaagccccgtctctattaaaaatacaaaaattagccgggcgtggtggcccgcgcctgtagtcccaggtattctggaagctgaggcgggaggaccacttgaacccaggaggcggaggttgcggtgagcccagatcgtgccactgcacttcagcctgggcgacagagtgagactccgtctcaaaaatataaataaataaaaaataaataaaagaattactacttagtagccaaggattgttacggcgcggggatggggggatacagcggttgttaagggggttcttgggggcaggaccattttaggtgcaggataagggagcagggctctgttttcctctccttttctttttaaaatttttacttttttttttttgacagctcttgctctgtcgctcaggctggagtgcagtggcgcgatctcagctcactgcagcctgtgcctcccgggctcaagtgatcctcttgccttagcctcccgagtagctgggactacagacgcccgccaccaccctggctaatgtttgtattttttgtagagagggatttcgccattttgcccaggctggtcttgatcctccagcctcggcctcccagagtactgagattacaggcggaagcgcccggcccctagggctattttttgataattggcctcgaccctcctcacctactccttccttagccaaatctactgagaaaagacttggagggggactctccctccacccctccgtgggcaaactcctgacggactgtaagaccttggccgccctctcgcctggcctgggtccctcgaatgaatgtacatccgccaactgcgcgccccctctcaccgcagccccgcgcggggccccaggatcgcaggaccgcggcggccgcagggaggtgggttgggaacaggaaggaagtccccctcgatgccccgcgggatggctgacccttccgggcggcagacggaccttggtctccgagcctccccttcgcgatgcggaggacgcgggacagagggtatgagccgcccaggaccccctcgcacctgctagcgccccgcagccgccccccagcgtgacttgtgcactgggcgggctcgggtggcgcggccggaggcgcctggacctcccgtcccccagagggcgctgccccggccggccccgcccgcatttgggccttacgagcccacaggccccggagtagcagcggggaggccgggagcccgcgggccggagccgcccggccgaggcgtgggggctgcggggccggcccatccgtgggggcgacttgagcgttgagggcgcgcggggaggcgaggtgcggggccgggggcggctgggtcgtggggctccgcctgcgagctggctgtgtctgcg

SEQ ID NO: 42853 - DNA, 2300 bp, Homo sapien
aaacaaacaaaaaatacaaaaattagctaggagtggtggcacgtgcctgtagtcccagctactcgggaggctgaggcaggagaatcgcttgaacccaggaggcagaggttgcagtgagctgagatcatgccactgcactccagcctggcgacagagtgagactccgtctcaaaaataaataaaataaataagtaaataaataatattaaaagcccagccatgatgccctctaggcaaacatctataaactgcaccccctcctggtgccagtcatccaggcttccatctctgccttctcttgtcctcagagcataataacaggttggcatggaacagctgccaggttccatgcaagttgtgtggcactgatgctccagctgtctggtgagctgttatcattggcatcctcacagctgcagcttaataagggccccctgagcactaggcctgggctgtgccctacacaggcatttgatctattattatccccattatccagattagttaactgaggttcagagacgtggagggacctgggtcacgcagcttgtttaaggcccagattagactcctaatccactctctggtgctaccagggagagggcctgcttgttccccatgcctgcctcgaagattcctccccacaagggtcactctctgatcaccatcttcacaatagcaacaccaccctaccccgcccctgctttcttgctctgcagggcacgccatctaacagggccatcgttattgccctatttgcatattgtctgtctttttccactgaattgtcagccacatgtgggtaaggactttgtccgttttgctcactgctttatctctggagtctagcatagtacctggctcaacaaatacgcattaaatggatgagtaagtgaacagtctccaattcacagaccactttgtcagcagtgcccccacactgttcacagcgcagggaaatgactcaccgactccccatgagcacagtgtaggctagccttcccttcctagcctccaccgtgaatactaattaggtttcttaaatgcagagatggacggctgggctcagggccccatggtctgtctgtgtgaaagggtacgcagggtaggattgtaggagccctggatttgaatcccactgttttacgctgttttaccaccatcctgatgggttggagcaaagacttccactctctaggacaagagcttccaactctcccaagaagggccctccaggtgtcagggcctctgcacttgctggtcattcagcctggcatgctcttcccctgatctgcttgctgctggctccttctcatcattttggtctcttctcaaatgtcacttctgcagagaacacccccgactcctgccaagccaatgtgaactttccacacccacaaagataccttttttcaccctgtttatttcctccatccctcttactatgaattattttcatttttactatttcatttatctgcttacttatttactgtctgtctccccagcttgatgcaagatctatgagggcagaggccttggctgtcttattcgttgctgaatcttcagtgcctaggacagggcctggcttctagcaggtacctagtaaatatttgttgaattcatgttccaactttctccttctagaaacaaggaaactgaggaccaaaggcagaagaggacatgttggagatcagagtcaggatctagggatagaagccagcgagatgaaggggaactcatctcggagttctgacctctgaggtcaggaggctgtgacctcagaggaagcccatctgctctccaggcctgtttcctcatcggtaagatggagtgaaacatccagaccactctccaagaggcctggtactaggagtgagacccaacccattgacaaatatattctgcgcagcatccgcgcaccccagacactgctaaagcaccccaaaagccgcagaaggtgaaaactacgacacccatgatgccccggacggcgcctgcgcacggcggccggcccgcagcgccgcgggctccccctagcggcgtccgggagcggtgctcgctccgatccccgaggggcgggggccccgcggcgcaggcagtctgggcgcgcggctgcagcggcggagccggagtcggagccgggagcgctagcggcagccggatcgcagcctgcggggcccgccgcagccatgggcaaccgcggcatggaagatctcatcccgctggtcaaccggctgcaagacgccttctctgccatcggccagaacgcggacctcgacctgccgcagatcgctgtg

SEQ ID NO: 42854 - DNA, 2300 bp, Homo sapien
gcagtgcagagtcttggtcttttccaccatagaatccccagtgctgagacatcgtgcaccctccacaaatgtttgctaaatgactgaatgaattggcctcagttttcccttctgtaaaagggaagggggtgaagaaatagtatagacccagacaagttctagcagcatcccaggcagctgcaaggctacctccattgcagagttgacagcaggatcctcctgagcacccagaagcccgggtgggcctggggcagccctgatgcattttcctgtgaagcattttctgttggggattggctcctgggaagccccaggagacagaatggctgttactatgctcaccagtctggggactgagccctgttggagaggtcaggagcccttgagggagctggcaggctgagacagtggaacccactgagcctcagtttccctggccttctcactagctttcagaggatcatgaatgcttttctgcctactccttcacatcaacctaagccccctcccctgccctgggcctgcatctggacaccctgcacatcctcctgtggggacaacggccaagggcattggggtggagagggcagccagagggcccaggcctcctggggcacggtccaaaccttgctccaccactcaacaagcaagtactcgatgaaatctgctgtggtcagggatggcccctgcgtcatgggctccaggaaggcaggggctgggcatgcaggtccccaagcctaattggctatcagcgccccctcccgcatgtttacaaaagcacctttccacccatgaactcggtggagcccacagtcaccttctcaggaaggcagggcagcggctgtcagcgtttccattccgcagatggggaaatggaggcccacccacccacacgtccctgtgcctggtgcaggacccggctgtcagaggatgtgcagcgtcgagattaggaattgggctttggagtctaacagctgctgccctttctgaatgtgtgaccttgggcaaggcatctaacctccagggtctcagtttcctcatctgtaggatgggcatcatggtacctgcctcttgggagctcctgtgagcctatgaaggactcagcatagggggatgcatgggatgggctcagtagatgcgggctgaaatcaccagttggtcccctccctaccccaagcctgaagcacgcagcctggcatggggcaggagttcagccaacattcaaaggacgagaggtaggaatatggtttctccattctaaactgctggatatccctgactgctggcccttggggaaggggcccgtggtgtgtctcttgcctgtgtctctgcagctccgggggtcatgtgatcagaaggggggctctgcaggagccattggagagacagatgccttcccctctgctgaccagatgggcacggccgcccccacggtggccttccaacgtcccacacacacatggctccagtcaggccctctccctctcacctctagggctggcatgggtttcccaggacatttgaggggcaggaacaaccacccagtcccactgtccatgttagagatggggacactgaggctcagagagggcaagtgacttgcctgaggttttgcagcagaacctggcttggacagaactgctgtacctctgcggacaagggcccctgcctccctctcccatgtgccagtcacttttttggccctgaaggtcattggaagaaagcaagagtttctgaagaagatgggggggagatgaaagacggggtcagtgtaaactctctcacttcatcccccagtctgcccagccccccaacccacctccagtacctggagagctcctatctttcttctctctcctcagcaccagaaaaactatttctgcctccctttgggggtttgtggggagcctgcgggtcacgaccctgcctgccccgctaaacccacgaccctttgtctttgcggttgttcctctctccgccacctaggcctctcagcgccttgtgggatcagaggcgggagggggattaggttctgcaaatggctcccccctcccgccatccctgtcttagtcatctctgccctctgccgcctctccctccaacacgattcctctggccaggccaaggggagggcgacactgacaggcgccccccacccaggggccgtggcgaagcaaggggccggctgctcagaaaaggataagaagtggtttctcctcccctcttcccttcctcatcctgcagcccgcgcctcccccctcgccgcgctgcgcacggatggcggcgggagccgcagaggt

SEQ ID NO: 42855 - DNA, 2300 bp, Homo sapien
tgctacttgggaggctgaggcagaaggatggcttgaaccaaggagttcagttgcaccactgcactcctgggttattttagagaccctgtctctaaaataaataaaaaagaagttagagaccagcctgggcaacatagtaagaccctgtctctacaaaaaataaaaagattagctgggcatgatggcacacgcctgtagtcccagctacttaggtggctgatgtgggaggactgcttgagcctggaaggtcgaggctgcagtgagctctgattgtgatcacaccaccatattccagactggaagacagagcaaaaccttatcaaaaaaaaaaaaaaaaaaaaaaagcttggccaggtgcagtggctcatgcctgtaatcccagtccagtactttgggaggccgaggcaggtggatcacctgagatcaggagtttgagaccagtctcgccaaatagtgaaacccgtctctactaaaaatagaaaaattagccgggtgtggtggtgggcacctgtaatctcagccactcgggaggctgaggcaggagaatcacttgaacctggaaggcagaggttgcagtgagccaagatcacgccactgcactccagcctgggtgacagagcgagactccgtctcaaaggaaaaaaaagggagggtgggtggccaggcgtggtggctcacacctgtaatcccagcactttgggaggctgaggcgagtggatcacgaggtcaggagttcaagaccagcctggccaacatggtgaaactctgtctctactaaaaacacaaaaattagctgggtgtggtggcgggtgcttgtaatcccagctactcgggaggctgaagcagagaattgcttgaacccaggaggcggaggttgcagttagccaagattgagccattgcactccagcctgggtgacagatcgagactccgtctcaaaaaaaaaaaaagaaaattaaaaattaaaaaaaaagatgggattcacttgtccctccacagcatattgttgggaaaaaaaaaaagcaggtttcagaaaagaacgtatggtattttggagaaaaaataatatatgtgaatgataaaatctcaaaggcgtattcaccataggaatctttttattttctcttcacaaattttatttatttatttatttctttatttatttttattattactatttttttttttgagatggagtttcgctcttgttgcccaggctggagtgcaatggcgcaatctcggctcactgcaacctccgccatccaggttcaagcaattcttctgcctcagcctcccaagtaactgggattacaggtgcccgccatcacacccagctaattttttgtatttttagtagagacgaggttttaccatgttggccacgctagtctcgaactcctgacctcaggtgatccacccgccttggcctcccaaagtgctgggattacaagcatgagccaccgtgcccagcccacttcataaattttagtcatgctctaatcttttacagtgagtctgtgtgatttctttttcttttttttgagacaaagtcttgctctgtcacccaggctggagtgcagtggcacgatctcggctcactgcaacctctgcctcctggattcaaacgattcttatgcctcagcctcctgagtagctgtgattaaaggcatgtgccaccacacccagctaatttttgtatttttggtagagatgggatttcaccatgttagccaggctggtctcaaactcctgacctcaagtgatctgcctgcctcgacctcccaaagtgctgggattacaggcatgcgccaccatgccctgccgtctgtgtgatttttatgagcagaaaaaactgatcaacaaatatttggaaaggaaagctttggtctaaaaggaggaaactgatacttttgccttttttttttttttttttttttttggagacagaatttcgctcttgttgcccaggctagagtgcaacggcacgatctcagcttactgcaacctccacctcctgggtccaagtgattctcctgcctcagcctccgagtagctgggattacaggcatgtgccaccacgcccggctacttttgtatttttaatagagacggggtttctccatgttggtcaggctggtctcgaactcccgacctcaggtgatctgcccacctcggcctcccaatgtactgggattacaggtgcaagccaccgcaaccggccacttttgccttttgattggtttagtggatcataattatttttttccttataggcaaaactcacctttgcctatctttgt

SEQ ID NO: 42856 - DNA, 2300 bp, Homo sapien
agccctatgggaccaggtccagggagggaggcacggtccagaccagagctgtccaatagaaatatcatgaggggctgggcgcggtggctcacacctgtaatcccagcactttgggaggccaaggcaggtggatcacgtgaggtcaggagtttaagaccagcctggccaacatggtgaaaccccatctctactaaaaatagaacaattagccaggtgtggtagcgtgagcctgtaattgcagctactcgggaggctgaggcaggagaatcacttgaacccaggaggcggaggttgcagtgaaccgagatcctgccactgcactccagcctggccgacagagcgagactccatctcaaaaaaaaaaaaaaagaagaagaaatataatgaggggctgtgcacggtggctcatgcctgtaatcccagcactttgggaggacaaggcaggaggatcacttgagcccaggagttcaagaccagcttgggcaacacagtgagactttgtctctacacaaaaattttaaagaatagcgggggttggccgggcgcggtagttcatgcctgtaatcccagcactttgggaggccgaggtgcgcagatcacctgaagttgggattttgagaccagcctgaccaacatggagaaaccccatctctattaaaaatacaaaattagccgggcgtggtggcacatgcctgtaatcccagctactcaggaggctgaggcaggagaattgcttgaacccgggaggcggaggttgcggtgagctgagattgtgccattacactccagcgtgggtaacaagagtgaaactccgtctcaaaaaaaaaaaaaagaatagctggggttggtggtagcacgtgcctgtagtcctagctactggagaggctgacattggaagataactttgagcccaggaggttgaggctacagtgagtggtaatctccccactgtactccagcctggtgaaagagcgagaccctatctccaggaagaagaaaaaaaaaaacaactgagtagacaagagttctggtggcatgataggtcctaagtcccctcccggttctgtgaccttggtcagatgacttttcctgtggacctcagtgtcctcatctgagtgagaaaagcgcggtggggaggtgaatcttccagtctacgcagtgtaggagccgcgtctgaaaagccacaccagctcacagtcccagcagggcccggtggggcggccagggcggcacaggcatcaggtccccacctccttccctctttgcctactcgcagaccaaggagttcatcttctcggagctgctggccaacctgtactcgtgtggggaccagaacacgctgatggaggagtcggcggagcaggcacagcggcgcgacgagatgctgcgcatgtaccacgcactgaaggaggcgctcagcatcatcggcgacatcaacacgaccaccgtcagcacgcccatgcccccgcccgtggacgactcctggctgcaggtgcagagcgtaccggccggacgcaggtaccagggccggcccccacggccccaaagccccccagcccggggcccgcgggaggaatgccgggaccgggcagtggcgcgcccgcgtcaccggggtggctcccacctggagcgaggggcggagcttagagagggcggggcttgtcgcggggcggggcttgccgtggagagctggctgcaaggctgggtggagctggggcgttggcgccgctgggggcggggcttaagctccggcgaccgccttaggggtgcggcagggaggggcttgcgtgcatgggcgtggccagcactgggctggggcggggcctctgggtgggcggagctgctcatctcgcctctccttgttcctcgctccctgtcgccctcaggtcgcccacgtccagccccacgccgcagcgccgagcccccgccgtgcccccagcccggcccgggtcgcggggccctgctcctgggcctccgcctgctgggtccgccctggggggggcgccccccgtgccctccaggccgggggcttcccctgaccctttcggccctccccctcaggtgccctcgcgccccaaccgcgccccgcccggggtccccaggtgagtaggggctgaatgcggctggagaggctgccggacgggcgtggccgggagggaaatggggctggattccagagcatcggacctggccgccagaaccggccgtttctatcccaggcaatcggactctgggtgccggagccacgccacgtgtggccgagggctggcggagcctgcccccgagggagcgctgagtcc

SEQ ID NO: 42857 - DNA, 2300 bp, Homo sapien
agctgtaaattcgatcttggccaggtgtggtggctcatgcctgtaatcccagcactttgggaggccgaggcaggtgggtcaactgaggtcaggagttcgagaccagcctgaccaacatagcaaaaccctgtgtctactaaaaatgcaaaaaattagccaggtgtggtggcgtgcccctgtaattgcagctacttgggaggctgaggcaggagaattgcttgaacccgggggcggaagttgcggtgagctgagatcgtgccactgccctccagcctgggtgacagagggagactctgtctgaaaataaataaataaataaataaataaataaataataacaaaaattagccaggcatgatggcgcatgcctgtaatcctaggtactcaggagcctgaggcaggagaatcacatgaacccgggaggcagaggttgcagtgagccaagatggcgccactgcactccagcctgggtgacagatggagactccatctcaaataaatacatatatacatacatacgtacatacataaattcgctctctctccctgttccttccacccttaccaagtcctttttttttgagacggagtctcactctgttgcccaggctggagtgcagtggcaccatctcggctcactgcaagctctgtctcccgggttcatgccattctcctgcctcagcctcccgagtagctgggactacaggcacctgccaccacgcctggctaattttttgtattttttttttttttagtagagatggggtttcaccgtgttagccaggatggtctcgatcccctgatctcgtaatccgtccccctcggcctcccaaagtgccaggattacaggcgtgagccaccgcacccggccacccttaccaagtttttttaaaaacaaatgagaccagccgggtgccgtaatcccaacactttgggaagttgaggcgggcggatcacttgaggtcaggagtcaagaccagcctggccaacatgttgaaaccccctctctattaaaaataaaaaaattaggccaggcatggtggctcacgcctgtaatcccagcactttgggaggctgagacgggcggatcacaaggtcaggagatcgagaccatccttgctaacacagtgaaacctcgtctctactaaaaatacaaaaaaattagccgggtgtggtggcgggggcctgtagtcccagctacttaggaggctgaagcaggagaatggcatgaacccgggaggcggagcttgcagtgagccgaaattgcgccactgcactccagcctgggcaacagagactccatctcagaaaaaacaaaacaaaacaaattagccggacatggtggtgcacgcctatagtcccagctactcaggaggctgaggcaggagagtcacttggaccagggaggcagaggttgtgagctgagatctcaccactgcacttcagcctgggtgacagagggagactctgtctcaaaaacaacaacagcaacaacaaaatgagaccatgggcttggaaatgccttgaaaacatgtcaagtgtgattgagagtgaggaagtgttactgtggagtacttactgtagctgttgttactggttggccagctgctcctctgcctgctatatcctgacttaacctttctgtatttacagtacaacaaggagttaaccaaagagagagacgccctcaggctggagttatacaagaacacgtaggatgggggatggtgggatgggaggtctgggggccctcagcatgggtggtgtgctgggaggtggggggtacaggtaagcatgatgaggtagtcatagaggtgtgcatgtgtgcccagcaaagctctagtgccagctgtgccactgactcatggtgtagccttgggtaactcgtatcttttctctggcctgtacatgtgacttttgattcctggggttccttccagtgccacagttctgtggttgtggggcaagggtagagggtggatcaccaaagcagtcctttctgttcttcgttcattcctttctctactgcctctggccatagccaaagcaatgaggacctgaagcaagagaaatcagaattggaagagaagcttcgggtcctagtgactgagaaggctggcatgcagcttaacttggaagaattgcaaaagaagttagagatgacggaactcctgcttcaacaggcaagaggctgcagccccatgggtggtgggagcgccatccagctggggccatggtctagggatcatgcagggcatggggagactccagccaagagctggaaaatttgggtccttgtt

SEQ ID NO: 42858 - DNA, 2300 bp, Homo sapien
ggcagctttttttttttccccctgaaaaggcctgaatcagaaacacagccagtaggccaagtgcaatggctcacacctgtaatctcaacattttgggagaccaaggtggatcacttgagcccaggactttgagaccagcctgggcaagatggcaagaccatgtttctatagaaattagctgagcatggtagtgtgcacctataatctcagctactagggaggctgaggtgggagcattgcttgagcccaggaggtggaagctgcagtgaactatgattgtgccactgcaggggagaagggaagggaggaaaggaggagacaggcagatagctacattgtgcattgcccagacaactacttcctcatcaccatcctctgcccagtaggggcccagtgagggtcactctgcagcacagactggccttctggaagaacagtgcctttctcctccctgactttggcacaccttcctcctgcctgctgtggctgccacaggtcagagcctgctgctgtcttttgctgagctccagggagagcgaggtcctcgtgttcatgaaggaggccgtgcagcccctgctttgagctttggccatctgaaatgctgcctagcagcccaaggcctgggcaaccaatccacacccctgagtggctcctagcatgtgtgactgtcactctgactgcagcaacacctgtcctacctgttccacacccttgtgttcatagtactgaggcacctctcccgcatggccccctaaccccctgctctgttctgtgacagacacccaaggacaatgctgctactctacaaccatctgatgacaccgtgttacctggcggtgtcccttcccctggtgccagtctcactagcatggcggcatctcaggttcgtgcctcctccccctctgcccactgccctcctgtacctattatgcattatcttctcctttcacaggcagcttgttccctagggtcaagggcccttcctggggaccgggccgggggaaggctcagactgggcttttttccttgaggcctggggagattgaagattgttagaatgagtttgggagcttgactcaccccatcctgggtgattcttaccagaaattgaatgaccatctcacacgtttcttcccaaacagaatcatgatgctgacaatgtccctaatctcatggatgaaaccaagtgagtgtctcctgttggggcagcagtctctaggctgagagagtcagggaggccactgcccatgaccttctttcccattgagccacctgcacccctgacccctgtgtctccatccctaggactttctcatcaaccgagagcctgcgacaactctcccaacagctcaatggtcttgtttgtgaggtacctcaggaactgaggccgagagcggggtggggggaagggaactatgatagaaactgaagcagggattcacaagagagagggaagatcctgggaccagccaatgtgctgggcaatgttaaggaagtcgccttttccctgagccttctcccttgaagttgtgcacatgaaggagttggaccccatgactggttgcatcattgtatcctgctgcagaagcactggatgagagctgctcgggaggaaaggatggtggggaaataagaaccatgagagaagttggcacaaaggggttacgggacagagggtccaagttagaaaagaaaatgttgccaattgctggggaagaaacgaagttagagggcttagacactgaggggacagaacatctccatgtgcactctcgtctcttatagtctgcgacatgtgtcaatggggagggccctgcatcgtctgctaacctgaaggatctggaggtaagaggccctgggccgtggcccagtgaccctgcaggccagccctccaacctcctcccacagcgggggctgggtgcccctctgccagctgagacagcccacacaccccccaaccctaatgattgctctctctacctctccccccaatcctcctccaactcctcctctctgcatgcgcctcagagccggtaccaacagctagcggtagccctggactccagctatgtaacaaacaaacaactcaatatcacgatagagaaattggtaagagtccagtggggtcccctgattccatgctgctaatcctgggctccagtttccccttgggaccctgaagaaaggggcagggggcccctggtgccaagggcgaatggggagctggggggcccaggcctcagctggagggaccccagagcacggagcatgcagcatggctcttctgttgctgccctctt

SEQ ID NO: 42859 - DNA, 2300 bp, Homo sapien
gagctgataacatttccagaagtagggaataatggagagagaaaaaatatcttaatgggatgggacattttgaggagagtaggcttttttaaaaactccatcttggctacaagacttaaaataatgaaataacttggttgctcacaaaataatcatgctatgtgtgtcagaaagtcctcagaaaaatgctttttcagccaagtgcagtagctcatgcctgtaatcccagcactttgggagactgaggagggtggatcacctgaggtcaggagttcgagagcagcctggccaacatggtgaaaccccatctctactaaaaatacaaaaattagctgggcgtggtagcgtgcacctataatcccagctgcttgggaggctgaagcaggagaatctcgaactcaggaggcggaggttgcagtgagtggagatctcgccactacactccagcctgggcgacagagtgagactcccatctcaaaaaaaaaaaaaaaaaaaaattcccttcctctgagcattcttgtgtctaatcctagagatcagtgggaaccgaagatgccaggagggccctaaagcctagcagggtccattgctaggagtgccagccttccctcaaggctaatgcctggccagcaactgaacccttgctctgacctattagattcagttgtaggcattgtcaaggaaacaccaggttccatggtcacagtaaacttgcaaagatgcaaaggcagcttggctcatcttcagttccaccagcctctgcagcacttgctctaaggagggaagcagatttgggttttcagaagccagggctgaagggtccagtgagcgcgcagtcctttccctggagagaggtgtagtcacttctcccagacccagcttccgtggccaggccctggctccctggtgtttttctcttgtccagcttagctggtcagccagctttttccactgtctgcccatctggcttgtcagatattagaagatctctagaaccagaggcttgggcgaagagtaaggtcagagcctggagagaggctgggtggggctctgatcaagcaggtaggtccagttgggggcaagggagaggctccacatgaccccaagttctgaatcctaggattgtcctcaggtactattcccaggaaagaggccctacaacttccaagttgccaagagccacagggaagatgtcttacctctgttttcttgggtggtttcttggctgggtagatgtttttggaggtaagaggtcggggtgggggtgttggccatggtttatcctctttttacctccagagagttggagagagtcttctagttgggcagctttttttttttccccctgaaaaggcctgaatcagaaacacagccagtaggccaagtgcaatggctcacacctgtaatctcaacattttgggagaccaaggtggatcacttgagcccaggactttgagaccagcctgggcaagatggcaagaccatgtttctatagaaattagctgagcatggtagtgtgcacctataatctcagctactagggaggctgaggtgggagcattgcttgagcccaggaggtggaagctgcagtgaactatgattgtgccactgcaggggagaagggaagggaggaaaggaggagacaggcagatagctacattgtgcattgcccagacaactacttcctcatcaccatcctctgcccagtaggggcccagtgagggtcactctgcagcacagactggccttctggaagaacagtgcctttctcctccctgactttggcacaccttcctcctgcctgctgtggctgccacaggtcagagcctgctgctgtcttttgctgagctccagggagagcgaggtcctcgtgttcatgaaggaggccgtgcagcccctgctttgagctttggccatctgaaatgctgcctagcagcccaaggcctgggcaaccaatccacacccctgagtggctcctagcatgtgtgactgtcactctgactgcagcaacacctgtcctacctgttccacacccttgtgttcatagtactgaggcacctctcccgcatggccccctaaccccctgctctgttctgtgacagacacccaaggacaatgctgctactctacaaccatctgatgacaccgtgttacctggcggtgtcccttcccctggtgccagtctcactagcatggcggcatctcaggttcgtgcctcctccccctctgcccactgccctcctgtacctattatgcattatcttctcctttcacaggcagcttgttccctagggtcaagg

SEQ ID NO: 42860 - DNA, 2300 bp, Homo sapien
tggctgactgacttccgcagtggttgccgggatcgcgctgatgtggccccaaccccgcctccctccccgccccgcgatgtcggaagaaacccgacagagcaaattggccgcagcgaagaaaaaggtaaagtgcaccgggtcgcggccccccgacccagccccagccccactccgatggcaggaccatggccagagtctctgccactcctgaggcacaccgggctgggctccccacggcgcgtccgggctccctccaccaaagtcttgtcagccagccccgccccctcagccgcccagcccccgccctcgccagtcgcccccgggtgactttgggctggtgctcccggggctccccgctccagactcggccctcacctcctgccccccgaagtccgacctccctgggctctttgggctggcgtctccaaggacctaggaccccagcaattcagcccctgccctcgccagtgactttgggcccgtgactcccggggccccccgctccagactcgaccctcacctcctgccgccccaaaccggacctcccggggttctttggtctcgggtctccaaggacctgggtcctggccctgcggtcccctcccccatcgcggagcggcgacttggacgtcgcgctgatgttccccctaggagtggaatgtagtgacgtcacaatccccctcggaaccgtaattagttgcgcgagaccagtctttgatcttaggacccagtcccctaagtgttctcatcccgcttctggttcctctggtcacagcataaatttccagctggaaggggattggggactatgggacctaggagggagaggtttcaggctgccttacacccttaacatagacattgacagtgtgaaaagcctacacttcacccgtgaactgaaaacattggcagtatctctgggtggcaatgtgagaacgggattggtttggttttcccccaggcttctactctccagagagactttaacatttttttctgacttctccacctcatattcgaattctccatggttctgggaccagagtgcccttcagtggtctctggaatgagatctgcttatcttctgtggaacaggtcttgggaaactgaacttgacagcttgaatcttcctcatatcatctcaacctggggtacttggagtgccacaggataaatacggggcatctttctgaagcatcagtctccctttattctcttgagagagaaaaaacattaatgtacttagggatgacagtcacataaatttctaagagtataccagacttttctctgaaatgaggcttgggttgtcctctttctgttaaattcccaggttcaacagaaaggctgccttctgccatgtggatacattgatgtaaaagtttgagaggcattggtgcatttcttaacattaccaaacgtgtgaggatgtatgactctaaaccacacagtgtacagttcctgccgacttaatgttccggcccacattttaagatacatatttatttttagagagggggtgtcactgtgttgcccagtctgaccttgaactcctggccttaagtaatcctcctgccttagcctcccaggtagctgggactccaggcttgacttctccacctcatatttgaattctccttggtggagtggaatgtagtgatgtcgcagtccccctcggaaccgtaattagtgcgtgaaaccagcttttgatcttaggacccaatccctaagtgttctcatcccgtttctgggatgagaggtggaaaagtacctctgcctctggttttggcccctggcagctgctgatttgtggcaaaaccccagagcttggagtcagaagactgagtttaagttcaattcttgccttttttaagccatggtatcaatccctctcagtcactaagtgattgtgacaagaacttgtggagttgttagtggcattaaatcagatggtatataagagtattttggaaaaattgtaaagtaggatgtaactgtgggggcttgtagatctcatgaatattattgctcttcttttccacagttgagagaatatcagcagaggaatagccctggtgttcctacaggagcgaaaaagaagaagaaaataaaaaatggcagtaaccctgagacaaccacttctggtggttgccactcacctgaggatgtgagtcttggatggccaggctcctggggacagggggcccaaggggcagtagagggtaattgttatgattgtggaagaactgttgggtactgattaagagttctgggtttgtatcctacctgtccatctgcta

SEQ ID NO: 42861 - DNA, 2300 bp, Homo sapien
tgagagggattgataccatggcttaaaaaaggcaagaattgaacttaaactcagtcttctgactccaagctctggggttttgccacaaatcagcagctgccaggggccaaaaccagaggcagaggtacttttccacctctcatcccagaaacgggatgagaacacttagggattgggtcctaagatcaaaagctggtttcacgcactaattacggttccgagggggactgcgacatcactacattccactccaccaaggagaattcaaatatgaggtggagaagtcaagcctggagtcccagctacctgggaggctaaggcaggaggattacttaaggccaggagttcaaggtcagactgggcaacacagtgacaccccctctctaaaaataaatatgtatcttaaaatgtgggccggaacattaagtcggcaggaactgtacactgtgtggtttagagtcatacatcctcacacgtttggtaatgttaagaaatgcaccaatgcctctcaaacttttacatcaatgtatccacatggcagaaggcagcctttctgttgaacctgggaatttaacagaaagaggacaacccaagcctcatttcagagaaaagtctggtatactcttagaaatttatgtgactgtcatccctaagtacattaatgttttttctctctcaagagaataaagggagactgatgcttcagaaagatgccccgtatttatcctgtggcactccaagtaccccaggttgagatgatatgaggaagattcaagctgtcaagttcagtttcccaagacctgttccacagaagataagcagatctcattccagagaccactgaagggcactctggtcccagaaccatggagaattcgaatatgaggtggagaagtcagaaaaaaatgttaaagtctctctggagagtagaagcctgggggaaaaccaaaccaatcccgttctcacattgccacccagagatactgccaatgttttcagttcacgggtgaagtgtaggcttttcacactgtcaatgtctatgttaagggtgtaaggcagcctgaaacctctccctcctaggtcccatagtccccaatccccttccagctggaaatttatgctgtgaccagaggaaccagaagcgggatgagaacacttaggggactgggtcctaagatcaaagactggtctcgcgcaactaattacggttccgagggggattgtgacgtcactacattccactcctagggggaacatcagcgcgacgtccaagtcgccgctccgcgatgggggaggggaccgcagggccaggacccaggtccttggagacccgagaccaaagaaccccgggaggtccggtttggggcggcaggaggtgagggtcgagtctggagcggggggccccgggagtcacgggcccaaagtcactggcgagggcaggggctgaattgctggggtcctaggtccttggagacgccagcccaaagagcccagggaggtcggacttcggggggcaggaggtgagggccgagtctggagcggggagccccgggagcaccagcccaaagtcacccgggggcgactggcgagggcgggggctgggcggctgagggggcggggctggctgacaagactttggtggagggagcccggacgcgccgtggggagcccagcccggtgtgcctcaggagtggcagagactctggccatggtcctgccatcggagtggggctggggctgggtcggggggccgcgacccggtgcactttacctttttcttcgctgcggccaatttgctctgtcgggtttcttccgacatcgcggggcggggagggaggcggggttggggccacatcagcgcgatcccggcaaccactgcggaagtcagtcagccaccgcgcagctgtgcgacggagccagaggaggcgtaaccagggcgatactggagcgcagaatgggggcgtggcctcaaagatcaaagcccattggtcaatgagaaatatgaagcggaagggggcgtggctatgcagcggcgtggccagagggacctgtggcgtcacaacaaaagctgcgcacgcaaccgctgtccccgcccacctcgggagaggggcggggccggctttccttgggtgcgcgcgcagctttctgtgcgccagttcacactccgggtcagagttcctggcccggtgcacctgagaggtcgctctccgactcccgcgctggaccctcttgcgccattgaaccccctgatccgggggcctcggaccccagggctcaggaggtgggcgaggaacggactc

SEQ ID NO: 42862 - DNA, 2300 bp, Homo sapien
ttccagctatttgggacgctgaggcaagaggatgggttgggcctgggaggcagaggttacagtgagcccagatcgcaccattgcactccagcccgggcgacagagtgcgactgtgtctcaaaaaaaaaaaaaaaaaaaaaagagaaggaatgaattagcatgaatgagaaaggcatgatctgcagtgagttaccgcatggtcaaagacagtggataccaacccacttgcagagagaagctcaatcagcccagtgcttttggcaaactatggctgccaccccgtcatcgtcatctgagctcactgtgagttgcccttcaggccctgcctctgaccctgccatctctggagagccctctttgcaagcccaagcctgggctccccatctcagaaccatgtgcatacttgtcctggaattatttttttgcctgtggctcctggagggcagggggctatctggcatacacctgcattgcagcagttgctaaatcaatgaacaaataccaagtctttcccgatctaacttcttttttgtttttgagacttgtctagctctgttgtccaggctggagtgcagtggtgcaatctcggcttactgcaacctccaccttccgggttcaagcaattctcctgcctcagcctcctgagtagttgggattacaggcctgcaccaccacgctcggctgatttttttgtatttttagtagagacagggtttcatcatgttgggcaggctggtcttgaactcctgacctcaaatgatctgcccgcctcagcctcccaaagtgctgggattacaggtgtgagccactgcacccggccctcacgatctaccttaagagtggtggtagttgtagtggcaactccatctgggggatgagagaaggagtaggctgcgttttgggggtggcttgccagcgaagaggagagactattagcaacgaaaggagtggccagggtgaacgccaagcattttcctgactggggagctatgggtttgtttaaaggcagggctgggtgaggggtgaaaagagcgaggaggagagatggctggtgctggactggagtgaaaggcatctgaggagccaggagacaggatggggagggagaggagttagcctaggacaggacaggataacacttctttgaagactggcgggcatgaggaaaggaaggggagggattcgggaatgacctggcggttctcagtcgactgggagaagatatggaagagggccaagcggggattggctgctgttgggatggggagtggggccgggagcgcacaagggaaggtcgaggatgggaaagggggtgtgggggaagaaatactcacaggggatcggaaggccccgcggcaacttcgggtaagtcttggttcagtcctagagaggaatccgaggggaaagtctgattggacccacagcccgctgtgaggacggggtactgtggggatgcgggaggaggagcagttgggaagtaggagcgccagggactggatccatctggaaagggggcagacacgctctcaggatcagggtagagaccctctaggaagggggcgttctgagacgggggttgtctggagcactggatgggagtctttggaggtgatttctgggaagggagagtctggggcagggctgtgaggagtcaggaaagaaactgtggagtccgttcctcgcccacctcctgagccctggggtccgaggcccccggatcagggggttcaatggcgcaagagggtccagcgcgggagtcggagagcgacctctcaggtgcaccgggccaggaactctgacccggagtgtgaactggcgcacagaaagctgcgcgcgcacccaaggaaagccggccccgcccctctcccgaggtgggcggggacagcggttgcgtgcgcagcttttgttgtgacgccacaggtccctctggccacgccgctgcatagccacgcccccttccgcttcatatttctcattgaccaatgggctttgatctttgaggccacgcccccattctgcgctccagtatcgccctggttacgcctcctctggctccgtcgcacagctgcgcggtggctgactgacttccgcagtggttgccgggatcgcgctgatgtggccccaaccccgcctccctccccgccccgcgatgtcggaagaaacccgacagagcaaattggccgcagcgaagaaaaaggtaaagtgcaccgggtcgcggccccccgacccagccccagccccactccgatggcaggaccatggccagagtctctgccactcctgaggcacaccgggctggg

SEQ ID NO: 42863 - DNA, 2300 bp, Homo sapien
gcgtctcaaagtgctgggattataagcgtgagcccttgcaactggtctcttgatttattttgaaccactgaaaaatgcaaaaaccattcttaactcataggccacaaaaaacaagccagatgcggtggctcattcatgtaatcccagcactttgggaggccgaggcaggcggatcacttgaggtcaagagttcaagaccagcctggccaacatgatgaaactccgtctctactaaaaatacaaaaaattagctaggtatggaggcaggtgcctgtaatcctagctactcaggaggctgaggcatgagaatcgcttgaatctgggaggtggaggttgcagtgagttgagatggcgccactgcactccagcctgggtgacaaagtgagactccatctcaaaacaaaacaaaacaaaacaagcaaacacacacacacaaaaaaaaaacagtcttcagtcttcaggtttgacttgtggactgtagtttgctgaccctttttctattctgggactccaggtgagaaatgagaccctaggtagaagtcctaaggtaggggttttgggtttctgggaaagaataagtttatttatttatttatttgacagagtcttgctctgttgcccaggctggagtctggagtgcagtggtgtgatctcagctcactgcaacctccatctcccaggttcaagctattctcttgcctcagcctcccaagtagctgggattacaggtgtgtgccaccacacccagctaatttttgtatttttagtagagatggggtttcaccatgttggccaggctggtctcgaactcctgacctcaggtgatccgcccaccttggcctcccaaagtgctgggattacaggtgtgagccactgcgcccagccgaaagagtgatttttttactgaataaagttgcccaacaatggaactggttctggtaatgtgtccccatcactagatgtgattaaggcatgtgtcagggaatctagaggtttgaccagaaacctcaaaaacccgttggacttgtgatattcaatgactctattatatggtaacaataagaagtataatgtattgagtcgccactctgtactaggcattgtgttaagcttcccccaagtacaatcctcattgatatcaccacagtgctgtgagatgggtcctattttcatttcacaagggagaaaactgaggctcagtgttgacatttagtaacatggcctggattcaataggcccttaactaccctggactcttcccctagattcctcttaatctgtagaagtgtaaacacttctggctcattcctgcatttattctttcagtagttctttcctgagcagctagtgagttgacacacccaggttctgccttaaggagctcacagcctccattttcctccagggactcttcctcagtagagctgggcagggaaccccgcactcttgaccttcagtgttacgccagtcttcttagagcctctcactgggagactgatgataggcagagtaagaggcatcttgggctgccctttggatcccagggcactgaggatacagttcagggtcccagattccatgacggggaagcctgagagtctggcctgatgctagtttgggctccatgaggcccattctgagaacgaggtcaacatgcagcccaaagccatcctggggtggcatttagttgagaaaatggaccttgtttgtttctttccagtatgtggaccagcattcgcccatctcaaggttggcgtgggacatcggttggatgcccaggcttctggagtacttggtaggtgatgtgagaagcctgggggtacagtgataaggcttgagaaaagatcctgaagctaccaggagcccagcccacttcttacctggcacccacgtcccaccactcctctcctgccctgattcctgccccaaggctgatcagctggggagtggataggtgggacggaggtaatcacaggttaataccacagtcacccacctttattcagtgattcccacacatgacatagttcgaggccctttatgcacatttatttaccacaacaactttattaggtagatactatatgattttatggaagaagaaagtaggatttaggtgacttgttctgggtcccatggccagtgaatacccctggtccggagaaggaaaaccatcattgcatcatggggcagccaggcgcgtgactctggacctaatggccagggcctgcatgtggctgggtctggacacacaaagccctagtcatgagccatctgtgtccccagggtcaggtggtgcc

SEQ ID NO: 42864 - DNA, 2300 bp, Homo sapien
aattctcctgcctcagcctcctgagaacctgggattataggcatgtgccaccacacctgtctaattttgtatttttagtagagacggggtttctccatgttggccaggctggtctcgaactcccgacctcaggtgatctgctcgcctcagcctcccaaagtgctgggattacaggtgtgagccactgcacccggccttttgtattctcttgtagaagtagggtttccccatgttgcccaggctgatgttaaactcctaggctcaagtaatccaccgcctcagcttcccaaagtgctgggattacaagcatgagccaccaggcctggccttcccatatattttaaatcatctctagattacctttttttttttgagacggagtctcgctctgttgccaggctggcgtgcagtggcacaatttcggctcactgcaacctccgcctcccgggttcaagtgattctcctgcctcagcctcctgagcaactgggactacaggcgcctgccaccactcccggctaatttttgtatttttagtagagacggggtttcaccatgttggccaggatggtctcgatctcttgacctcatgatccaccctcctcggcctctcaaaatgctgggattacaggcgtgagccaccacgcctagctagattacttataatgcctaatataatgcctatgcatcaccttgagtggattcaacacagtactaggtgcacagcaaattcaagttttgctttttggaactttgtgtttttcttcccaaatactgccaatctgaagctggatcatgggatgtggaactcatggactcagaggcaactgtacttagtgacacgtgaaaattacctgaagttcaaatatgaatattcataaagttctattggaatacagctaggctcattcctttagatactgtctatagctgtttggcactacattggcagagttgagcagttccaacggaaatcacatggcctgaaaactaaaacattcagtatctggccctttccaaggaaatctgccaattcctggtctaatacctcactcctctgtggaccttcaagggcctggcacaggaatctgagcactgggacactgactcggctcagggatttcctgggaagtgacacacaggatcctgcttaaatctgccttacccagtggatggttgatgaaagagggtacgctggtggctgtgagggtcagctccttctcttcgctgccttccatggggcccagcaagaagcgaacacgctgtttaggagcgggaggcttcctggcattgagacctgaacacacagagataatatatacacacatacatacaaatatatgtacatataaaatattttttaagagacagggcctcgttctgtagcccaggctgaagtgcaatggcgccatcatagctcactgtaacgtcaaactcttgggctcaagcgatcctcctgcctcagcctccagagtagctgggattacaggcgtgcaccacgatgctgaccaggaatatcttgttctgtccaaacacttgggggattagacaacagggaagtatgatgtagaagacaaagcagaagcccatggtgcagagggcagtatagcagtagttaagaaacaggcggattcaaacagactctacaacgtagtaaccgtgtgacaaggaacaatactgagtcagtttccccctcggaaaacagaggaaagtgaggagtaagaaagcacagagaacaggcgtttgggaaagcgctctgcccaggtgaataggtcacgtgattttgttttggggtaaggaccagaagcggagatggacttccaagagaacgagagcgggaacgtgggtctggttcgaggcactcacccttcagaagttgtagctccactgtatcccgcaggtgcttccattttagccccgggggcttatagaccgcgaaaagcccatgcagccgcgacaagccagcagaccccatacttgaagatcacagcacccgctggacctggacggaagtaccgccaggccccgcccccaaatgtggtcctttccacgggcgccgccatgttccacagccggaagaggttcgcattttatagtcttcggggaaaaccggctgtggagaaggaaatagggcccggcgctgagtgagcgtggttgcgtgtcctttgcagacactttctggggcgaggtgacatggcgagagtcttggatcggtggacgtagacggtagacagttcgcgtgcgtttccttcgcctacttggcctacatgccttctgcccgtgaagcgatgtttcccctcga

SEQ ID NO: 42865 - DNA, 2300 bp, Homo sapien
gcttaggcatcagagatgctgggctacagtccaggtgtgttcactatctaggtgacctagtacaaattgcttcacatttctgttttgttttgtttttttgagacagggtcttgctctgttgcccaggctggagtgaagtggtgtgatcatagctcactgctaggactacaggcatgcagctagttttttaaattttctgtagagatgaggtcttgctatgttgcccaggctggtcttgaactttggccccaagtgatcctcccaccttggattcccaaattgctgggattacaggtgtgagccaccatgcctggcctgcttcacatttttcagcctcagtgtcttaatttgtgaagtgcagacaacacctttcttagctggttaatgtgagaaaccatgaaaatcatatatatataacacttagtggccaagtgtagcggctgacacctgtaatctcaacactggggggctgaggcaggaggatcacttgaggccaagagttccagagcagcctgggcaacgtggcaagacgccgtctctacaaaaaaattaaaaaattcgctggtcttggccgggcgtggtggctcatgcctgtaatcccaacactttgggaggccgaggtgggaggatcacctgaagtcaggagtttgagaccagcctgggcaacatagcaaaatcccgtctctactaaaaatacaacaattagccaggccgcacaggcctgtaatcccagctactcaggaggctgaggcacgagaatcgcttgaacctgggaggtggaagttgcatagagctgagattgcgccactgcactccagcgtgggccacagagcaatactgtgtctcaaaacaaaacaaacaaaaaaccactggggacatggagatatagtgtattttttgtttaagacagggtctcgctctgtcgcccaggctggagtgcaatggcgcaatcacaacttactgcagtctcgaactccccggctcaaatggtccttccacctcagcctgggaatacagccgcatgcaaccagccccaattaattcttgtatttttttttgtagagatggggattcaccgtgttgcccaggctggtttcaaactcctcagctcaagccatctgcccgcttcggccccccgatagggattataggcgtgagccactataatagcgcctagcctgtttttgttagtaggaataacagtacttcccagaactcaaaaatctaggaggcataagaaaaacactgtagaaccctagaatgttctagtcacacatccagcaaacatttattgagcatttactatgtgccaggcactatccagaaggctgcagatgcagtggaacgaggcagacatggtcctcgacctcggagttgactttctagtaggatattataaactgatcggtacttatgaatcatctatttagtctagatgttctcaatatggctgcatgacagattctcccaagtagtttaaagacagactttcggtttcacgcccatttctccctccactgcagattcagattcagattcagtgcgtttaggtgggatccaggaatctgcattttcataaacgttccgagtggttacgagctgcaaccaggtttgggtaccccgacctaggctatgttccagttacccacaggaaacggctccaagccgcccccacgggggcgaggcgcgggcggccttaccgtggcggtaggggttatagagcgccatcgccgcggagccggcggccaacagccctttctgcagcggggaggtggggaggtggtgcgagtatagcgggccggcgccgtcgctcctagcccggaggggcatttctgcggggcaagaaaaaggccgaggtcagaggagccgggcgccctcaggctccttcccgcctgcgcccagaacccggcgccacttgcctgccgcaggccgctgtaggcccgggagcccgcagagccgacggaggacagggcgcagcagagtcgccatggcagcgggcgtccgcggaggatgggcgggtacgaagaacgccgcgattctgtcaggcgacggagcgtcggaggggtcaaaactcactgaaaaaccgattctgacggcgtagcctacggcctttcgaggggaaacatcgcttcacgggcagaaggcatgtaggccaagtaggcgaaggaaacgcacgcgaactgtctaccgtctacgtccaccgatccaagactctcgccatgtcacctcgccccagaaagtgtctgcaaaggacacgcaaccacgctcactcagcgccgggccctatttccttctccaca

SEQ ID NO: 42866 - DNA, 2300 bp, Homo sapien
cagagcagtgaagcaaacttgctaattccacataactggtattaatggagatagtaatcaatcccagatcatgctcttcactgctgtactgtatccctttattccagggacattgctttccctacggtatggcaggtgtggcactctccagcccctccagccccaggcagggaggacaaggagagggggaaagggggtgtcccgactattggcaaactcattcactaactgaggctctgctatgtgccatccctttttttttttgagtcgctctgtcgcccaggctagagtgcagtggtgcgatctctgctcactgcaagctccgcctcccaggtacacgccattctcctgcctcagcctcccgagtagctgggactacaggcgcccgccacgacgcccggctaattttttgtattttttagtagagacggggtttcaccgtgctagccaggatggtctcgatctcctgaccacgtgatccgcccgcatcagcctcccaaagtgctgggattacaggcgtgagccacagcgcccggcccatcctttttgttttgttttgttttgagacagggtcccgctctgccacccaggctggagtgcagtggcgccgtctcggctcactgcaactcagcttcctgggttcaagcgattctcctgcctcaaccccccacgtagctgggactacaggtgcacaccacaacgcccagctaatttttgtacttttagtagagaggggttttaccatattaaccaggctggtcttgaactcctgacctcaagtgatccacctgcctcagcctcccaaaatgctgggactacaggtgtgagccaccgtgcccagcccaaccattgttttgtgtacaggggatataatggtgaactagacagccaagttccctgccctcatttctattctacttcgagaggtagacaataaaatagtttttaaaaattttcagggaaggcacagtggctcacatctgtaatcccagcactttgggaggctggcgggaggaccacctaaggtcaggagtttgagaccagtctgaccaacatggtggaaacctgtctctactaaaaatacaaaaattagctaggtgtgatggtgtgcgcctgtaatcccagctactcgggaggctgaggcaggagaattgattgaacccgggaggcacaggttgcagtgagctgagatcacaccactgcactccagcctgggcgacagagtgagactctgtctccaacaaaacaaaacaaaaaaattcatataaaaatacaggtaaaatgtttcaagtaattagaatattctggcactggtccatgcgtgttggctcatgcctgtaatcctaatactttggggggctgaagtgggcggatcacttgagcccaggagtttgagaccagcctggacaacatggtgaaaccctgtctctgcaaaaaatgcaaaaattagccaagtgtggtggtgtatacccatagtcccagctacctgggagggagtttgaggtaggaggatcagttgagcccaggaggtcgagggcggtgagccgtaatcacaccactacactccagcttggacaacagagcaagactctgtctcaaaaataaaaaaaagtataccagcactattgtcagcagttgggatacagtggacaaaaccagcaaaaagcctgcctttgtggaacttacattctagcagctatgaagagaacaagttagtgtgatagaagacagctttggtattgggaagggtacagccacttctgactgggtggtcagggccggctcctctgaggagacttggaaggtaaggaggagccaaccctgtggagagctgaggaggagcattctgagtagagggaatggcaagggcaaaggccccttgtgtttaggaaaaggaaggttgaccagtgtggccgcagaggagggagtagcagggagacagtgagtgggctggaaggggagccagggctgcgccctgtaggccaccagaaggaggagtctgtattttgtaataggagcagtaggaaacttgtggaaggttttgagcaggacagtaaagtgacctgatttgtaaaggaccttaggatccagttggcccatcttccctgtccctgtcccatcttccctccctcctgcaacacagatacatcccatcaaggcacccctgccaaatggcgagccagtctggctgatggaggtgaggggtctccaaaggttgccctagaacagtttctcaagccgggcatgttaatgtttaggctggatcactctttgttgtgggggcggtcctgagcctggta

SEQ ID NO: 42867 - DNA, 2300 bp, Homo sapien
gtccctgtcccatcttccctccctcctgcaacacagatacatcccatcaaggcacccctgccaaatggcgagccagtctggctgatggaggtgaggggtctccaaaggttgccctagaacagtttctcaagccgggcatgttaatgtttaggctggatcactctttgttgtgggggcggtcctgagcctggtaggatgtttagtggcatccctggcttctacccactggatgccaggagcacccccccgtcaagttgtgacaaccacagatgtctccagagattacagatgttccctggtgggcagttgagaaccactgctctgaatggttattgtccccgagacgatgttctgttcctcacagtctcctgcacagctaccttgacggggcgatcacctgcactattttaaaccatctctctcagatttcaccaggatgcaagtcatttcatcagtgggaaactcaccagggtgacctgcctcaagtgctacacagggagggacagtctgaatttcccccagtctttagccctgtcgctgtggaggggagggggtagcagggacaggactgctaggacaccttgctcagccacagccccacttgtaaccgcgctggcgattgtgacacttgtagagcaaggaaatcagcagctcatggaatgtgaaggagcacctttgtccccagagagatttagataaaggttcaaggtgaggctaccctcccctccctgaggctgattttggtgagaggtgtggtcatcttgtagtatcaagactacaggcatgggcttgagaattaggaggagcctgagtgagaatcctggctctcttcccagctttacaagcctggacaaatcctttgacctcgctgagtctcaggttcctcatcagaagtaagaggacctcccatatatcttccagggcacttatcggccttggtaatggatattaaggccactggctttggaatccagcagactttgtttcaaatgctgactcggccactttactagctgtgtgatcttgggcaaattactttatctctctgagccttgttttccttatttttatttatttatttatttttttgagtctcgctctgtcacccaggctggagggcagtggcacaatcttggctcactgcaacctccacctcctggcaattctcctgcctcagcctcctgagtagctgggactacaggcgcacgccaccaggcctggctattttttgtatttttagtataggcgggatttcatcatattggccaggctggtctcaaactcctgacctcaagtgatccgctggccttggcctcccaaagtgttgggattacaggcatgagccaccacgcccggcccttgttttccttatctatatctgcagtaataacagtatttacctccaagattgcaaggatgaaaggataatatatgtaaaagacaccctaggtgccggcacctggtggatactctatgatcaccttcagcttcacacagcaggctaaggccattctttgggaacaggaagaccaggctgttcccactgtgtatgggtgctgctgagtactcagaggcagtgggcagttaagaggagaagagttctgggatcagaaaagtgcccaggactggccttttattcatatgttcaagaggtgttcattcatccaggccctggatcaggctactggaggtaaaagaataagtgaaacagagccagtcctgcccttgtgtagcagacaggctgtctggatactgtccataaaaataaaatgtgatcggctgggcacggtggctcacaactgtaatcccagctctctgggaggcccaggcgggtggatcacgaagtcaggagtttgagaccagcctgaccaacatggtgaaaccctgtctctactaaaaaaaaaaaaaaaaattagccgggtgtagtggcacgtgcctgtaatcctagctactcaggaagctgaggcagaagaattgcttgaatccgggaggaggagattgcagtaagccgagattgcaccacggcactccaacctgggcgacagagtgagactccatctcaaaaaataaaaataaaaataaataaataaaatgtgagcacgtaggtaatttttaattttctgccagctactttaatagcaaaaagaaattaatttttttgctattaaaattaaggtggaatttttttgtttgtttttttgagatagagtctcactctgttgcccaggctggagtgcaatggtgccatctcagctcactgcaacctctgccttctgggatcaagcaattctcttgtctca

SEQ ID NO: 42868 - DNA, 2300 bp, Homo sapien
gcctggtggcgggcgcctgtagtcccagctactcgggaggctgaggcaggagaatggcgtgaacctgggaggcggagcttgcagtgagccgagatcgcgccactgcactccagcctgggcgacagagcaagactccgtctcggaaaaaaaaaaaaaatactccccacaaatctccacgctgaccctgtgaggtattattaattagtatgtcccattttttatatgtaagaacaaaatgaatcttgacctttcagctgagaaggcgaactcaatgctcatgcccataccactgcacattctgcctcctgatggtgatacccatgaaggatgtggtgctggaatttactcaagtccccaaaaggaggcaccctatattccagaagaaataggtccaaatccttatcagaccaaaatttcatctttatttttattattattagttttctgagacaggctctcactgctctgttgctcaggctggagtgcagtggcccaatctcggctcactgcaacctttgcctcccgggttcagtgattctcttgcctcagctcctgagtagctaggattacagacgtgcaccaccacgctcggctaagttttgtatttttaatagagacagggtttcgccctgttggccagactggtctcgaactcctgacgtcatgtgatctgcccacctcaacctcccaaagtgctgggattacaggcatgagccactgtgcccagcttatttttattttttgagacacggtcttactttgttgcccagggtggagtttagtggtgcaatcacagctcactgcagccccaagttccagagctcaagcaatcctcccacctcatcttcctgagtagctgggagtacaagcaagagctacctggctaatttttttttttttcctgtagaggcagagtctcactatgttgcccaggctggtcttgaactcctggctgaagtgatcctcctgcctcagcctccaaaagtgctgggattacaagcttgagccaccacgccagtcccagaatcttttttttttttttttttttttttttttttgagatggagacttgctctgtcgcccaggctggagtgcagtggcgcaacctcggcttactgcgacttccgcctcccaggttcaagcaattctcctgcctcagcctcccagggatctattaatgtttaaggacaagtggcaactgtggatgcccaacatggttacttaacaagaaaccaatttttcagaggccaagagtcccaacagggccgagaatctggccactcgcctatggctctggaggtggcatgacaaataagggtggcatgacaaatataggttaactgatttgttgcagggaccagagatcatagatggtgaagttaactaagggcctccaaatccgtgtcctttgtgccaacaggtgtgccaggctgctcacaagacaccatggtacgagaaaggatttctcgtagtcacctagacaccaggtttatggctgtgtcgcagcaaagttgggtgtgacttatgattttcgttctgaaccttatttgttagataggtcctggagtccttaaaacacgcaggtgaaagtcagggagtaggagccatcaaaattcgactctggtgggactcgaacccacaacctttgaatgaccacactaggctcagctagaagtccaatgcgctatccattgcgccacagagccggctgcggaacccggccgccccgctcacctctgcctgaaaccgccctcttagcgagcttctaggtgtggtgctgggtgtttgctgaactcggccggggcccgagagcgtgctccgggttttcggctgtggtgtggactggggtgctcttcctacatccgggcgctggggacagcagggggcaagggccggggtcggcagggaggaagggccggggtgaagcccgcctgtctcctcgcggactcgggggtctcctcggctgggtggggccgcgcggcgtggactacaactcccagcgtgccgcgcggcggcgccgcccgaagccgttgcgcgagcagggcgggctggggccgagcggcgtcaggcgcgctggggctgcgctgcgccgccggctctgtggcttgccggcttcggggaaggtgcggcaggcggtgctgcggcctggcacagcaggtttggggtgcgggaggcgggcggggtaggagcgcggcgggcggggccgggcggcgggcggggctggcggggcggccgggccatgcagggcgcagagccggctaaaccctgctgagacccggctccgtgcgtccaggggcggc

SEQ ID NO: 42869 - DNA, 2300 bp, Homo sapien
ccgcccccggcttttgcttttcgcgagggggagggggagatggtctcccagggcttcttgtggtccagaccattcccttttcctggcttggaggctctcaggccatttcacatttgtgaccttcatctactcccaagaacaggaaaactcggagaaaaacagtcccatcagatgtccccttgatcgagtcctcaaagctccaggaatagaacccaagagtcctagctcaacccagcccctgaagcacagtcaagtcattcgccttcccctaagccctagaccccaaagattcatccgagtggctgtgtgtgtctgtgtgatgggtggtggtgtcttcaaggtcctcctcgcctccctcaatcagctttgccccctgggcggtcacctttcaagcacttccaggctctaactcgttttctgggtcgccctctatagaccaacagacgcactgcgatacctgagtctatgggcagggaccaagcagggctccttttccagggagctgcccctttgacttggcctggtcatccacagaacctccctgggttctgggtggggagtcgagccagagactttttttttctttttttgagacggagtctcgctctgtctcccaggctggagtgcagtggcacaatctcggctcaatggaacctccgcctcccgggttcaagcaattcttctgcctcagcctcctgagtagctggggttacaggtgtgtgccaccatgcctggctaatttttgtatttttagtagagacagggtttcaccatcttggtcagggtggtctcgaactcctgacgtcatgatccgcctgcctcggcctcccaaagtgctgggattacaggtgtgagccaccactgccagcgagccagaggctcttaagtcagtacccacccccaggccatccggttttagggaccctggatgtcagaagagtgaactgtcatgttttggctagaaaagcctcttagaacacgtctcaggacaactcggtggtggccactgcgcagaccagacttcgctcgttctcgcatgcctcgctccgcttttcctccgcaaccatgtctgacaaacccgatatggctgagattgagaaattcgataagtcgaaactgaagaagacagagatgcaagagaaaaatccactgccttccaaagaaacgattgaacaggagaagcaagcaagcgaatcgtaatgaggcgtgcaccgccaatatgcattgtacattccacaagtattgccttcttattttacttcttttagctgtttaactttgtaagatgcaaagaggttggatcaagtttaaatgactatgctgcccctttcacatcaaagaactactgacaacgaaggctgcgcctgcctctcccatctgtctatctggctggcagggaaggaaagaacttgcttgttggtgaaggaagaagtggggtgggacgacagtgaaatctagagtaaaaccaggctggcccaaggtgtcctgcaggctgtaatgcagtttaatcagagtgccatttttttttttgttcaaatgattttaattattggaatgcacagtttttttaatatgcaaataaaaagtttaaaaacttaaaaaaaaaaagaacacgtctcactacacccattgcacagagggcagatactaaggtctaaaatgtgaaaaggtcttgcccaaggtcacttggagaatggtgggcagagatgggactatgagacgagaaccagcctcctgcttctcactcttggaattcctcacctcaagtgccaagcccctagcctgccccttccaggccaagcctggaaagggacccctgtggtcagtcacccaactcagtatggctaagccttaccacaggctgtccccttgggatcacagtggcctggctgtctgggctgggaggtaggagacctggagggttgggtgtttgggtccactaactgccctgtgtccgcaggccacaatgctgcttggagcctctctggtgggggtgctgctgttctccaagctggtgctgaaactgccctggacccaggtgggattctccctgttgttcctctacttgggatctggcggctggcgcttcatccgggtcttcatcaagaccatcaggcgcgatatcttgtgagtacctggcccagcctttcctggggtctgccacactacagtgagcttctggtcccccaaatctccccaggccagacctcatgttctctaccagcacagggcagctgagctgagttccagaacagcagcctctgctccacacccgtaccctggcaatagtacctggtccc

SEQ ID NO: 42870 - DNA, 2300 bp, Homo sapien
agctaggcttggtgacatggacctgtagtcccagctactcagaggctgaggcaggaggatcacttaagactaagaggttgaggctgcagtgagtgatgattgtgccacttcactctagcctggcagacagagtgagaccctgtctcaaaaaaaacaaaataaaaggccgggtgtggtggctcatgcctgtaaatcccagcactttaggaggtcgaggtgggcagctttgagatcaggagtttgagaccagcctggccaacatggtgaaaccccgtctctaataaaaatgcaaaaaaaaacctagccgagcatggtggtgcgcacctgtagtcccagctactcgggagactgaggtaggagaatcgcttgaacccaggagacagaggttgcagtgagccgagatcacgtcactgtgttccagcctggatgacagagagaggttacgtgtcaaaaaaaaagatacttacctgaagcactagcaacatggctgatgctaggtggcccctcagtacaatggtaatcatccttgtgactaattaggccgtatctagctcatctgtaaaatgggaacaaaattaattccccactttcctcacagagcctgcattttatttgctgccacattgggcacctgcaaagtactgaggttgctgctttccaagagcagctctaatctctataaagaccgagtgaggtagggatcttggttttatggatgatgagcctggagttcagaggggtttgtgaggagctcacccaagatcacacagttagtaagtggtagaactggggtttgatcttcagcttgatcacagcactctgttttttctccccacactgttgtggttgtgggataatgaatagggaagtcattaggatgctgaaagggggcctggcatggtggctcacgcctgtaatcccagcacttttggaggccaaggagggcaggtcacctgagctcgagagttaaagactagactggccaacatggtgaaaccctgtttttactaaaaatacaaaaattagccaggtgtggtggcacacgcctgtaatcttggctactcaggaggctgaggcacaagaatcacttgaaccaagtgagccgagatcatgccactgcactccagcctgggcgacagagtgaaactctgtcttaaaaaaaaaaaaaaaaagatgctgaaagggggccaggcacagtggctcatgcctgtaatcccagcactttgggaggccaaggcaggagaatctcttgagcccaggagttcaagacctgcctggacaatatagtgagaccctgtctgtctctatttaaaaaaagcaaaagaaaaaaaaaaaaaaagaaaggaaagaaaaaaatggtgctgaaaggggagagggaagaaggcagccagggaagaagagagggttgggcaaatcaagaggaagccaggaaggtggggccaagccgaccagcgctgctccatgcccgggggtgggggttatgtgatgtccgtgcagtgcgcaggggagcctgaaagcaggttcccgctctcggaaggggatggagggccactggcctctgacccgcactcctcccttctatctggtgcaccacagagtaagtagtgcgggatagtgggggggagcccagaccttgatgtgaggtagagctggcattgcacgccaggtccagcacattctagctgtgagcaggtcctctcattctcggagcgtcaatcttctcatctgtaagaggggctgtcaatggtccctccttcccagggctgtgagaccagggaatgcaggtaaagcggacctactctgtggttagcccatggctaatagaaccattgccggtgcccctgtcaacactgaaggcccagttgcttcactgcctctcctcctgcccagccagtatcctcagcaacatggccagccctgctgggagcagaggtccctgggaacatggggttttctggcctgcctgctgactgccctgtctccccacagccatctgtgaggtccatgccagcctggacccctcgctcagcctcttctgctctggctcctgggagcccggtgcggtgcctccaagcacagaacacctggaccctctgctgaaagatgctcccaagcaccttcccagttgccctgacaagggcttcacaggtgggctccatcccctccccatagaggggctctcacacaggccctggacagagcactggcctcagtgccagaaggaggcttttctggaaacttgccatgtgcctggaacatgtcacgtcacctccctttttccatctggaaaatggtgacag

SEQ ID NO: 42871 - DNA, 2300 bp, Homo sapien
ggaaaaaaaaaaaagaaagaaattatctgggtgtggtggcgtgtgcctgtagtcccagctatctgtgaggctgaggcacgagaattgcttgaacctgggaggcaaaggttgcagtgagctgagatcacgccactgcattccagcctgggcaacagagcgagacactgtctcaaaaaaaaaaaaaattagctgggtctggtggcgtgtgcctgtaatcccagctacctgtgaggctgaggcatgagaattgcttgaacctgggaggcaaaggttgcagtgagctgagatcacgccactgcactccagcctgggcaacagagcgagacactgtctcaaaaaaaataaaaataggctgggcgcagtggctcacgcctgtaatcccaacactttgggaggtgagtggatcacgaggtcaggagttcgagaccagcctggttaacatggtgaaaccctgtctctactaaaagtacaaaaagtagctgggcttggtggcgggtgcctgtaatcccagctacccaggaggctgaggcaggagaatggtttgaacccaggaggcaaaggttgcagtgagcctagatcgtgccattgcacatcagcctgggtgacagggcaagactctgtctcaaaataaataaataaattaatttaatttaatttaaaaataaaaataaacaggattagccaggcgtggtgcacatgcctatggtctcagctactgggaaggctgagacaggagaatcacttgagcctgggagtttaaggccagcctgggcaacatggtgagacctgtctctaaaaaaaattttgttttaggccaggtgtggtggctcacgcctgtaatcccaacactttgggaggccgaggcgggcggatcacgaggtcaggagatcaagaccatcctggctaacacgatgaaaccccatctctactaaaaatacaaaaaaaaaaaaaaattagccgggcgtggtggcgggcgcctgtagtcccagctactcgggaggatgatgcaggagaatggcatgaacccggaaggcggagcttgcagtgagccgagatggcatcactgtactccaggctgggcgacagagcgagactccgtctcaaaaaaaaaaaaaaaagttgttttaaattgaaaaaaggatgagcacaccagcctcacagtgtgtgtggcagtgtcccacggggcatctgggcctgtctcatttcagtttgtttccacagatatgcatggcattgctgcttgtttgtaggggcttaagggaagacagcttgaataaatatagctcctgccctccaggtgcttagagtcgggtgtatatgtgagtgtaggagagaggcagggagcaagagggcagcaccagggaagagcctggtgatggaagccggggaggcttcttggaggaggtcacccaaggcaggcagatgtgaggtgcagaagcctgcagggcagcacaagcctgcctggctggatggcagtatcactgatttggggccggggagggtcttcatctcgctgaccctcaggggccatccctctgcctccaggaaacatcgtgggaatcggccagtgcctgctgcatggcatgacggtggtgattcggaagaagttctcagcctcccggttctgggacgattgtatcaagtacaactgcacggtgagcgagagcgggaagggtgagctgtccctttcccctagttaccctcttcccaactacactccggggcatctgtcttatagctgaggtggccagtcattccaaagggctcatttgtggcaaagttcccattgttcagatgggaaggctgagacccggagagggaaaggatggcatggccagcccctggggagagtaggggcttgagggatcaggagaatcctagtgtagtgagggcagcctctggagcctcgaatcacaccaagttcacccccagattgtgcagtacattggtgaactgtgccgctacctcctgaaccagccaccgcgggaggcagaaaaccagcaccaggttcgcatggcactaggcaatggcctccggcagtccatctggaccaacttttccagccgcttccacataccccaggtggctgagttctacggggccacagagtgcaactgtagcctgggcaacttcgacagccaggtgcggccaggttggggatgggcgaggctgctgcagggatggcccacagaaggcactggatgcagaggggagggcagagttcgagcgtgagagtgtgggtgctggagtcccacttccccctcattgtccagttttgggcccatggtgagagagcccag

SEQ ID NO: 42872 - DNA, 2300 bp, Homo sapien
gggcagcctctggagcctcgaatcacaccaagttcacccccagattgtgcagtacattggtgaactgtgccgctacctcctgaaccagccaccgcgggaggcagaaaaccagcaccaggttcgcatggcactaggcaatggcctccggcagtccatctggaccaacttttccagccgcttccacataccccaggtggctgagttctacggggccacagagtgcaactgtagcctgggcaacttcgacagccaggtgcggccaggttggggatgggcgaggctgctgcagggatggcccacagaaggcactggatgcagaggggagggcagagttcgagcgtgagagtgtgggtgctggagtcccacttccccctcattgtccagttttgggcccatggtgagagagcccaggcccaagtcttggccttcgcaggtgggggcctgtggtttcaatagccgcatcctgtccttcgtgtaccccatccggttggtacgtgtcaacgaggacaccatggagctgatccgggggcccgacggcgtctgcattccctgccagccaggtctgccacttcggggtcagagagggaggggttggcctgggaaggaaggaggccaggcgcgtgtggatggggagccttgttctgaccagtggccatcagttatctctgctcttagggttacaagttactcatttatttgtgtatccatccattcattcattcattcgccattctatctgtacatcagtccattcattcattcttttttttttttttatttgagacggagtctcgctctgtcgcccaggctggagtgcagtggcgggatctcggctcactgcaagctccgcctcccgggttcacgccattctcctgcctcagcctcccaagtagctgggactacaggcgcccgccactacgcccggctaattttttgtatttttagtagagacggggtttcaccgttttagccgggatggtctcgatctcctgacctcgtgatccgcccgcctcggcctcccaaagtgctgggattacaggcgtgagccaccgcgcccggccaagcaattctcttttctcaccctcctgagtagctggaattacaggcaaaccccaccatgcccggctagtttttctattttcaatagagatggggtttcaccatgttgtccaggttggtctcgaactcctgacttcaagtgatccatccacctcggcctcccaaaatgttggtattacagatgtgagccaccatgcccggccctcattcattcattttcatattgactccaaatgaccctgagtccaggctgcttgagatttattctggctcagctccttagctctgtgtcatgggcgagtattcagcctcactgtgcctaagtccccttatctacaaactgtgcccatggcagcacccacacatggggctggcctgaggattatgtttcataaagaacataaaactctgagtgggtcccggcatggagcagaggcttggggcgctggctttgttaggctgtccccaaggagcctgacttatgttcatcctcccatcagtttcgagaacaaacatcactggctcagtgtgtccgacctgccaagatgagctcctgggctgggggagggtggggcatttctgtggcaagcagcatgactcaaatcagatcaagacacagagtacaggctgggagtggtggctcacacctgtaatcccagcactttgggaggccgaggcgggtggatcacctgaggtcaggagttcgagaccagcctggcaaacaggatgaaacccatctttactaaaaaataaaaaaaaaaaattagctgggcctgttggcgtgtgcctgtaatctcagctactcaggaggctaaggcaggagaattgcttgaacccaggaggtagaggttgcagtaagccaagattgcactgctgcactccagcctgggcaacaagagcaaaactccgtctcaaaaaaaaaaaaaaaaaaaaagacgcagggtacacctggtgacaggacgggtgggagaggctgcctagggcagatctgaccctgccttccccaccccaggtgagccgggccagctggtgggccgcatcatccagaaagaccccctgcgccgcttcgatggctacctcaaccagggcgccaacaacaagaagattgccaaggatgtcttcaagaagggggaccaggcctaccttactggtgggtccccagcccttcacagccccttcctgagggttgggggaggaggggaccttctcccacctccagaggacaccttcccaggactccc

SEQ ID NO: 42873 - DNA, 2300 bp, Homo sapien
ggctcactgcagccttgacctccaggctcaggtgatcctcccctcacagcctcctgagtagctgggacaggcacactccaccatgcctggctgatttttgaagaaacatttacagacatagggacttgctgtgttgcccaggctggtctcaaactcccagccagaagcagtcctcttgccttggcctcccaaagcattgggattacaggtgtgagtcgccacacccattccacctgaactcctagatcttaactattacatcattctgcccttaaccactaggctacaccatcatcctctaccaatgctgagttcagttttggaagtgttggtgtttagatacccataggccgtctacttcattccatttcttttttttagcgtctcactctgtcgcccaggctggagtccagtggcacgatctcggctcactgcaacctctgctgcttcctgggttcaagggattctcctgcctctgcctccagagtagttgggattacaggagactgccaccatgcctggctaatttttgtatttttagtagagacagggtttcaccatgttggctagactggtcttgaactcctgacctcgtgatccgcccatcgtggcctctcgaagtgctaggattacaggcataagccactgtgcctggccaacttcattccatttctgccctgggcttttttttttttttgagacagagtcttgctctgtcaccaggctggagtgcagtggctcgatgtcagctcactgcaacctccacctcccgggttccagcgattcttctgcctcagcctcccgagtagctgggactacaggcgcacgccaccacatccagctaatttttgtatttttttagtaaagacagggttttgccatgttggccaggatggtcttgatctcttgacctcgtgatccgcctgcctcggcctcccaaattgctgggatgacaggcgtgagccgccgcgcccggcctgccctgagccgccgcgcccggcctgccctgagcttttgcaacaggctccagtggtctccgtgtctctttccttattcccctcaaatcattctccatattgcagccagaaattatattttaaaacacaattctaaaatgtcactgtctcccaaaacccttcagtagtctcccactgctcctagagactgaaatgtttacctgcttacaaggcaggggttggcccctgagcacctttgcagctccctctctagatggatgaaagtcaggctccctaacttccaccttcctctccatgttccagcatgttctcacccagagcctctgggccttttgtcctcctcactggaatgctcctagaggtttctctcccctcacagccacctagtttactcaggttttagagcccagcaagtccagtctactcagttttctttttgaagttcctataacttcagttcctttatttaagtttgaggttgtacatgtcttagtatgcttatttgattacagttagtctccccgctagactgtgagtgccctaaaggcaggaaccttgcccatcccctttaccactagcaccgatcaaaatgcctggcacagggaggcgcaatgaacagctgttgaacgagtgacttccaaatcgacagcaaagggggcggctggatagcgagtcgcccgctcaggagagattctgggtcggaaataaagatctgggagtcatttataattccaaccagacgagtagatgggctggcccaagcggtgtgtagactgaagagattctaactcatgcaagataagcagctacgtggctcacggtcacgtcgcaaaaaacctgggggctctcctccgcctgcttgtggtcccgtacaaggcgcttcccaccctgggtctctgagcccagtcggtgaaagacggaaggagaccgattcacagccccaacagcgccggtgatagtccctctgccacccctttccctccgctgccctcccctcccctcccctcccctcgatgacttcctccaacagctgacgaagctggatccctgggcaccgcctcttccgtccgcggcacccggagacgcccggaaatttgcgggcgcgccggaagttgaggggagtttcctgcgagctcggcttcctcaacatggctgcgcccttgtcagtggaggtggagttcgggtgagtcacagagctggggcgccgtggggatggattgaagtcgtcgggcccagaattcctttccttctgccgtggggcctgacacggccgaatcactgggtgtcccagtgcccgctgtgagctacgctacccgcctagga

SEQ ID NO: 42874 - DNA, 2300 bp, Homo sapien
gagcaggggaccttggcagactcacggacggggctgaatccagctccacccggtaactgtgtgatcttggacaggtgtggccctctcccagcctgctttccccatgtggggaccacggaccaggttcattcacaggtaatgatggagccctcctacgtaccagctctgagctgagcatgggggcacgcggtggtgcatgggccacttggatcctgcccttgaccattgtggttaaatagaagagtaacaggcagcatttcccacccactacctctgggtcaggtcctgggctaatcacttcatctgcgtcatctcatcctttccataacaaaatcaaagatgcagaggcgtttttcctgtctccattttgcagctttggagactgctagactcttgagaggtccagtcacttgcccaaagccaggcagtctggaggcagcagagctgggattctagcccaggccgaccgtagccaccaggaggagtaattcgctaataaatacttggaaagaatcgagcacagaacctgacacagctccagactcagaactggtggtgtttactccatgcatagagtgtccccattccacaggtggggcgactgaggacagggagagaaagcctggggcaaaaagctccagggaacttaaacagtaacaccaacagcagttccagagtcaccagggctggccagagtgagacaggcagacttggtttcaaaccccaaaccccaactctggatgagcttggcaagtgatttatttagattctccgtgcctcagtttcaaggtttcctcttctgtaaaataaaaatattcccaactggccaggcatggtggctcacacctataatcccagcattttgggaggccaaggcgggcagatcacttgaggtcaggagttcaaaaccagcctggtcaacatggtgaaacctcatctctactaaaaatacaaaaattagctgggcctggtggcacgtgcctgtcatcccagctacttgggaaactgaggcaggagaattgcttgaaccagggaggtagaggttgcactgagttaagatagtaccactgcactctagcctaggcggcagagcaagaatccatctcaaaaaaaaattaaaaaaaaaagatttcctgacttcacagggttgtcgtgaaaatcaagttatataatacatttaaagcacttagcaggctgggcacggtggctcatgcctgtaatctgagcactttgggaggccaaggcaggtggatcacctgaggtcaggaattggagaccagcctgaccaacatggtgaaaccccatctctactaaaaatacaaaaatcaactgggcatggtggcgggtaatcccagatacttgggaggctgaggcaggagaatcgcttgaacccaggaggcagaggctgcagtgagctgagatcgagccattgcactccagcctgggcgacacagtgagactccatcgcccaccgcaaaaaaaagcacttagcagatgcctggtacacagcaaacggttaatgatagctatgattattattctgaataaggttaacatttatccctttgagcctcctgctgggttcacctgaggacaaggctctgtggagtggggcgggggttaggagttgttgaggggggtggggatagcaaaacttggtcttcttggggtccctagaagtcccgagatgggctagttctgtgggtcagggggaagcagaaggtatcagggctgagagagggaaggggctgcctgggcccagaggagttaacagctcccaggacctggctcaacagggctgccacgctgcagccacagcaacgattttagcggaggagccaggactgcttcctgatgggcaaaacagctggctgcccagagaaaacagctggcctggtcccagcctcctgagaacagaggcagagcctcagaggaggacagctgcacatctgggatcctgggagaggagggcatggccaaaagggagagagagggtggtccgtggaagtgtgtgtgggtgttgggtggacccccagaatggggggagctgagggcagattcctcgagcagagaccagggtgcgctaagtctaagcagaatgggcagagatgcctccagctgggctttgagggtgtcagtcttccctcaaataggaaagatgaggggcaggggaggatattggggacaagcctctgctcagccctgggtcctcttggaaccgggcttggagccggaggtggggagggtgtccaagctgagctcctggattcccatctgccgaactgcacccagaaccagga

SEQ ID NO: 42875 - DNA, 2300 bp, Homo sapien
caggcgcccgccaccacgcccggctatttttttctattttttagtagagacagggtttcgccgtgttagccaggatggtcttgatctcctgacctcgtgatccgcccgcctccgcctcccaaagtgctgggattacaagcgcgagccaccgcgccgtgccggccccgcttcttaataccctgacattaacattaggttttcaacatgtgagttttgagggtcacggacattctgaccatagcacccttggaccaataggacaggcagaggctgtggaatgactctggggtgggtgaagtagggaacactgctttgctttagaaagggaatccctcttctggggctgggagtggcttcccgcaggggactaccgtgcaagggagaagaaatctggcatctctccagaatgcttctcattgcagggccgctggcctagaaatggcctcaaatggaagctgccacccgatcctggtggaggctttgagctaggctagagatcaggactccagggttcagtgcgcacgtgctgcccctgcactaggtaagttccttcctctatggaccttcagccctccccttgcagtggagatagtgtgcacagccctggctcccctccctgaccctgggaaaaggctgaagggagaccccgtgctgttcctaggaaaggagatcttcccagcggtgggagggtgaagggggagcctccctctcctccagtcctgtcttcccagccccagggcggagctcttcctgtgtgtaagcctccacgcgggaaaagctgccagtgcattcattctctcgaggaatccctgcaaaccctcccagatgggtggcgttatcagcccgattttacccgagaggctcctgagggaaagggacctgtctgaggttggtgacagacacccagttcgatcccatctgtggtgccgccaggccgctcccttttctgctcctctcccgagaggctgcagagttctttccctcccagcagggtcctaaggaccccggcggtgctccaggggagccaacatcccctgctttggaggacggacgggtcgggtcgcagtgagcagctccgtggtgtcccctagttctacactcagaccaagagagggctgtgagggctgtgctctttttttttttttctttttgagacggagtctcggtctgtcatccaggctgtagtgcagtggcgcgatctcggctcactgcaacctccgcctcccgggttcaagcgattctcctgcctcagcctcccaagtagctgggagtacaggcacccgccacgacgcccggctaatttttgtatttttagtacagatgggatttcaccatcttggccaggctggtcttgaactgatctcaggtgatcctcccgcctcggtctcccaaagtgccgggattacaggcgtgagctaccacgcccggcctggctgtgctctcttaaagggccgaagcaatgcgggtgctggcgaccgacgcaaggaggtgacgcacaggggacttaaggagcggaccgccgcgggaggacgcgcccagctcagggggactccctctgcgccccccacgctgggtctccggcccacgcgtggcccggctggtctgcggagctagcgccagggccgccagagggcgcccggggcggaggatggggcgggagccggggaagcccgggaggtggtggccgagtgggcgccgcccctctgggtctgcggctcaggtcgaagagtcggctgcgtgggccggggaatccggattccgggggttcaacgcccaggggttccatgagcccctactgttctcggacgcccggccggccccgacgcactcgtcctagcacccctcccctgtccggtcctccggcccctccgccgtcgcccctccggggtccagccgggcggggctgctccagggtcgcggctggcgcgggtccccgggccctggccctccggtgccccgggccaaggagagaaaacttgagcatccacgcacaggggtggggagcaggatcccactctgagggtgcactgccccgccctctccgggtctgcctcggccccgcccgggccccaggccccgccccctcccctcggccggcccgagagctccgggggccgctgcagccgcccaagcgcccgccatgcgcgctgcccgcgccgcgccgctgctccagctgctgctcctgctggggccgtggctggaggctgcgggcgttgcggagtcgccgctgcccgccgtggtccttgccatcctggcccgcaatgccgaacactcgctgccccactacctgggcgctctgg

SEQ ID NO: 42876 - DNA, 2300 bp, Homo sapien
actctgagggtgcactgccccgccctctccgggtctgcctcggccccgcccgggccccaggccccgccccctcccctcggccggcccgagagctccgggggccgctgcagccgcccaagcgcccgccatgcgcgctgcccgcgccgcgccgctgctccagctgctgctcctgctggggccgtggctggaggctgcgggcgttgcggagtcgccgctgcccgccgtggtccttgccatcctggcccgcaatgccgaacactcgctgccccactacctgggcgctctggagcggctggactacccccgggccaggatggccctctggtgagagacccgggcattggcaccgagtgggcacctaacccccagcttcgcagatggcccccgcccccggcggccctgtctgctcgctccctgcccagacaccacctagacaggcccctcccctcacagacggccctgccagcccgagccgccagagaggaccccgagccccctgctgggagacgacagacctctgaggccacaggccgacgcgggacacccacccctccttctggtcccctactccttcctcttggggccttccctgggtgtaggttgggcccagccagcccttttcaccccagccttcagggcccagctcaaccccagtgggacctgtggttggctggatttgaagaggagcagacaggaacctctgaagtccactggggcccaacgtggcagggatcgaccacgctggaggcttccgggcacaggttgggggtgccatcagcactgggctccgggctgtgcaggggagtcagaccggcccccccaccgcccccgtgctggggccagctctcttggtagatcttggtagaggggcgggatcctgtcagccaagggcagtcccccttcctggagcctctcccctctggcatctctgtacccccagggcactgggatcgaaggccacaacccctggtctgtagacaccagaacagggaggagtccctggctgaggttgggggtaaactgagaaaaatgacaagccaccctcttcaacacaccacagttgggctgggggggtggagccctggcctggggaggccgcccacaattaccacagtttgggagtttgttagttcccacccctgtaagacttgacacgtagtcttcatttctggggaattggcttaaaggggcagcatcacccaaaacctgggcacttggctaaacccccacctctgttatgggggccccttccccaggagaggggaggctgtgccccatgacagcagagcttggacccatctgcattcttagggacgcttagagcatggtttggtccttattacaacctgggggtggaggaaagcagcagctcttctgtctagtccccattcagagagggacaggggctggcctgtggtcacacagccacaggtcacataggtaggtatctgcccacctaacgaaggtaaccagggaatgcaccaggtgtgatccttaaagtcgaggtacttttcatctttcaaaatgcattcgttggccaggtgtggtggctcacgcctgtaatttcagcactttgggaggccgaagtgggcagatcacctgaggtgaggagttcaagaccagcctggctaacatggtgaaaccccatctctactaaacaaacaaaaattagccgggcatggtggtgcacacctgtaatcccaggtactcaggaggctgaggcaggagaatcacttgaacccgggaggcggaggttgcagtgagtcgagatcataccactgcactacagcctgggcgacagagcaagattccatctcaaaaaaaatgcattattcttctcttatctttgtccatgacataagcaggacagcttaagttatagagggaggacgtgaagcccagagaaagatgggacttgcctgaggtcacacagcaggtcacagaactgtggtggggacctggctgtgctgcctccagcctctctgctgtagcacacctacccttcactgttccaaggagagctcgacctcaaaggtgttagtgctttggggtcaaggctgccttggggttcaatcctgtggctgtgccccctcagccttttttcttcccgtccccaggtgtgccacggaccacaatgtggacaacaccacagagatgctgcaggagtggctggcggctgtgggcgatgactatgctgctgtggtctggaggcctgagggcgagcccaggtggtgatctgaggggaagggtgctggggaagatggagaacagctgcagcccagagaggaaaagggacagcc

SEQ ID NO: 42877 - DNA, 2300 bp, Homo sapien
gtaattctttgttttgtgctggagaagtctgcagtgtgcagacatgcaagaagaaatcttaccaagtgcaaaaagtgagtgaaggtgaaacaattggaggggaaaacacaagaggaaacaaaagcattctgttatttttaatttgctagccctacttcaagcgacagccgttgttaattggtcaatggtttgaaggaattcagtctctaacagccagatactacatcccggctctgggccaggctctgtgctcaatgctgggaatagggttagcttttatttgttttttgtttgtttttttttaagacagagctttgttctgtcgcctaggctggagtgcagtggcgcgattttggctcactgcaacctctgcctcccgggttcaagtgattctcctgcctcagcctcctaagtagatgggattacgggcggccaccaccacagccggttaatttttgtatttttagtagagatggggtttcaccatgttggccaggctggtcttgaactcctgacctcaaatgatctgcctgcctgggcttcccaaagtgctgggattacaggcgtgagctactgtgccccgcctaggttagctttttaattggcactgtgtgcctgcccctgaggataattataataaaggtaacaaatattggccgggtgcagtggctcacgcctgtaatcccagcactttggatggcctagggtgggtggatcacttcaggccaggagttcgagaccatcctggccaacatggcgaaactccgtctctactaaaaatacaaaaattagctggatgtggtggtgcacacctgtattcccagctactcaggaggctgaggcaggagaattgctcaaacctgggagacagaggttgtaatgagccaagatcgcaccattgcactccagcctcggtgacagagcaggactccatctcaaaaaaaaaaaaaaggtaacaaatattgaagccgggggaaggccactctggctgccaggtgaaagacatcgtggagaggagccccagagggtgtgaggtgaagtggaggggtgtggggaaaaggcgatggcccttggatccaggtggggtggtggggatcaggagaggtggggggatttaggagacagagcagtggggctcactggcaccctgtggctgtgatgggtaggagtttgtctgctcctgcctcaccttgatgccctgagggcagggactcagtcttgctcactgccgtaaccctggctcccagcgggtgccctggacaggtatattgaatgaatgaaccatttcagtagaaagaccccttagatattgtgtgagccaagccctttctccctctggtcccacaggtggggaaactgagtcccagagaagactgacatgttgggtcactggcagtgctgggcctaggacctttcagctgggttctgagagccccaccctccactgcagctctcactcagcctgtctctgcaggggtctccgtccacgtgtgcaatgagcaccgttatgggtacatgaatgtgccggtgaaatcccaccaggggctggaagacgagagggtcaacttcatccacctgatcttagaagcactaggtgagggctggggaactgttccacccacctgctgccggggctccctgcctccccacggtgcccctttccctaggccctggacggagcgggcattggccttggggttccagctttgtccctaactcgttccatgactctgagaaagtccctttccctgttgggccttagtctagcatccctacaatgggggcaggtggatcctgtgatctctgaggtcccgtcctgtggggtgttctgccaaagggggcaggaatgaggctgggggctaggacttcagggtgactgctaacaggagtcagtagggactcgtgcttggggtgtgcttccctttgcagtggacggcccccgcatgcaggcctcagctcatgtgactcggccctctaagaggcccagcaagatagggtttgacgaggtaagtcccccagcctgtgggctcgctgttaggaggtggatgggccctcctcttccgctcccttgcacttaccgcccacccccctgcctcctccaggtctttgtcatcagcctggctcgcaggcctgaccgtcgggaacgcatgctcgcctcgctctgggagatggagatctctgggagggtggtggacgctgtggatggctggtgagcctgcctggtggggggggccctgtgcgcttggggaagcagtgtggtccatctcctagcccgctaggactgggaaaagcagacaggt

SEQ ID NO: 42878 - DNA, 2300 bp, Homo sapien
gtgattctcctgcctcagcctcctgagtagctgggactatagtcgccggctgccacgcccagctaatttttgtacttttagtagagacggggtttcaccacgttggccaggctggtctcaaattcttgacctcaagtgatcaacctgcctcggcctcccaaagtgctgggattacaggtgtgagccacagcgcccagcctagagtgaaatactgaaaaccctctcatggttttccaggcttctgagggatgaagtccaacaccttaggctggcctatcagacgctgcatagtctggtcctgctgactttggcaggatttctctcatcgctggccctgtaacacttcaagggactgcagtgatgatgcttcatagaatatgcagtattctcttgtacctgcatgtggtacctgtgtacctactgcagtctgtttagaattccctttgctgcttgtttggcgaacttccactcacctttcatggctcagttccaataccatcacctctgggaaccatctcctgcctgccccaggaggaccgggacctccttttcctgtcctcttttccttgaacctgtatatacttttttttttttttttttttttttgagacaagagtctcactctgtcacccaggctgaagtgtagtggtgattttggctcactgcaacctccgccttccaggttcaaggaattctccctgcctcctcctccctagtagctgggattacaggcacacaccaccatgcccggttaatttttgtatttttagtagagacggggtttcgctatgttgggcagtctggtcttgaacttctgaccttaggtgatccgcctgcctcagcctcccaaagtgctgggactacaggcgtgagccaccgcagtcttaaatggttaatgaggattaggaaatctatcaattattcaacagagagacaatgaatggatcaagggattggggagctccctgacattacagaacaaattcagtatgcagtatactgtgaaagcgaggcggaaaagcaggttttgtttgcgagtctgactttaggattgcaggtgaaacacttgtgtgaccctggagctgtgtggctaaggtgctgcggggtcactggagaaaggtcaagggactgtggcccagttggcccggaggtggttcaggtctcccagattccagggcggcattatgagccacgtgacagacctcccctgactggctgacagtgaagcataattgagaagatggcggaccagcaaggacctcatcagaataggtctgtacacagagcggcatagagagtgcaggagggtagtagaccgggcgcggaggctcaagcctgtaatacaagcactttggaaggccgaggcgggtggatcatgaggtcaggagatggagactatcctgcccaacacggtgaaaccccgtctctactaaaaatacaaaaaaaaattagccgggcgttgtggcgggcgccagtagtcccagttactcgggaggctcaggcaggagaatggcgtgaacccgggaggcggaggttgcggtgagccgagatcgcgccactgcactccagcctgggcaacagagcaagaatctgtctcaaaaaaaaaaaaaaaaaaaaaaaaaaaaaaaaaaaaaaaagtgcaggaaggtagtgaacagaacagcaaggggaatgccgaccctttctcctgttggggccaagacagaggcgatgtgggcaggggagaggccggggaatgcgcagaagccgactccatctccgcattaatagtggactaggggcagggctggattttcggaggcagtgtgcagctcccaataactagttccatgggtcctctgtgagcctagtttcctggtgggtaccgaggggagggcgtcggaaccgtacgctcctttgagtgaggggaatccgggaggatccaaggcaggggaaacagggccgagcgggaaaggccttgaatggggggcgagacccggccaggcccgctggacgcgtagcacgtctccttggtgacgggacgcgtggcccggaagtgggcggcccttctggcggggcggggcatctctgtgacgctaggggctgggcctcgatggcgaaacccaagcggctcccgggggggtttgaactggccaatgggcgagctgccgaccgggtgtcggaaaaggaggcggaagcggggaggagccgctgccagagccagactgcatccgccgcggcgtctccatggcacgaccctggcctccgacttcaacgacttcataaggcggcgtttctgggcgcagccgtgtcgctcctgg

SEQ ID NO: 42879 - DNA, 2300 bp, Homo sapien
ggcgaacttccactcacctttcatggctcagttccaataccatcacctctgggaaccatctcctgcctgccccaggaggaccgggacctccttttcctgtcctcttttccttgaacctgtatatacttttttttttttttttttttttttgagacaagagtctcactctgtcacccaggctgaagtgtagtggtgattttggctcactgcaacctccgccttccaggttcaaggaattctccctgcctcctcctccctagtagctgggattacaggcacacaccaccatgcccggttaatttttgtatttttagtagagacggggtttcgctatgttgggcagtctggtcttgaacttctgaccttaggtgatccgcctgcctcagcctcccaaagtgctgggactacaggcgtgagccaccgcagtcttaaatggttaatgaggattaggaaatctatcaattattcaacagagagacaatgaatggatcaagggattggggagctccctgacattacagaacaaattcagtatgcagtatactgtgaaagcgaggcggaaaagcaggttttgtttgcgagtctgactttaggattgcaggtgaaacacttgtgtgaccctggagctgtgtggctaaggtgctgcggggtcactggagaaaggtcaagggactgtggcccagttggcccggaggtggttcaggtctcccagattccagggcggcattatgagccacgtgacagacctcccctgactggctgacagtgaagcataattgagaagatggcggaccagcaaggacctcatcagaataggtctgtacacagagcggcatagagagtgcaggagggtagtagaccgggcgcggaggctcaagcctgtaatacaagcactttggaaggccgaggcgggtggatcatgaggtcaggagatggagactatcctgcccaacacggtgaaaccccgtctctactaaaaatacaaaaaaaaattagccgggcgttgtggcgggcgccagtagtcccagttactcgggaggctcaggcaggagaatggcgtgaacccgggaggcggaggttgcggtgagccgagatcgcgccactgcactccagcctgggcaacagagcaagaatctgtctcaaaaaaaaaaaaaaaaaaaaaaaaaaaaaaaaaaaaaaaagtgcaggaaggtagtgaacagaacagcaaggggaatgccgaccctttctcctgttggggccaagacagaggcgatgtgggcaggggagaggccggggaatgcgcagaagccgactccatctccgcattaatagtggactaggggcagggctggattttcggaggcagtgtgcagctcccaataactagttccatgggtcctctgtgagcctagtttcctggtgggtaccgaggggagggcgtcggaaccgtacgctcctttgagtgaggggaatccgggaggatccaaggcaggggaaacagggccgagcgggaaaggccttgaatggggggcgagacccggccaggcccgctggacgcgtagcacgtctccttggtgacgggacgcgtggcccggaagtgggcggcccttctggcggggcggggcatctctgtgacgctaggggctgggcctcgatggcgaaacccaagcggctcccgggggggtttgaactggccaatgggcgagctgccgaccgggtgtcggaaaaggaggcggaagcggggaggagccgctgccagagccagactgcatccgccgcggcgtctccatggcacgaccctggcctccgacttcaacgacttcataaggcggcgtttctgggcgcagccgtgtcgctcctggtgagaggccgccggcaggcgggatccagcgccctccggggcaccgcgggcgagaccgtcgccttcgcacccccggcgcggtcgaccccgcggggccgtcgggtcctgggttccccgccgcgttgcgctcgtccccctcctgtcagaacctgggcccccgccccgcccaccggcgcggggcctctcctcctcccgctaacgggcggtcggccgcctccttcctctcttggctaccacggggctctgcccctcctctgccgcccgcgggcagggcttcacctttctctctatgggcagaaaccggtaccctcctgcctgctggtgggtggccgtcccttctctccgccgacagaggctctccctcgctctgctgcccgtcggcggcatcgccccgaccgcctcgtcctctcctcgggcctccacatggcagtcacttgtacgccctccgtaggcagcg

SEQ ID NO: 42880 - DNA, 2300 bp, Homo sapien
gattggggagctccctgacattacagaacaaattcagtatgcagtatactgtgaaagcgaggcggaaaagcaggttttgtttgcgagtctgactttaggattgcaggtgaaacacttgtgtgaccctggagctgtgtggctaaggtgctgcggggtcactggagaaaggtcaagggactgtggcccagttggcccggaggtggttcaggtctcccagattccagggcggcattatgagccacgtgacagacctcccctgactggctgacagtgaagcataattgagaagatggcggaccagcaaggacctcatcagaataggtctgtacacagagcggcatagagagtgcaggagggtagtagaccgggcgcggaggctcaagcctgtaatacaagcactttggaaggccgaggcgggtggatcatgaggtcaggagatggagactatcctgcccaacacggtgaaaccccgtctctactaaaaatacaaaaaaaaattagccgggcgttgtggcgggcgccagtagtcccagttactcgggaggctcaggcaggagaatggcgtgaacccgggaggcggaggttgcggtgagccgagatcgcgccactgcactccagcctgggcaacagagcaagaatctgtctcaaaaaaaaaaaaaaaaaaaaaaaaaaaaaaaaaaaaaaaagtgcaggaaggtagtgaacagaacagcaaggggaatgccgaccctttctcctgttggggccaagacagaggcgatgtgggcaggggagaggccggggaatgcgcagaagccgactccatctccgcattaatagtggactaggggcagggctggattttcggaggcagtgtgcagctcccaataactagttccatgggtcctctgtgagcctagtttcctggtgggtaccgaggggagggcgtcggaaccgtacgctcctttgagtgaggggaatccgggaggatccaaggcaggggaaacagggccgagcgggaaaggccttgaatggggggcgagacccggccaggcccgctggacgcgtagcacgtctccttggtgacgggacgcgtggcccggaagtgggcggcccttctggcggggcggggcatctctgtgacgctaggggctgggcctcgatggcgaaacccaagcggctcccgggggggtttgaactggccaatgggcgagctgccgaccgggtgtcggaaaaggaggcggaagcggggaggagccgctgccagagccagactgcatccgccgcggcgtctccatggcacgaccctggcctccgacttcaacgacttcataaggcggcgtttctgggcgcagccgtgtcgctcctggtgagaggccgccggcaggcgggatccagcgccctccggggcaccgcgggcgagaccgtcgccttcgcacccccggcgcggtcgaccccgcggggccgtcgggtcctgggttccccgccgcgttgcgctcgtccccctcctgtcagaacctgggcccccgccccgcccaccggcgcggggcctctcctcctcccgctaacgggcggtcggccgcctccttcctctcttggctaccacggggctctgcccctcctctgccgcccgcgggcagggcttcacctttctctctatgggcagaaaccggtaccctcctgcctgctggtgggtggccgtcccttctctccgccgacagaggctctccctcgctctgctgcccgtcggcggcatcgccccgaccgcctcgtcctctcctcgggcctccacatggcagtcacttgtacgccctccgtaggcagcgctgtcccccgggcaccgtctccggcttgccagggccctcgcccggcgggggggggtcccgcccgccccctcccagcccggcgtctatcctgctcagaactctgttcggttttccctcgcggcggggcgcccggggcccgtgcaacctccgcgcctccctcctttaaacactattggtcctctcgggcatctgttcttccgtaacgccccttctcctaggagacagttgtccggccccgccccagcatccccgcggctccctgcgcggttctggccctctggggcccacttggggccgagcggttctcacccgccctctccgcacgtccgccggcgcctcaggtttcccccggtagccaccggcagtcctccgcgtgggacccgggcgcggtggtcctttccctcgcggttctgccccgtcccctccccttcctcccctctgcccccaggtcgctcagcctctactatttccccctactttggcaggacagttgct

SEQ ID NO: 42881 - DNA, 2300 bp, Homo sapien
catctctacaaaattaaaattaaaattaaaaaatcagccaggtgtggtggcatgcacctgtagttccagctactctggatgctgagatgggaggatcacttgagcctgggagactgaggctgcaatgagtcatggtcacgccactgcactccagccttggcaacagtgataccctgtctcaaaaaaaaaaaaaaaaattattgaccatgcgcggtggctcacgcctgtaatcccagcactttgggaggccgaggcaggtggatcacttgaggtcaggagatcgagaccagtctggccaacatggtgaaaccctgtctctactaaaaatacaaaaaactagccggttttgatggcacgtgactgtaaccccagctactcaggaggctgaggcgggagaatcgctggagcccaagaggtggaggttgcagtgagctgagattgcgccactgcactccagcctgggaaacggagcaagactccgtatgaaaaaaacaaacaaaaaattgtgcctccatcactttttccgtctctccacaggctcaagcaaagacagcctctgagctttctaaatccatggagtccatgcgtgggcatttgcaggcacagcttcggtccaaagaggctgagaacagtcgcctgtgcatgcagattaaggtacctattggccccacaagtggggaaagaggaggcaagggcctgccaatttgatggtagcggcctggcccagatatcacactcaggaagtgtgcctccaaaggtttctgaggcagctgatgacaaaatactcaggcctcagagacattccaggacagtggcaagagcaatggacagagacccaggaggtgttgggcatccttcccaacagtgacggggttgcgtgccatgccccccaggcctatcacttaatcccctaggccctcagttctcctcattacccaagggaaagggatggtctctttgtagcccaggggtcctctgaggtcatactctgctgagtgaccaaggaactatctctgaccacaaggctgggagttcagggaaggattccagagcagttctgacctaatatcaagaccccatgggctgagagatccagggaggtgtcgtggggagctgggagggactgtgtctctggtccgagttaggggagcctctcacacagctaagcacttttttctgtcttcctcgtttcctctttgctcttgccttttcctccctttctccttcaccctctgctttgccttcccacaacctccttgtctctcttctccctctctttctcaccccttcccccttccagaatctggagcgcagcgggaatcagcataaggcagaagtggaggccatcatggagcagctgaaggagttgaagcagaagggagaccgagacaaagagagcttgaagaaggccatccgagcccagaaggagcgagccgagaagagcgaggagtatgctgagcagctacacgtgcaactcgctgacaaggtcgcaggcccgcggtgcccagctcctcacctgccctgaggagggctgggtgatggcagaggggtggtcagccagatgggtagcggggaggggtgggtggatgagggatggtagtggtggaaaggatagatggctggggaggagggagagggagttaaggggatcaaatgggtaaaagctggagggatgggtggctggagatgattggaggctttgtaggagagttcagccacatcagctttgtgggtgagaataatggttaaggaaggatttacaaacaggatgcatttgattgctagaaatctgggagcactagctgggctcccactgttgcttccagcgccctctagaaaggtgaattccagaatgaggtttaggttaccagggtgagaaaccacctaggatgagcccgctcccagctcctggcagcctcaccactgacactaggctaacaggcccttttgtcccgtgttcccaggatctttatgtcgctgaagctttatccactctggaatcctggaggagccgctacaaccaagttgtaaaagaaaagggagaccttgagctggaaattattgtcctgaatgagtacgtcttagagtaggagagggaatgtggcgctgttgagggacttgggtgtgcaggtgggaggggcctagtggctcagggaaggccacgtggctgctgtttgtactctccgggttgggggctgcactgggctgtgatgtgggtagccctgagctgggctttctggttggagctggggtgcaagctctggccctagtcctggggtcctaccctactgtcaggcact

SEQ ID NO: 42882 - DNA, 2300 bp, Homo sapien
tgactgctttcctaggggctttagagttagacttttaaaatttattttattttttttgagacagagtcttgctgtgtcacccaggctggagtgcagtggtgtgatctcagctcactgcaacctccacctcccgggttcaagtgattctcctgcctcagcgtcccaagtagctgggactacaggcgtgtgccaccattcccagctaatttttgtatttttagtagagacagggtttcaccttgttggccagggtggtgtcgaactcctgacctcaaataatctgcgccccttggctttccagagtgctagattacaggtgtgagccactgcacctggcttggagttagactagactttaatcctgtgtttaccagtttttagctgaatgaccttgggcaaatgacttagctctcttgatgcttactatacttgtatggggacagcatcacctattttacaggttgtctgaattaaatgagcaagtgtgcagagagcccctggtacaatgcctgggtcttggtgtttactgtgtggttgccattgttacgggataactaaatgaatggcaagccacctgctcaatggccagcggggagtgtaggccacacttctgctgtggattttgcaggatcctccactggggactgtgtcagccctgccctaactctaaaggactctgcctggctccactaggagccaggtctttcctaactgtgggtctttccttcctgtgggtctttccttcctgtttcaggcacgaaggcagttccagtctcagctggctgacctgcagcagctccctgacatcctgaagatcacggaggcgaagctggctgagtgccaagaccaactgcagggctatgagcggaagaacatcgacctcacagccatcatatcagacctgcgcagccgggtaagggactggcagaaagggtcccacgaactgacccgagcaggggcccgcataccaagatgagctgcacgccccccaagggaggactacttcctttttcttggctgctgctttttaaaaggagtgagctatcatcagtgctgtgaaataaaagtctggtgtgccaaatgccatgtgtttgcacaaagtgattgtagttataggagccgtcacttgcgtggagtcactgggccctcctgctgttgcccccacccaagactgctgcctctgcctgtgtgctccgcagctgtcctcagctccacacccacagctgggagatgccagcagacaccgagccgtagaatttctttttttctcttgctttagctgcttctcctgactctttaacagatgcactgcctgagattctgtcctgaaagaagcaagcatccctttctcccagaagcagtctgtctctgggttactggaaccatgcctacggcctgcagtgtccaagaaattatataccactcatttgcagcgtgaccttgggcaaggcccctttcccactcttgacgtgtgtacttgtgataattagaaaaggggctaccattttttgagcacctcttctgtgttcctgcattctctcatttaattccatcaggaactctgtgaggtgcatgtgttattttccccattttacagaaagcagcccaaggcatagagaggagaagtaattccccaccatcacagagctagtacctagtaagcagggattggaacccagccagctctgtctggttcccaagcccacattctcagtactgtaaccttacattgcctgccttctccgttgaacctgagcattctcagggactttgagccttgatagctgaggcttctgcataaaacagccctctgggtaaattctcaaacttgccaactcaaaaggattgacagatttcctgttgtcttgcctgcacttgtccccagttaagaggaggttgagatcaatagtaccagcaacataacaggtaaagctctgtggttggtttgtatgggccagttagccctgccagctgtttctgccttctcatgtctgtcctggatcctagctgggtctctctgagtggcctcccctgatcgagaaagcatctttgtcattctttagcatcaaacctggtttctcccagtgtggggagagccttttgtctttggagttgggcctaacctgtccctgctgtcctttctcctctaggttgtgcgttgagacttggacacctgctgagggcactgtgcccctttcctgggtgtggacaacaggtcatagggaaaggggagggctctagcgggaaattcctttgtaaaccagtctgtgttcctgtcattttagatcgaacaccagggg

SEQ ID NO: 42883 - DNA, 2300 bp, Homo sapien
tacaagcatgagccaccatacctggcctagaattcacccttttaaagtgtaaatataggccaggcgtggtcactcacacctgtaatcccagcactttgggaggccgaggcgggtggatcacctgaggtcaggagttcgagaccagcctggccaacatggtgaaaccctgtctctactaaaaatacaaaaattagccgggagtggtggtggacgcctgtagtcccagctacttggtaggttgaggcaggagaatcacttgaacccaggaggtggaggttgcagtgatccaagatcacgccactgcactcctgcctgggcaacacggcgagattctgtctcgaaaagataaagtgtatatataattcaatggtttgtagtatattcaccaagttgtgtagccatcaccattatctaattctagacctagttttttcttttttcgaaatggagtctctctctgtcacccaggctacagtgcagtggcaccatctcggctcactgcagcctctgcctccagagttcaagggatcctcctgcatcagcctgtggggactataggtgcatggcactttgcctggctaatttttgtattttttgtagagacagggttttgccatgttgcccaggcttgtctgaaactcctgacctcaggtgatctgcccaccttggccttccaaagtgctgggattacggcacccagccaaccaatttcatcactcccaaaaaagaaacgccatacccattagcagtcactccccattcccctcccccagcccctggcaactagtcataaagtttctctggctctatagatttgtctcttctggatatttcacataagtggaattgtccaacatgtggccattcatgactggcttctctcagcataatgctttcaagattgatgttgcagcgtatcatcagcactttatttttatggccccataacattccattatatagatgtggtgtttcctcctgccaaacagggctggttgggattccaaagaagcactatggccgggcgcagtggctcatgcctgtaatcccaacgctttgggaggtcgaggtgggtggatcaactgaggtcaggagttcgagaccagcctgaccaacatggtgaaaccccgcctctgctaaaaatacaaaatagctgggcgtggtggctggcgcgtgtagtcccagctacacggggagctgaggcaggagaatcgcttgaacccgggaggcggaggttgcagtgagccgagatcgagccactgtactccagcctgggggacagagcaagactctgtctcaaaaaagcagcattaaacccaaaacatttattagggaagcttacagagtgggctgcagcaattctcgcgacagacagagagaagcggtgtttcacctaggtacatccccagcgaggggtcagggtatgaagtttatatgagggtttatggaatttggctaaaagcaggggtcagtttcagcgttttgggcaataacctagatatccttagtgcctagggatatgcaaggcccgtgtttggttgcaagtctgcaggaaaaaacttgcagctggctgggtcacagggcggtcaaggcactctgatacttggtcagtgcacagaaagcgggggaactcgggaaccgcgcacatagtactatattttatttatccattcaccaatggatggacgtttgggttgctttcactttttggctattatgaataacactgctgtgaacattcatggacaagtttttatatatacataggtttcatttctttggcgtattttatatatatatatatatttacctaggagaattgctgggtcaaatggtaattgtttaaccttttgaggaactgccagactgtcttccacagcaggtgcttcattttacagtcccatgagcagtgtatgagggttccagtttctgcacagtctcaaggcacagacaaattttcagcagccccggggattgggagcggtggttacctctgcggaacgtgccccgacagccaagccctgcgcgcaggcgcactggtgggagggcgggaacgcgggagcgtcgccggaggtggggcgtgcaggcgttaggggcggggctgtgctgcgcgcgcgtcccggaagcagaagcctgtgtggccttcccggcggctgattcgagggcttgtttggtcagaaggggggcgtcagagaagctgccccttagccaaccatgccgtctgagggtcgctgctgggagaccttgaaggccctacgcagttccgacaaaggtcgcctttgctactaccgcgactggct

SEQ ID NO: 42884 - DNA, 2300 bp, Homo sapien
ttccaacccagcacttcacttttctttctaatcttaccccatccatgtttgtaaatatgttacctagcagtgagaagtttggctcctgttattctcaatatgtttacttatttgctcaatcagtttactttatctcattgtagcaatctctgaactactctagttttttcatttatttattatatcataggtaatcagtacttattttctcatacaaagatgttccacgctcatcttatatttttctgcctccagttctggaacttaccttttctgcagagacccctggtttcctttgatttaaaattatatttacaaaccaagatctggtactagatatgctcattattactactaagggtgtatacatacatatccatatctatttctattttttaaaatattattaggctggttgtggtgactcatgcccataatcccaacactttgcgaggctgaggcaggacgagtgcttgaggccagttcaagctgggagccaggcttggtgtctcacacctgcaatcccagcactttggtaagtcaaggtgggcagatcacttgagcccagaagttcgacaccagcctgggcaatgtggagaaacctcacctctacaaaaaatacaaaaaaattaaccaggtgtggtggtgcgtgcctgtagtccctgctccttgagaggctgaggtgggagtattacctgagcatgaaaagttgaggctgcagtgagccgtgatcacgccactgcactccagcctggggaacagaatgagagcctgtctctcaaaaaaaaaaaaaaaaaaatagtcgggcgtggtggctcacgcctgtaatcccaacactttgggaggctgaggtgggtggatcacctgaggtcaggagtttgagaccagcctggccaacatggtgaaaccctgtctctagtaataatacaaaaattagccgggtgtggtggtcgacacctgtaatcccagctgctcgggaggctgaagcaggagaattgcttgaacccgggaggtggaggttgcagtgagctgagatcgtgccactgcactccagcctgggtgacagagcaagactccatctcaaaaaaaaggctgggcacacagtggctcacgcctgtaatcccagcactttgggaggctgaggcgggtggatcgcctgaggtcaggagttcgagaccagcctgactaacatggagaaaaccccgtatctactaaaagtacaaaattagccaggcatggtggtgcatgcctgtaatcccagctactcaggaggctgaggcaggagaatcacttgaacctgggaggtggaggttgtggtgagccaagatcgtgccattgcactccagcctgggcaacaagagcgaaactccatctcaaaaaaaaaaaaaaaaaagaccagcctgggcaacatatcaagactccatctctataaaaaatgaaaaaataattagctgaatatagtggcgcatgcctgtactcccagctgctggggagactggttgaggtgggaggatagcttgagcccaggaggtcaggctacagtgagccatgattaggtcactgcactccagcctgggtaacagagtgagaccctgtctcaaaaataattaattttaaaaatgaaaaaatatatacatctaggtttgtgtaaggatgctttacgatactcgcacaatgacaagatcacctaaccctgtgtttctcagaacttacccccattgttaagtgactgacattctactgattgtgtatacagtagcttacttcagaattcctcgtgttctgttcagtgctttagattgctttcacatatgctttagtgggaatctttgtgcattgtccctttttctgtagttagggttatttagtctgattttcattagaaggatagtagtctaggtcattatcaagaaaccactgtactttgttttcatctgattgttaatacattactttgggtctttgatgtttatttatttaggccttcttagatgttcagtaaggcatgtagtggattatactgagaacagttgacgtgtaagttgagcttaaccctattcttttctctaggatgttttagaagaatgtatgtctcttcccaagctatcttcttattctggatgggtggtagagcacgtcctaccccatatgcaggagaaccaacctctgtctgagacttcgccatcctctacgtcagcttcagccctagatcaaccctcatttgttcccaaatctcctgacgcaagctctgccttttccccagcctcccctgcaacaccaaatggaaccaaggtaaggtt

SEQ ID NO: 42885 - DNA, 2300 bp, Homo sapien
tgccactgcactctagcctacatgacagggtgagaccctgtctcaaaaataaacaaataaacaaaataaaatataattatgttttaaaataaaataacataatgtcttaacagtagattttgacatatctccatgctagctggcatctcgtcatctttaagggctgcatagtattctgcagtatgactgtactataatacgtgtcgtcattccccagttaagtggttttaaatgtattgctgttatcaacagggctccagtgagcattcttgtacatatatctttgcacacacatacaagcatttcctcaggataaattcctgaaatggaacaagtgtcaaaggatatagacacttcaaattttgatagttaaaatgtcaaattgcctttaaccatatgtgagtactctcatgaaatgataaattcaatatctgatacccttaggtactaaggaaaaggactttccttagtggaggtccaggagaaaatcttcgaggcagagattaacaaaatcagtgagataggaatgtgtatagcttgtttatggaattagaatgaggatttccgtaaattaccaatgaaccccataagactacacaggatggaagcttaatagtgcatggctgtttgatgtcatgttgctaaattcctgtccgttcccaacttgtactggagtgacataaaccatatggggcaattggaagagctttccaaaacagctgagcttaaagatcaagcaaaaggagaaaggatattcctgcaaaggttctgattccatgcccttaagtatctctgatggtgttaggggccgatgggcaggtagcccgcaggggtaaatgatcaaggtgttgaaggcgctccagagagcaggtgttaaacattttcggccgggcgaggtggctcacgcctgtaatccgagcacttagggaggccaaggcaggcggatcacaaggtcaagagatcaagaccatcctggccaacatggtgaaaccgtctctactaaaaatacaaaaattagctgggcatggtggcaggcacctgtagtcccagctacttggggagctgagacaagaatcgcttgaacccgggagttggaggttgcagtgagctgcactccagcctggcgacagagagagattccatcttaaaaaaaaaaaaaaaaaaaaaaaccttttcaggagggcctgaggctatggcaggaggagcaggagaggaaggtgcaagccctctcggagatggcatctgaacaactgaagcggtttgatgaatggaaggaactgaagcagcataaagaattccaggacttgcgggaagtaatggagaagaggtgagtctccctgaattatgactgggaatgttgatgtgttcaactggaactctttcccaagaggaattccaaagggaaagagttgaacaacttctgagtccttaaatatcaaggtaaaataggcagagaattttataacctggaaaaaagaccaaacttggagagacaaccaaaggaacacaaagagggaggcttttaggagaggtaaaacaattttacgggcgtggtggaacacagctgtagtctcaattactagagaggctgaggcaggaggattgcttgagtccaggagtttgaggctgtggtgagctatgctctgcagcctgggcaacataacgagaccccatctctaagaaaaagggaaggaagggaagggagggcagggagagggagagaaaagaaagaaagaaaaacaatttcaggaagtatccctgactattcctccctgccatttttcatgcagctccagagaagccttgggacaccaagagaagctaaaagctgagcaccgtcacagagcaaaggtcagagcctggcagaattggtgtgggtgttttggtgtctgtctgtaacctgcctggagagccaggttttggcagatggccaccatggaggatctgggccgtattatgcctgtgtatgactaaccttgggatgtcctcttcctgctctgagcccatctgtgaaaatatgtagcccacgtagaatttgaggactgtagaaagaagaagcccaggaacccctcagagagaagtcactcagcccttttctacagattctcaacctgaagctgcgggaagcagagcagcagcgcgtgaagcaagcagaacaggagcggcttcggaaggaagaaggccagatccgcctgcgggccctctatgctctgcaggaggagatgctgcagctcagccagcagctggatgcctctgagcagcacaaagccctgcttaaggtcgacctggctgccttccag

SEQ ID NO: 42886 - DNA, 2300 bp, Homo sapien
ctgtttcttggtcatgtctcagatcacacaaagaatcaaataagattttagtttctctatcaatacagagctctctcttaggtctccattttgcatccagcaaaagcagcagaacccccagttcactatggggccagggtgatttaatagaaaaaccctcccttttgaacagctcctgcccctcagtcccaaggtgctttctttgctggagcagaaggtcttggaaattttagggagctacaattgtgttagccattttgtacccagagctgaatatctgatcaaacattttactgcaacctgctggagaagaggccacggataccatcagctgttctcagaaatgcacactccagggaggagttgctcagcgctgttttctctacatagaagattgcaggaaatgcctctcagctcctacgtttctcctacacagattctctaaagcagcttctggggtgtggtcactgcttttctctccactccaatggagtgagtgggtagggaaatttttcctcagtatcatggctacagccaggacagcttagaaaccgtattgcaggtcccaggcacggggaaagaagccaaactgcagagggccaggaagctcagggccaggtctgggcccagattctggtgcagtgtccaatgactttatatttatttaaagaggagagctgcttggtaaccaggaggctgaagccttcctaagctgcagagctccccgtctgcctgactgcacaggaatgatctgggtgttactcccagtggctgcggcccagctgtcaccggaatggggatagggaaagggcttcctaatccagggcttctggctacagagtttagagccaggaccttaaactgctaggactttaagtatcagaaattctgagaatcttatttttctctttctgcaccccagcagccacccgcatcaaaatgcctccctttcctatttgaaggcaatacacatacggttgcaaagggaaggttctgactgctgagatgtaaatcctagctcttccaattggtagctgcctgacctgggccaagagacttagcctacatgagcattatgtaagagtgcccatttgtaaaatgggaaaacatctcataaaattattgcaaagattaagaaatgaaaaggtaacacgaaatacttagcatagtgcctagtacacaaggcaagttcgattaattgtgccagaaagaaccttaatgtcttgtttatgaaataggatgaatgtagcctattccactggcgacctgtgagaaagcttttgttgcaggaatgtaagaaattattattttgccgctgccgtttcctcccccataatctccaagaacataagaaattaactctccaaatcccagaatgacagctttatgccccaaattagtcgacttaattttttttctgattcggatttggccttttcctctcaccacctcctcaaacccggggccccaaatcatccgcgtcttcttgaccccagcccccaccgaattaggctgacttgggaccccagcgccagcctcctcctcgggaaagtgagcaggaagagacgcactcgggtgatctcaccctttgggactgggcgtttttccggccggggcgcgcagcatccccagccagactgcagcgatacccccgccccgcccttctccgcagtcctggaagagctcccagggcggagtggtgcgatgcagacgactgtccgcagggcgggcggtggcggggcgcaagctgcggggagggaggtgaggcgggagcgtctctaccgccagggcgtaggcagtgacctcactgcaccatcacccctcaccccttgcgcgcgccccatttccccatcctcccgcggcccgcccctcgctcacctcttcccccgcattgtcgcttcggctccttccgggatcgctcggccctttccgccgggcggtcgggcggcgagccggcgggagcaccgccccctttgctccgccggcgcgctcccccacccctcgcgcagcgccggggcgcttcccccggcgctcgcgcccgcccgccgcgggagcgcgcgtagccgcttataaaagaggcggggcgcgcgcgtcgccgccactacccgctgcggagtgaacggtgtggagcggaggccgcggaggctcctcggtccttcagcacccctcggcccgacgcacccacgcccctcaccccccgagagccggtgagaggggcagccggggagctccgggagggagcggggccccgggcagccgacccccgggtgggagctgggcagctcttcaggcggggcggg

SEQ ID NO: 42887 - DNA, 2300 bp, Homo sapien
gtgggcacatgtgactggtggctacagtgttagcacagctctggagcatctaagcagagagaaggccagccttggtggcaggcggcattgctcttctgcctgtgaccctctgcaggtatggcaggtgaggaagggactgaattatcagaccttatagaaagtgattttaatatcattttggaccttttttttttatgagacagagtctcgctctgacgcccaggctggagtgcagtggcgcaatctcagctcactgcaagctctgcctcctgggttcatgccattctcctgcatcagcctcccgagtagctggggctacaggtgcccaccaccatgtccagctaattttttttgtatcttttttagtagagacggggtttcactgtgttggccaggatggtctccatctcctgacctcgtaatccacccgcctcggtctcccaaagtgctgggattataggtgtgagccactgtggccggccgttttggacctcttaaaacaacgctctcgtgtgtgtgtatacacgtgacctccttggattctccctctcagagaaggaatttactttcagttctccctcttttttccttaggattggtggaaagtggaagtgaacgatcgtcagggttttgtgccggctgcgtacgtgaagaaattggaccccgcccagtcagcctcccgggagaatctcctggaggagcaaggcagcatagcactgcggcaggagcagattgacaatcagtaaggatgacactgggggccgcaagggctaggcgtcccataggcatactctgttccacatgggccgaagcttaggcgtgtcctgaggctcctggagcccacctgcacgcctcctgctgtctccaccccactttgagcccacagacctccctgtgtgggtctcagacccctgactgatgacttatattgctttgttttttttccaccagtgttcatgagtttttcctaaccagaatttttctaatcattgccatttgccttttggttcgagatgctttttgaaattggattttcagatactctacgcccctacagctctgtccactttgaaaagctgctttcagagcttctctgtctgccatagctttgagttctgagaatggaattttgtaatgaaatggctctgtcctctttcctctagctgagcccccatattgccctgtgtccctcctttagggtatttctgactccactagtggaatcagcagttttggacacttgggaaatatccaggaaatacattcccactagagtttgggtagaatagtgaaatttttgggctccagtgatcctcagtaagatcagagttatttgtccactttatagattctgttactatagagataagaatgggaggttttggtttgtgttctttttttttttttttgagacagattctcgctctgtcatccagactggagtgcagtggtgtgatcttggcttactgcaacctctgcctcctgggttcaagtgattctcctgcctcagcctcccaagtagctgggactgctggcacatgccaccatgcccagctaatttttgtatttttagtagagatggggtttcactgtgttggccaggctggtctcaaactcctgacctcgtgatccgcccgccttggcctcccagagtgctgggattacaggcgtgagccaccacgcctggccttggtttgtattcttaccagtagtctgggtcataaatataagaggaaaaagatcaaatacgtggctaaattgcctgttagcactcagtaaaatttctttctaagggtagtccagtctgttccctgaccttgctctgtgaagttaccagtgttttcagcacaggaaaatctgccttaagcatggcagacccgccaggaaaatgaaggtgaactaaccctctaattttcctgctatttctttactgtcatgtcactcatgacttagactgctccttagacctgttgaataactccatagtttcccaacattaagcatccaccatcatggcaccagtcggagctgctgcctttcatccctgtggattaaccccactaattcgtgcatgcttttgctgtgccccctctgtgcaggacacgcataactaaggaggccggcagtgtatctctgcgtatgaagcaggtggaagaactgtgagtaggctgagagtcttgcagagcaccaatgtccactgctaccctatccattctccctctgccgcttctcttgaaggcctttgtccatccagaaagatgaggtggtgggaggaactgcctgtccgtgcagcagctttg

SEQ ID NO: 42888 - DNA, 2300 bp, Homo sapien
gcttccagccccaaggaggtggtggtgctttgtgtaaaaccagaggcagcctgggaataaagctgggctggcaacgcctggtcgggctctggagccgggagtgggggcataggtggagcagcctctcagtgctgcatgtcccagacatcaagttgttagagatcccggattgagtgggaccatgcagggcgcgtggtcagccccagccatgacttggtgacagacgatgcagggtctgtgcgttgggtactgatgttcttgcttttgttttcctttctttcttgtgtcttctctctgtccccccgattgctgctgttgtccggacaccaccttgtctcccggctgcttggatctgctctccacaggacatacctcctcgatgggttaatattgttttcttccttctctgggcttgtcatgtgggggtctcgtgcgcttgcccctcgtggcctggcttgtggaggatcccgggatgggccttcctgcccagggcgggctgcacttcccctcccacccttctcgtcacctgatgaggagtgtgtgccttgccccatagcccatggtccctggtccccgatagagccttcaagccagggggagccgtccttgcctcactgggcgattccaagggctcactttgggtagggaaggtgatgaagcacgaaggccagagctggagtccagaggccctaagaacccccgtgcctgtccagccaccgggctctgttgggctctcacctctgcttccccagcgagtccaacagtggtcagtgggcatgaagcagatggcagtgctgggggctcaggcagggtacagtaagtccacagctgagaagggctgggcactgacaccccctaagtagctgaggctgccactttactttcctggggtcagggagggtaacaagactgtccgccctaatagaaggcaaaaatgcacccgttatgtgatagacaggacgtgggaggagccccagggaggagcagggctgggctgtcccgcccagtcccggcagggacttctctgcttggcctggggcctctgcctggccgggtcacctttgtaatctgccaagcctgctgtgaaagccagggctgctgggactggagtggcttggcctgcactcctgaggctctgcacccaggcacatcaagcctgtataggcggccaggggagaaatagacccatccagccgggccacacattctgatggcagagcagctggggacgtagggatcgcagtttccggcctgtgcccgtaggacaccctggccacctgactcccctccctgccccatgcctgtgtctgctggtcttgctcttgtctccgtgaggtgccacgctcccctcaccttatggctcctcccaagccctgcccatcttgcccattcctagtgtgagctgcctggggtgaaccactgggcctgctgcctccaggtacccgccgggcaccaggttgcccttgcctgcgccctgccagcttgggctttgtgtgtgtctgttgcagtgtgctcttgcctcccctccctttggtgtattcatttggtttcttttctttgaatagcatagcatatcgtcgggtcattcgtgtctatcagtatgaagttggggatgatctgtctggaaggtttttctccttatttctcttcttacctcactgtggctttactgatgcactcttgacatccccaggcggctccaccctgactaacctgccgccctcggctgcttgggaaggaggggtctgtcctcccactgcaccggcacccagcctcctgcccccaggtcctggggggcattttccccggggggacatggcgtgactgtgagtctgacctgctggggtaggaggaagcctggtgccttgccttgctagagcactttgaacctggggagattgcagagctaaccctggctcgccgggttttaaaagggtaggttggggtgaatgtgggtacaggggagcctgggctaaaaccccaccaaggccacacgcaccgtgtgattcgtccctgcacgtaaccctaactcgtttgttgtctttgtttactggtagcctctgtgacctggcactgtgttctcttgggaaggaggctccccagagcccatctgctctcagaacttggtcctagagaggaggctccctccctggctgtgtctagaggatggaaccgggatctggggtttagtcacagccatctctctccttttggcacagttggtcgtgatctcccagcactccacttgtgtcctttgtctgcagggtcgtgctctcattccccctagaatggggctccct

SEQ ID NO: 42889 - DNA, 2300 bp, Homo sapien
gagaccagcctgggcaacacggggagacccctgcccccatctctacaaaaacacaaaaattagctggggatggtagtgcatgcctgtagtcccagctgcttaggaggctgaggtggttggatggcctgagcccggagaggttgaggctgcagtgagccatgatcataccactactccagcctggtgacacagccagaccctgtctcaaaaaaaaaaaaaaaaaaaaaaattaggtcaggtgaggtggctcacctgaggtcaggagtttcaaagcagcatggccaacacggtgaaaccccatctctactaaaaatacaaaaaattggccaggcgtggtggcggttgcctgtaatcccagctactcgagaggctgaggcaggagaatcacttgagcctgggaggtggaggttgttgtgagccaagatagtgccactgcacgccagcctggacgacaaagcgagactctgtctcaaaaaaaaacaaacaggctgggcgcagtggcccacgcctgtaatcccagcactttggcaggctgaggcgggcagatcatttgagatcaggagttccagaccagcttggccaacatggtgaaacccttctctactaaaaatacaaaaattagcccagtgtggtggcatgtgcctgtaatcccagctgcttgggaggctgaggcatgagaatcgcttgaactggggaggtggaggttgctgtgagccgagatcacgccactgcactccaccttgggcgacagagtgagactctgtcttaaaaaaaaaaaaaaaaagtagcatctatccttcccagatcattttttagaatttttttattattttgttgttattattattattattttgagacagggtctcactctcttgtccaggctaaagcacagcgtggttcaatcagggctctctgcagcctcaatttccctgactccagggatcctctcaccttggcctccggagcagctgggactacaggtgtgtgccactatgcctggccaattaaaaaatttttttttgtagagagggagtcttgctgtgttgcccaggcaggtctcaaactcctgggctcaagtgatcctcttgccttggccttccaaagtgctggccatctcgtctggcctattattatttttttagagatagggtcttgctctatcactcaggctgtagtgtagtggtgtaatcatagctcactgcagcctcaaactactggactcaagggatctttacactcagcctgccgagtaggtgggactacaggcacgtgccaccatgcccagctaagttttaaaacattttttttgtagagacgggctctcactatgttgctcaggctggtttcgaactcctggcttcaagcgatcctcctgccttggcctctcaaagtaccgggattacaggtgtgagccaccgcacctggcctatttgtttattctttatttttattttttagtcctcaggtcagaatctccagtttttttaattccggtggggcgcgcggaatggcagaacgacataatatagtataaaaagcaattctttcctcagggtgagaacttaataagaaagagacgttctgggctctttgcctgacacacagtaggcacattatttagttatttgcttttaatttcgatttaataagcatgtttctgtagaagacctcatttgggcctcccagctttttaaccacatttaggatctccgtaggaatatttttcatcatcattctattgagacagagactgaggattaaagggagatcacttggcttcgaggtgacagcctgttcgagtggcgcggttctcggatctgctggaagaatcagctgctcagccagatctgcgctcccaggcccagacctcgcgggccggccacggccgcaggctgccgccctctcttcgcttctgcgcttggctgctcagcgccatctttgaacctggcaccaatgcctcacttccgcagtttcctcgcccaggagtagcgcgcctactcttagagtgctttttctggggacagggtatgcaaaaccggtcatgcttctctctctggccgagaagaatcgttacttttctttcttccaggtcttgcaggaggcgctgcgaccaattcaaacatggcgccgtcagcctcacattccccgttttccgctcatggcggcgtaggggcggaggtcgcgcctgagtgcgtccgcacgagagggcggaaccgtctccatggcaacccgcgcgcagccggggccactcagccaggcgggaagcgctggtgttgcggcgctggcgacagtcgggg

SEQ ID NO: 42890 - DNA, 2300 bp, Homo sapien
ctaaaaattcttctaggttgggtgcggtggctcacacctgtaatcccagcactttggaggctgaagcaggaggatcacttaaggtcaggagttcaagaccagcctggccaacgtggtgaaaacccatctctacttaaaatacaaaaattagtcacgcctagtggcggtgcctgtaaccccagctactcaggaggctgagacaggagaattgcttgaaactgggaggtggaggttgcagtgagccaaagattatgccacagcactccagcctggatgacagagtgagacttttttttttttttttgacagtctcgctctgtcgctcaggctggcgcaatctccactcactgcgatctccgcctcctgggttctggccattctcctgcctcagcctcccgagtagctgggactacaggtgcctgcaaccacgcccggctaattttttgtatttttagtagaggtggggcttcaccgtgttagccaggacgatctcgatctcctgacctcgtgatccacccgcatcagcctcccaaagtgctgcgattacaggcatgagccaccgcacctggcccagagtgagactctttctataaataaataaatagtaaaaattcttctggtctggtgtggtggcttatgcctgtaatactagcactttgggaggctgaggtgggcagttggcttgggaccaggagttggagaccagcctgggcaacatggccaaaccctgtgcctactaaaaatacaaaaaattagccaggcatggtggtgacgtctgtagtcccagctactcaggaggctgaggtgggaggatcacctgagcctgggaagttgaggctgccgtgagccatgatcactaatgtacttgagcctcagagacaggatgggaccttgtctttttttttttttttttttttgagacggagtctcgctctgtcgcccaggctggagtgcagtgttgcgatctcagctcactgcaagctccgcctcccgggttcacaccattctcctgcctcagcctcgtgagtagctgggactacaggtgcccacctccacgctcggctgatttttttgtatttttagtagagacggggtttcaccatgttagccaggatggtctcgatttcctgacctcgtgatccgcctgcctcagcctcccaaagtgctgggattacaggcttgagtcactgcgcccggctgggaccttgtcttaaaaaaaaaaaaaagtctttttttgagacagggtcccgctctgtcgcctaggctggagtgcagtggcacgatctcggctcactgcaacctccacctcccaggttcaagcgattctcctgcctcagcctcccaagtagctgggattacaggtgcccaccaccacgcccagctaaaataaaccctcttctcttaacttgtatccctttctgaaacaagtgaagaatgaataaatactccaagtctccaaagtttcctgcttttccctctttctctgtaattctttctttcttcttttttttttttttaaagcaggcatctaattcctttgtaattcttgattgggaaatctttttttcaacattaatctatcccttcaagcagagacaagggaggtcaggaaggagttagcgaaaccgggcagtgggggtgtggtttactgaggaatgttccaagcttaggtgaggcaacagcacgtgtttaaatcttttggaggccaaaggaaaaaaaaaagaggataagttctcagtaggggcaggcctgtctacctgggggtttgggaacgaactgggggataggctgcgggggtttcacgtgaaaccaggaggtctagaaagcacagggatcctctcctcaaggaagaacttgccccctcccccaaagccaagagtgcccctgcagagcgaggcagagagcaactaaaagaaatttctcctgattggagggtgggtgggatgaggctgggggagggggccggggtgtgtgtcccactgtcatgtaaatatcccttccaggcagggcggctccagtgcagatttaagccgctggcacctggggcagtctcagtgttcagcctgcttccggacgggcgaggagactcgtggtctggttctgggacttccctaacagcatggcccctaaacgccagtctccactcccgcctcaaaagaagaaaccaagaccacctcctgctctgggaccggaggagacatcggcctctgcaggcttgccgaagaagggaggtacgtttctgcgctaagttttattggagatttaagggatttgcaaggattgactctctgatttttacc

SEQ ID NO: 42891 - DNA, 2300 bp, Homo sapien
tcacctgaggtcgggagttcgagaccagcctggccaacatggtgaaaccccgtctctactaaaaaatacaaaaattagcttggcatggtagtgggcgcctgtaatcccagatactcgggaggctaagacactcaccgtgcactgtcttgaacatgaaagatgctgcttgagctttaagagctgatagtgggccgagctcagtggctcatgcctgtaatctcagcactttgggaggcagaggcaggtggatcacctgaggtcaggagtttgagaccagtctggccaacatggtgaaaacctgtctctaccaaaaaatacaaaaattagcagggcgtggtgactcacatctgtaatcctagcaactcaggatgctgaggcaggagaatcacttgaacccgggaggcggaggttgcagtgagctgagatggcaccactgcactccagcctggaagacagaatgagacttggtcccctcccccaccaaaaaaaaaaaaaaaaaaaaagagccaatggtaaagtgtgagttctggaaggcagaattccaaccccaagttctggttaaaaatgtccaaagagagatttcaggtatttttttgtttttgttttagagatagggtcttgctctgtcactcaggcttcagtgcagtggctgcattggggctcattgaagcctggaattcctgggcccaagcgatcctcctgccttggcctcccaaagtgttgggataacaggagtgagctattgcatggccaggatttgaaattggccagcgtatcactaaaatcaacaaatggtactggccgggcgcagtggctcccgcctgtaatcccagcactttgggaggacgaggtgagtggatcaccccaggtcagtagaccagcctggccaaggtggtgaaactccatctctactaaaaatacaaaaattagccgggcatggtggcacgtgcctgtagccccagctactcgggaggccgaggcaggagaattgcttgaacccgagaggcagagcttgcagtgagccaagattgcgccactgcactccagcctgggggacagagcaagactcccgtctcaaaacaaacaaacaaatgctactaatcagggtttttctggctttttatggttcatgtcttggggtgctggagggacagaatgtggggcatccgcattacttgaaaagtattatttaaacaaaatgctttggccctccttagtggttcagaactttgcctctcaagtagaacttgttggcccctttcatctctatgaacagaacaccgcctatcgcttggggctgttgtgaggcctcggtgagataaccgtgccatgcgctgctgaaactggcacttaacgctcagtatgattcttgcgggcgctgggcaccgcggactaatgtggtacctccctgccttcacaggacttcgagtttaatgtggcttcagtgtcgtaacctttatcatttcataacagaaacgggttcagagaggaagggtgacttgctcaagggtacaagcttgctgggcagggcttggactaaaacccaggaatggccctgcgcgcggattacacagcctggggcttcgcacacgagcccgagtttgagtccgatcggcagttccccatctggcatccagaatggggtgccccctgctttctccacgaagtggaaggcgccgagaggccgggcggaattcggggcccccatacgaggccgggcctgcactttcggggtggtgggcgccccgctcccggtgccccgcggagcagggaagccgctcgctcaccacgtgacgcgccggccgggggcacccgcgcctccgtgcgacgccccgcccaccggcctgccgcgcgccagtgtcctgggtcgggccggagaggggagagcgggggaggggacgcggcgcggggggcggccgtgcgtcgccgcgcgccttcctcccacctctcgccgggccctgtgtctccgcgccgcgactccgccccctcatcccgccgcccaggccaatggcgccgcggcgcgagcctccccggccggaggcggagcatccgcgcggggcctggcgcgcctgcgccctgcgcccgcccctcgccgtaggaggaggtggaggaggaggcggctcgggagagcgagcagcgagctggctggatcgccgagcgcgagtgagggagccgagccgcccgccgccgccgcctccgcctcccctccgcgaacaggagcccgggccggggcccggcacgccgccccagcccgtccctcggcgtcaggccgcgagggtagcgcgcgcgagcgagcgagg

SEQ ID NO: 42892 - DNA, 2300 bp, Homo sapien
acagtaaggttgccattttgttttctcacagcctagttctcttacaagatttgcagatattagtggcacctcaggagatcacaatagttgagtgaactactactaccttaaagggctcccgattttttacattcccgaaaataaacgttattgtgacctataacctgacagccctagacgctcaccagcatgtaaaaccactagttgtgctaagtttcactgttaagtttgtgagaaagttatcacaggcttgtggatattgattcaaatgactacagtagccccacttatccaaaggagatacattctaagatgccccagtggctgcctgaaaccacaggagtatcaagccccatacaatttttcctgtacctgcctataaaacttaatttccaaattaagcacagtaagagattaacggtataggataattttgactattgtatactataactatacattcacacatttaacatacagtataggtgtgaatgtagtctcaaagtatctgaattgtagttgaccacatgtagctgaagctgcagataacaggacccactgtactcaattttcttcctagtgaaaagtccttttgagacttcagaatgaaaatgctatactcaccctctcagaaactgtttactcagaaactgtatccaagtaagatatttgaatttgtcctttactcggacaccgaccagctcaaagctttctaaaccaatgtcataccattagcgctaacccacgcttccccagtcactaacgatgtgaagacaaaaaactagaacaatttctgaatccaatagcaagtaacatttctctataaaacaaggagaatgaccccagtccaaaaaaaatctttatgttcctttattggagcaagattcctgatcggtatacagtgatgtatttactaaacagagacctgtgcagaaattacatactatccatctagataggttgttacacttttgcctattgatggaatagttccatttatcaagttttatacatcaaaaagcttttgaagttcaccagactgtccattaattcacctctgaaaaagtggcatttaatttcagcgactatattttacagcattaaaaagcttatgcattagggtgcttctctgcacaatggcattgagcagacagagctgagtccattatcccacccagattcacatggtcacatttgagagctttataccagaaagcagggacagttactgctcaccatcagacttcttactgagagcctatcttcttggccacattttatatagccaatgaagacatgccagcaactgtcccgtgtataacttggcattagagcaccaggtctgttggatggtggtggcaggcacaattaatttatatccaggtaaaaggccaattttaaaaactgccacttggagataaaaatcaagggcacaatgtactcagagagtattgagctatctggtatcccaaatgatgtgaatactttcagaaaccaatggcaaattgaacccacgtttcccagctatggagatattaatacattgattcaaatcccattactcaatccacatagccctgaggtcatcctgcaaagtgcgtatcaaaaaatacgaagttagggtgacaaagtttgacagtgatgttatacaagtcaaacttggaaggtcatagtaagcatacctatgctgagagaaaagcatcaaatcctttgtgtacacatttagttttattgtaacaaagcaacttgtacacttttaacgtttaaaactgagcatcatctttcctttccagtgaaacaaaaagaaaatttaaaaataaacaggaacaaaattacaatagagaatgtcaattccaaataagatcctacaggttctgctgattctcccattgagtggcagggctcaagtcatcattaggagagaatttattttaaaagtgtcatcttaaactgcaaggatgtctgtcaaatatcacaattaaacatgccaaaggagaagccatgttgtcaaaatgcccacttaacccacccaaacatctcaaacccaccctttgctgaccttctataaccccatttttttaagtttttttttctttttttaaacaagagaaagtagacagatacatgttggtaaatgctaactgtccatattcacatagagacacagtgtactctctgagcccaatatacagagaaaggaggaaaaaagctagaattctatgcactactacacaggggcctagcaccctccagcttccagcagagcgaagggagcaggtttttcttttttcccacagagc

SEQ ID NO: 42893 - DNA, 2300 bp, Homo sapien
tgaggacttttttacttctttattttacttttttaagagatggtgtctcactatgttggccaggttggtcttgaactcttaggcctcaagcaatcctcctgcctcatcagcctcccagagttctaggattacaggcatgagccactgggcttggtcagcctttttgcttctaaatgatggataataacgttcatttaacctccattttattttatttttatttatttatttttcttgagacagaatcttgctctgttgcccaggctggagtgtagtggcgtgatcttagctcgctgcaacctctgcctcccagattcaggtgatttgcctgcctcagcctcccgagtagctgggactacaggcgtgcgctaccacgcccagctagtttttctaattttttattttatgtatttttttgagatgcagttttgctcttgtcatctaggctggagtgtagtggcgagattggcttactgcaacctccacttcccaggttcaagtgattctccagcctcagcctccctagtagctgggattacaggcacccaccaccatgcccagctaatattttttttttgtagttttagtagagacggggtttcaccatgttggccaggctggtctcgaactcctgaccttgtgatccgcctgcctcggcctcccaaagtgctaggattacaggcgtgagccaccgcgcccagctgcctttttaatttttttttagcagagacgggatttcaccatgttggccaggctggtcttgaactcctgaccttaagtgatctgccctcctcagcctcccaaagtgctgggattacaggcatgagccaccatgcccagccaacccccatgtcaaagaacctactatgtgccaggtgcttctgctaatgtctagacctcaacaactctaatgtgtaaatgtcacatttcgcctctgattatgaaatctgggcatgtttcacagagccaagttgcctttgcttatatgtcaatgccacttgggtgatttcccatagcaggacaacccagtgttgtccatggctcaccaatttcacttttttccagtccattatgaaggaagtgattagtgcaaagcacaacatgtggcttccttcattcagtaagagcaccagagcctgtctgttccaagtcactgtcggtatttgacccttcatcaccttcccacctcctggaggacgctcctccacgaagtgctgacacaacctcctgtaaacgcaggatgccaggacgggctgaatggcccgccatagactaggcagtgaccagcacacctcccttgggctgaaatagtggcggctatttcaccaggtgtaaatggcttttctcccgtgtggatggatgggctttttagggtaaagccctaaaaagtggcacgggctgaaccagcaagctcagtctgagtaagagatgggccggagagaggtctggttcattcatctgtaatttgtaatttatcataattttgggtgaggatttacttttccacaagtatacgttctttttttttttttttttttttttttgagatggagtctcgctctgtcacccaggttggagggcagtggcaggatctcggctcactgcaacctccgcctactgggtacaagtgattctcccacctcagcctcctgagtagctgggattacaggcgcccgccaccacgaccggctaatttttgtatttttagtagagacgggggtttcaccatgttggccaggctggtctcgaactcctgacctcgtgatccgtccacctctgcctcccaaactgctgggattacaggcgtgagccaccgcacctggcctagtatacattcttgtagtgactaatatctagtctgggccaaccactccgaggagagagacaattttggattagcccacattacaccaacaacgtgcgagacaaagagagacttgaggggcttggtcgaggaggcccagcgcgttagaggcgggagccaggttgtagaggggctcaaagttagaggaggcggccagctccaccggctgcacccggctgggcgacccggcaaccttcagggggcgctgtttcccccatccctgtccctaactggccggctcccgcgggcgcgcggcggggaaggccagaggacctgggcgcgggcgatgtgcctcctgagcgtccaaaccgggggtgaggcgcggtcacgcccagcgggaaccgcaggcgccgaagcccgggtactgggcccagaatcccgcggaattttggatccgagggaggcgctggggcgcgggacctcgggcgtggggtcc

SEQ ID NO: 42894 - DNA, 2300 bp, Homo sapien
tttaagccagacatggtggagcacgcctgcagtcccagctactctggaggctgagggggaagattgcctcaggtcaggagtttgaggccatagcgagaccccatctcaagaaagcagaaaaccaaaaccacaaaaaacatcagtcacctctgcacaaacagaagtttcagttggttcacactgggctctccgccctatcagtagtatattgttaattaaaatctggccttactatttgaactagtgttgggatgtttgatactagcacagtgcctaacccacggaagcttcagaattatgtgctgagtggataatgtgctggatgtccccactgagcacatcagatcctgcacccagtgcagtagtcaagacttagctgcaaatgacagacacccaactcaaacatctactcaggctagtcaaaggtgggaattggggccaggcatggtggctcacacctgtaatcccagcactttgagaggctgagttaggcagatcacttgaagtcaggaattcgagaccagcctggacaacatagtgaaaccctgtctctactaaaaatacaaaaattagctgggcgtggtggcatgtgcctgtaaccccagctacttgggaggctgaggcaggagaatcacttgaacttgggaggtggaggttgcagtgagcccagatcgcgccactgcactccagcctaggcaacagagtgaggctctgtctcaaaaaaaaaaaaaaaaaaaaggtgggcattcattgactcttgcaaccaggggatgcagagtcagtatcagcttcagggacagccggatctagagggctcagacaatgttgttcagaccatctcttgctccctcctttagtgctgcttatccatctctatgtgtctttataagttggtctcattttctccagccacagacagggtaagccctctccgcccagcgtaaagacggctcccagttgccttatatcccattccttaggcttgagatccaaaagaatgctccttcctctcagcatctagacagtaatctcatggaaggcctgtgattggttctgcagagtcgaaagcccacagcctgccgctcgccatcctatggggtgaggggcagtccctccaatcacatgggatgggaagtcgattccccaaccaaaaaaaggatgttgagctgagaaaaacaacagatgtcagaggagtatcctggaggagctgggatggggccaatcagagggaggcggaggaggatgctggtatcagtgggaggtgctgtggaaaggcggggctgagtggagaaggccctggggacacagggaaggaggacagcctgcagcctccggtgaggaaagtccgcctgtaggtggtggctcacagcaggagaggcaagacagtcccgtgctagacaaggcgcttccattatttaatcctcccaaacaccttaggaggaagacactattgtaatcccccttatagagacagaaaacagctcagaggggctcagtaactcgcccagggtcacacaggtaggaaggggcagtgctgggatttctgactcccgcctaagttggatcacccatagtcagaatgtgcaccacgtacctccacttttctctcgtccgtttgcaatatctgagaatacatagcaaggaggtaaagctgtcaccacagagcaaccttgggcgagccttggccctctcgagactttagtcatcacatctttgaaatgggtacaattttgcctcccggactcacagcaagccgctggatcttcgaagcgcccagggagctacgcgcatgcgcgaggctgcgagggcgggcacaggggaacgcgggggagggcacagcggagcgcgggggaggtgcgcgcgcgctccggcgctttcaaaagttacctggcgggtggggctggagttgagggagttaccagctgcgcgcgcgccggccccaccctcagcctcttcaggcacctgttggcttgagggtccattcggccgcagatgccatccaataggcagcctccctgacccagtccggccccgcccaacgcctagatccaccagtccccgggcggcggcgttcccctccctcggagggcccgcccctctgggcgcttcttccgggtggggccccgggccgaggcgatggcgccctgggcgctcctcagccctggggtcctggtgcggaccgggcacaccgtgctgacctggggaatcacgctggtgctcttcctgcacgataccggtgagccggaccccgagcgaccccggacccacccgatcccgcgtacttccccagacgttctggt

SEQ ID NO: 42895 - DNA, 2300 bp, Homo sapien
tcatttataaaactatacatttgtgttttatgcattcttctgtatgaatatttcacatttttaaaaaacattttttagagaagacttgtatagcctcctcttccagaaaaccgggctggactgccacaactctggatgagctcatacctctagatagttcctagagccctgctcctgagtctgaccctgaatgtgccccacttgtgtcctgtcccggcccaggtgcagcggaactgctgcctgacgctctgcaacttcagcatccccgaggagctggaattccagtaccgccgggtcaacgagctcctgctcagcatcctcaaccccacgcggcaggacgagtctatccagcggatcgccgtgcacctgtgcaatgccctggtctgccaggtagacaacgaccacaaggaggccgtgggcaagatgggctttgtcgtggtacgtgtggggggcgctgcccccttcctcctgagcctcactgctctcccccacccctctaccctgagcgagagtctcagagcagggcctggggctgggagtcggagagggagagtgtgctgaagcatgagggatttaggctagaccaaaggaagaatttcttaatgctgaatgttgctgatgccctcatagatttcttccacctagagcatgctgtcatcctgtcccagtccctgcgctcatcctgctttcataagctctgtagggaaagatgccatgctgtccttccgtcattgtgtccccagcacttcttggcatgggccctggaggccagtggggagatgataaatatcactggtgaaaggaaggaaagaatgacaaaggagctcaagagcttctggtctcatttgatggcagcgaagctcaagccccagcgggaagggctgtgcccaaagtcacaggggagtcacccgagggccaggaacggcacccgggcctgctaatgccaataccaaggggctgaggcgtggatgccttcaaatagcctcccccaaatatagggagacttgatctcgtcaagactcctgaactagccatggcgttgctgagcctcccctccatcttgggttcgtgggggtgggagttcttcagccccagcactctagcagactcttgtccctgcctgcagaccatgctgaagctgattcagaagaagctgctggacaagacagtaagtcaagtcttcacgaagccacgctaccctttccccacctcgcaaggggcctgggctgcccctgggggaggtctgtgttttgtcaggggcccccctccccgggtaccaggagccttggctgagccctgccctgccctcacagtgtgaccaggtcatggagttctcctggagtgccctgtggaacatcacagatgaaactcctgacaactgcgagatgttcctcaatttcaacggcatgaagctcttcctggactgcctgaaggtagtgtccacctcctgcagcagcagctgcctcagctgcccacatggcccctcttctgtccctaggctccccaccaaccaaatccgcagcacccctcacccatgcttcctggagaagggcagtggggacagactcaggcccacccacccaggatttgctgctgacagaagctccagacccagatggcctggtggggcctcctgagagcccccactcccagggaaagcccctccctgtctcctcggccgttgttctcaggctgcccacagctggccagagcccactacgctacgagctggacagcgggtctgttcatccttaaacacatgctctgttttcctgctttaatttctaggagggtcccttaaactagtattttgagctttggtgaacagaaccacgtctgtcccataggtcagatctctaatcaacctttgtctttgtggcaagcaatcccacccctttaattccttagtgtgtgtacccagcactgacctaggagcattggagggtaggagggcagcatatatgccccctctttgtctagttggcatggccagatgcccatgaagctttttggttaacaataccagatactaagtcattaagtactaattgatgcggcccattggctctccttttcccaggaattcccagagaagcaggaactgcataggaatatgctaggacttttggggaatgtggcagaagtgaaggagctgaggcctcaactaatgacttcccagttcatcagcgtcttcaggttggtatttttaatcctttccctttttgccttagctgccacaatgctcagagctctagcgtttgctcagttgcacaactgctcttagcctaggtttgctataa

SEQ ID NO: 42896 - DNA, 2300 bp, Homo sapien
acacctggataattttttaaaattttttattttagtaaagacagggtttcaccgtgttgcccaggctgttctcgaactgctgagctcaggcaatcaggccacctcagcctcccaaagtgctgggattacaggcgtgagccaccaaaccgggctttttttttttttcttgtgaaacagagtttcactcctgttgccctggctggagtgcaatggcacaatcttggctcactgcaaactctgcctcccaggttcaagcgattctcctacctcagtctcccaagttcccaagtagctgggattacaggcgtgcgccactatgcccagctaatttttgtatttttagtagagacggggtttcaccatgttggccaggctggtctcaaactcttgacctcgtgatctgcctgccttggccttccaaagtgctgatataacaggcttgagccacgacgcctggcccaagcaatgtattaatatgagagttcccatctagccatatcctcgtcaacatttgttattgtctctctgatgatgtccatcttaaggagcataaaaccgtacctccccacctcctgggctcaagcaatcctccaacttcagcctcccgagtagctgggactacagatgcgcaccaccatgccctgctaatttttgtagaaatggggtctccctatgttgcccaggctgatctccaactcctgggctcaagcctcagcctcgacaaccccatctgctgagattataggttgtgagtcactgtgccaagcccaacagcttttttaaggattcaagactgtacgaacatagttgtagctggtcaaagattaaaaggtgctatgcaagaaaaaagaaatccacaaaattagttcttggaatggaactgaggcacctgtcaagaaagggttcctcaagaaaggagcatctagctagggtgtggtagctcacgcctgtaatcccagcactttgggaggctgaggtgggcgcatcacctgaggtcaagagtttgagaccagcctgcccaacatggcgaaaccccatctctactaaaaatacaaaaattagccagacgtgatagtaggcgcctgtaatcccagctacttggaggctgaggcaggagaattgcttgaacccggggagtctgcagtgagctgagggccattgcccgccagcctgggcaacaagagagagaaactccgtctctcaaaaaaaaaaaaaaaaaagagaaatccagagaagaaatgatggtgttttgagatggagtcttcctctgtcgcccaggctggagtgcagtggtgcgatctcagcttactgcaagctctgcctcctgggttcaaacgattctcctgcttcagtctcctgagtagctgggattagaggcgcgcaccaccacgctcggctaatttttgtatttttagtaaagacggcgtttcaccatgttggccaggctggtctcgaactcttgacctcaggtgatccgcgtgcctcggcctcccaaagtgctgggattacaggcgtgagccactgcgctcggccagaaggaactggtttgacaggatccttaggacttggagactggacgaggggcccaggaaaatgtaggggccgaggtcgccgcccaatttcccatttggaagctcggttgcctggtggcgcatgccctagatggaggttaggagcaccttttgggggacggtgatgactgcgggttgacacgcgagtgtgagccacccgtggagaacgcaagacatgttcaacagggcgctggatggagggggctggcgcccagagtcagtcctgctattcagcagtgttgggctcaggtgaaccgcagcgccagggcgggcaccgatcctagggtcccacgaacaggcccctcggaggccagggagagccctgaatgacgcgttctctcgggtggcctggggggggcatcccgcggcttcctccaccggcgtaacgtgccgggcccggggaaaggagccgcccgccggtccccggaaccttctgccgccgccgcccgcgttagccgcgggacgggtcgggggaacccgatcgctgttgctaaggggcggccccggaagtgacgcgccccgggtttgttgacagcggaggcggcggcggctgcaggctccgagccgtaggagccggatcgggggaggggccgggcccaggagcctcagccccgccggcagccctaagggcaaggtaaccgccacggggtccccgtcgcgaccccctccctcccggagctcccgtccccgggatcccaagctccgccccgccgacccccgtctcccctg

SEQ ID NO: 42897 - DNA, 2300 bp, Homo sapien
ttccgtctcaagaaaaaaaaaaaagaaggccaggcatggtagctcatgcctgtaatcccagcactttgggaggcctgaggtgggcagacacttgaggtcaggagtttgagaccagcctggccaacatgatgaaaccctatctctacctcaaaatacaaaaatcagctgggcatggtggcatgcgcctgtagtcccagctactcagtaggcagaggttgcagtgaactgagattgcgccactgcactccagcctggggtgacagagtgagaccatgtctcaaaaaaaagaaagaagagtatatatgcatagcaaacgtgtgaagagatgctcaacatcatatgtctttagggaaatgcatgttaaagcaggagataccacttcacatctactagaatgtctaagattaaaaagactgaccacatcaagtattggtgaggacgtggtacaacagcaactctcatatactgctggggtaggtgttaaataatacaaccattttggaaaatatttaagcactttcttttctttttctttttctttttttttttttgagatagagtgtcgctctttcgcccaggctggagtgcagtcgtgcaatctccactcactgcaagctctgcctcccaggttcatgccattctcctgcctcagcctcccgagtagctgggactacaggcacccaccaccacgcccggctaatttttttctttgtattttttagtagagatggggtttcaccgtgttagacaggatggtctcgatctcctgacctcatgatccgccctccttggcctcccaaagtgctgggattacaggcgtgagccaccgcgcctggctagctgtttctttctttttttttttttctcaagaaaaaggtgttaaataatacaaccatttcggaaaatctttaagcagtttcttttcttttcttttcttttttttttttttttgacagggtcttgcgtttttgcccaggttggagtgcggtggcgctattggagtgcggtggcactatctcggctcactgcaagctccgcctcccgggttcaagcaattctcctgcctcagcttcctgagtagctgggattacagttgtgcgtcaccacacccggctaatttttgtatttttagtagagacgaggtttcaccatgttggttaggctgttctcaaattcctgacctggtgatctgcccgcttcagcctcccaaagtgctgggattacaggcgtgagccaccacgcccggcctactcaactaatttttacatcttttgtaaagaaggtaatctcgaggagctgggattacaggcgcctgccaccacgcccggctaatttttgcatttttggtagagacggggtttcaccgtgttggccagagtggtctccaactcctgacctcaagtggtctgcctgcctcgtcctcccaaagcactggaatttacagggatgagccaccgcgcccggtccagcctatttttcttaagatatcatttgtgtttttttctttcttcctaacttacattttatagggtttgctggtatagtttttataaaaaaaaaaaaagttgggccgcgcacggcggttcatgcgagtccctgctatacaggccttgaggattctgcagagaccaagataagctggggggcctgaacagtttagcaggggaggccgagactcctgtaacaatcatgcagtagttaattacaggggggtgagtgcagggaagacgacagggtgacaggtatattgcgtaagtagacactgaggcccagggaagcgcaaggaatagtccagagacacacagtctgcgctgtcaccggcgggttctcaaatttggcccgcagggtcggcggcgctggggctcccggcccgcgattgccacgcccaccagacccgaggttgccccgctcaacccggccggccgtagccgccagtaccgtgtggaagcgtgagagtcgaggggtggcacgtgactggcggggcggggcggggctgaggcggtggaacgcgcaggctagtggctgtgtttcccgccggaggcttttgcgcagagccccgcgtccctggggggcggcggcggcggcggcagcgcaggcggcagaggcgcaggcggcggaggcggctggggggtccggaagtcaacaccatgtcaagtctgcacaagagccggtaaggggccatggggcctgacccggctgggccactcctggccaggctgccccttctgcccctcagaagggggaagcgcgggtgtggccaggaatcggcagaccccctcggcagagggtctcgagcgtcc

SEQ ID NO: 42898 - DNA, 2300 bp, Homo sapien
ccacgcctggctaattttttgtatttttggtagagacagggtttcaccgtgttagctaggatggtcttggtctcctgacctcgtgatctgcccacctcagcctcccaaagtgctgggattacaggcgtgagccaccgcacccagcctgtttgttttttgaaatggagtttcactcttgttgcccaggctggagtgcaatggtgcaatctcggctcaccacaacctccgcctcctgggttcaggtgcttctcctgcctcagcctcctgagtagctgggattacaggtatacgccaccacgcctggctaatttttttgtatttttaatagagacagggtttctccatgttggtcaggctggtcttgaactcccgacctcaggtaatctgcccgtcttgacctcccaaagtgctgggattacaggtatgaaccaccgtgcccggccctaaagtttttgttttaaattgaaatgtaacttacgtgcaattacgtgtacaattagagaatgtttttcttgtgtgtgtacctgtgtaagtgccagtcagtcaagatacagaacatgtccacatccagaaagttcctgcatgccccttcctagttagtacttctcactgctctgacttttagcaccataagttaggttttaggaccatttgttgtattgcagaatgtcccatattctaggtttgtctccttgtttcctcatggtggcgtttgacttgttcctctgtgccagtgtatgtcccatatgctagataggtccaggcttaaaagtaaacatttacatttctggcaagaacacattgtcctccttcacattgtccatttttttttttttttttgagacagtgtcttgttgtcacccaggttggagtgcagtgatgtgatcatagctcactgcagcctcagcctcgtggtctcaagtgatcctcttgccccagcctcgcaagtcgctgggaccacaggtgcgtgccttcacactcggctaacatttacattttttgtagagacgggatctccctatgttgcccaggctggtcttgaactcttaggctcaagtgatcctcctgccttggcctccaaaagtgctgggaatacaggcatgagctattgtggcccgcccatgttgtctctttttttgtttttgtttttttctcctgagacagggtcttgctctatcacccaggctggaatgcaatggtgtaatcacggctcactgcagcctcgaccactggggctcagctcccacctcagcctcccaaagtgctgggatttcaggcatgagccactgaccccagcattgtctttcttgatgggctcctcctcttctcctccagatgagctccccacacaagaactctgtgccatcatccctaaatgagtatgaggtgctgcccaatggctgtgaggcccactgggaggtggtggagcggatcctgttcatctacgccaagctcaaccctggcatcgcttatgtgcaaggcatgaatgaaatcgtggggcccctctactacacctttgccaccgaccccaatagtgagtggaaaggtaagaaggctcttggtgcccacatccctcgttgctggcccgtgtcaggctgtgcacctcactttccctctcgggcctctgttctccctctgccagatgaggagttggcctggatcatctctgagatcctttgcagctgtgatcttctagaatgttggttgtttactgatctcttgatatttgtaatttaattctgatagagaaggtggatatgtaggaagccgaattataagatttaaataatgatttttaaattgtcatcaggagagtgtgtaataaactgctaagtgaatgtacagtattgccagatgtgagaagaaagaggcgatgtctttagcctgggggtggagaggggtcaaggacagaggaaggactgagccagaccatgaggatggggcaactcggcggggctcagagcagggcagatgtctggtaggtgagaggtggggtgggcctggagtgcgccacttctgcccccatcctgctctctcccagagcacgccgaggcagacacctttttctgcttcaccaacctcatggccgagatccgggacaactttatcaagagcctggatgactcgcagtgtggcatcacctacaagatggagaaggtttactccaccttgaaagataaggatgtggagctctacctgaaactggtgaggaccccaggaacagacgggtggaaagggacaggaggcagagagttgctgtgccatcccagcccagggcgaggtctcgcttgagtctgggg

SEQ ID NO: 42899 - DNA, 2300 bp, Homo sapien
caagagcaaaactctgtctccaaaaaaaaaaaacacaaactacagcatggtcactatagttaatgtatatttcaaaattgctgaaagtagctgggtatggtgatacaccatagcctgtagtcccatttactcaggaggctgaggcccacagatcacttgatcccaggaggtcaagaacagcctgggcaacaaagcaagaccctgtcccatatttttttttgaagcagagtctcactctgttgcccaggctggagtgcagtggcatgatctcggctcactgcaacctccgccctccaggttcaagcaatcctcttgcctcagtcccccagtaggtgggattacaggcacggtccactatgcccagctaatttttgtatttttagtagagacagggtttcgccatgttggccaggctggtctcaaactactgacctcaggagggcttagtggctcatgcctgtaactttgggaggccaaggcaggaggatcactggaggccaggagttcaagaccagcctggacaacatagcgaggccccatctctataaaaaatttaaaagttagccaggcatcatgatatgtgtctgtggtcctagctactcgggagggtgaggcaggaggatggcttgagcccaggaggtcaaggctgcagtgaactgtgatcttgccactgcactccgtgtgggtgacagcacaagaccttattttccttaaaggaaaaaaaaatgctaagagtggctgggttgggtggcccatgtctataaccccagcactttgggaggccaaggtgggtggatcacaaggtcaggagttagttcgagaccagcctggccaacatggtgaaacccattctttactaaaagtacaaaaattagctgggcgtggtggcgcgcgcctgtagtcccagctactcaggaggccgaggcacgagaatcgcttgaaccaaggaggcggaggttgcagtgagcctgggcgacagagcgagactccgtctcaaaaaaaaaaaaaaattagctgggcctggtggtgcgcgcctgtaatcccagctacttcagaggctgaggcaggagaatcacttgaacctgggaggcagaggttccactgcgcggagatcacgccattgcactccagcctgggcaatagagtgagactccgtctcaaaaaataaaagtccttaaccagtccatatttctgaatattttgcttattcctgccggcagtgtaatactctggtgaatatttgcgttcgagatccttgcattcccgagatttccccagctcagccctctgcgtgggttgaacggtatgaacctttttaaggcttcgcttgtactgtactgtcaagctgttttttggaatattcgccccaggtttctgttccagccagcagccagcatcagccgtctgcatccttgtcctcaaactgctgttaattaaaatctttgccaatctgggccgggcgcggtggctcacgcctgtaatgccaacactttgggaggccgaggccggcggatcgcctgaggtcgggagtttgagaccagcctgaccaacatggagaaaccctgtctctactaaagatacaaaattagccgggcgtggtggcgcatgcctgtaatcccagctacttgggaggctgaagcaggagaatcgcttgaacctgtgaggcggaggttgcagtgagccgagatcacgccattgcactcgagtctgggcgaccagagcgaaactccgtctcaaaaaaaaaaaaaaaaaaaaagaaacctttgccaatctggtagaattgcggggcttattttatggtgtcatggaggatagcctagggccagatatacctggggccctgtgcctgctctgcgaactaggagctcactctccgagcggtgtagagggtgagactaagcagtgacagtaaaagctttcgacagtgcttgacccttccgcggagcgtattaagcaggagctccctgcgcaggcgcagaggagagagtgtctcccaccccacgaccagcagggggcctgcgaggcgggtgcggagccaggcctgatggtggccaatcgcgagctgaggcgacgatgccacgcccctcataccggcgtcttaaatgcgcaaagaaaggacgccggggacacccggttgggctctgctgctcccttctgggttccgaggcccaagcccttggcagtgtttgtgagtggaagggaggtcacgctatcgtccgcggccccagcagccctgtgccctcgttggatcccgcgacgcggctcctttaagagcctcgcgggtcgcccgccgctaggtc

SEQ ID NO: 42900 - DNA, 2300 bp, Homo sapien
taaaaaatttaaaagttagccaggcatcatgatatgtgtctgtggtcctagctactcgggagggtgaggcaggaggatggcttgagcccaggaggtcaaggctgcagtgaactgtgatcttgccactgcactccgtgtgggtgacagcacaagaccttattttccttaaaggaaaaaaaaatgctaagagtggctgggttgggtggcccatgtctataaccccagcactttgggaggccaaggtgggtggatcacaaggtcaggagttagttcgagaccagcctggccaacatggtgaaacccattctttactaaaagtacaaaaattagctgggcgtggtggcgcgcgcctgtagtcccagctactcaggaggccgaggcacgagaatcgcttgaaccaaggaggcggaggttgcagtgagcctgggcgacagagcgagactccgtctcaaaaaaaaaaaaaaattagctgggcctggtggtgcgcgcctgtaatcccagctacttcagaggctgaggcaggagaatcacttgaacctgggaggcagaggttccactgcgcggagatcacgccattgcactccagcctgggcaatagagtgagactccgtctcaaaaaataaaagtccttaaccagtccatatttctgaatattttgcttattcctgccggcagtgtaatactctggtgaatatttgcgttcgagatccttgcattcccgagatttccccagctcagccctctgcgtgggttgaacggtatgaacctttttaaggcttcgcttgtactgtactgtcaagctgttttttggaatattcgccccaggtttctgttccagccagcagccagcatcagccgtctgcatccttgtcctcaaactgctgttaattaaaatctttgccaatctgggccgggcgcggtggctcacgcctgtaatgccaacactttgggaggccgaggccggcggatcgcctgaggtcgggagtttgagaccagcctgaccaacatggagaaaccctgtctctactaaagatacaaaattagccgggcgtggtggcgcatgcctgtaatcccagctacttgggaggctgaagcaggagaatcgcttgaacctgtgaggcggaggttgcagtgagccgagatcacgccattgcactcgagtctgggcgaccagagcgaaactccgtctcaaaaaaaaaaaaaaaaaaaaagaaacctttgccaatctggtagaattgcggggcttattttatggtgtcatggaggatagcctagggccagatatacctggggccctgtgcctgctctgcgaactaggagctcactctccgagcggtgtagagggtgagactaagcagtgacagtaaaagctttcgacagtgcttgacccttccgcggagcgtattaagcaggagctccctgcgcaggcgcagaggagagagtgtctcccaccccacgaccagcagggggcctgcgaggcgggtgcggagccaggcctgatggtggccaatcgcgagctgaggcgacgatgccacgcccctcataccggcgtcttaaatgcgcaaagaaaggacgccggggacacccggttgggctctgctgctcccttctgggttccgaggcccaagcccttggcagtgtttgtgagtggaagggaggtcacgctatcgtccgcggccccagcagccctgtgccctcgttggatcccgcgacgcggctcctttaagagcctcgcgggtcgcccgccgctaggtcgctccccggccatgcgggcgctgcgggccggcctgaccctggcgtcgggcgcggggctgggtgcggtcgtcgagggctggcggcggcggcgggaggacgcgcgggcggcgccgggactgctgggccggctgcccgtgctgcccgtggcggcggcagccgagttgccccctgtgcccgggggaccccgcggcccgggcgagctggccaagtacgggctgccggggctggcgcagctcaagagccgcgagtcgtacgtgctgtgctacgacccgcgcacccgcggcgcgctctgggtggtggagcagctgcgacccgagcgtctccgcggcgacggcgaccggcgcgagtgcgacttccgcgaggacgactcggtgcacgcgtaccaccgtgccaccaacgccgactaccgcggcagtggcttcgaccgcggtcacctggccgccgccgccaaccaccgctggagccagaaggccatggacgacacgttctacctgagcaacgtcgcgccccaggtagcgcccgcgccccgggccggtcgcggaatg

SEQ ID NO: 42901 - DNA, 2300 bp, Homo sapien
tgtgagggactagactttgagcccaatcacatggtccatgtctgtttgttattgttgttttggggggatttttgtgtttgttttttcaaatggccaatgtcttaatcagtcatgcctacaaaataaacctgtcaaaaatcacaacaaatttagtataagatctaagttcgagaccaggcacggtggctcacacctgtaatcccggcactttgggaggccgaggcgggtggatcacgaggtcaggagatcgagaccatcctggctaacacggtgaaaccctgtctctactaaaaatataaaaaattagccgggtgcagtggcgggcacctgtagtcccagctactcgggaagctgaggcaggagaatggcatgaacccaggaggcggagcttgcagtgagcggagatcacgccactgcactctagcctgggcgacagagcagagcgagactgtctcaaaaaaaaaaaaatctaagttcgagaccgggcacggtggctgacacctgtaattccagcactttgggaggccgaggcgggtggatcacctgaggtcgggagttcaagaccaacctgaccaacatggagaatcccgtctctactaaaaatacaaaaattagccgggcttggtggcaggcgcctgtaatcccagctacttgggagcttgaggcaggagaattgcttgaacctgggaggcagaggttgcagtgagccgagatcatgccactgcacttcagcctgagcaacagagtgagactagatctcaaaaaataaaaggcattaatggctcaagtctataatctcagccctttgggaagccaagttgggaggattgcttgaaccctggagtctgagaccagccctggcaacatagtgagacactatctgtacaaaaagaaaaaaaaaaattagtcgggcatggtggctcacacttgtagtcccaactaatatagtctgttaattaaaagagaacgaggccgggcgtggtggctcatgcctgtaatcccagcattttgggaagccgaggtgggcggatcacctgaggtcaagagttcgagaccagcctgaccaacatagagaaactccatctctactaaaaatacaaaatcagccaggcgtggtggtgcatgcctgtaatcccagctactcgggaggctaaggcaggagaatcgcttgaacccaggagttggaggttcctgtgagctgagatcgagccattgcactccagcctgggcaagaaaagcgaaactctgtctcaaaaaaaaaaaaaaaaaaaaaaaaaaaaaaaaaaaaaggccgggtgcagtgggtcacgcctgtaatcccagccctttgggaggccgaggctggaggatcacttatggtcaggagttcaaccaggctggccaacacggggccaacatcaacaccatctctactaaaaacacacacaaaaaaatttgctgggcatggtggcacgctcctgtaatcccagcttcttgaaaggctgaggcaggagaattgcttgaacccaggaggtggaggttgcagtgagccgagatcgcgccattgcactccagcctgggcaatgaatcgagactctgtctcaaaaaaaagaaagagtacgtgaacgaatctataagaaacctggagtaaattatctcattttcagctctgaatcacactacagctcaaggccccagggtccccatgtataaagccttccaggagctaggcgtggtgctgcgcacctgtggttccagctactcgggaggctaaggtgggaggatcccttgagcccaggagctcaagcctgcagtgagctagaattgctccactgcactccagcctcggcaacatagcgagaccctgtctcaaaaaaaattatttttaaacaagtgaactactcagaggtctgagtgttgtatttgtcccaactcagaggggggctccgagccatccaaaattcagcacagtacccgcgatgccgcctatttggacacctactctgcccaacctactccagcccgcgtacccctgcagcccgtcgggcgcccaggccacgcccctgggcgatattggctctccgattggacagcttaatggaggtgtggccggaagaggcgagtctcattggcagaggcgggaccgacggtgtgtgcggaacatggcggagcgcggcaggaagcggccgtgcggcccggtaagtgcgggcggcgggaccccgtgcagggcagcatggtggaggcgtgagaaccagtggcgtgggggccttcgccggggccgggccgcgcctcctgctgcctgcttcccgctgatcccaggc

SEQ ID NO: 42902 - DNA, 2300 bp, Homo sapien
ctcactgcaacctccatctcccaagttgaagcaattctctgcctcagcctcctgagtagctgggattacaggtgccaaccaccatgcctggctaattttttgtatttttagtacaccatcttggtttcaccatcttggccaggctggtcttgagctcctaacctcatgatcagcctgcctcggcctcccaaagtgctgggattacaggcataagctgccacgcctggccccaaattcattcatttacatgtggatatttagttgtctcagcaccatttgttcatttgttgaaaagattattatttcccaccccccacccccgctttttttttgagccggtgacttgctctgtcacccagcctggagtgcagtggtgtgatctcggctcactgcaacctccgcctcctgggttccagcgattctcctgcctcagcctcctgggtagctgggactacaggcatgtgccaccatgccctgctaattttgtatttttcgtagaaatggggtttcaccatgttgaccaggctggtatcgaactcctgacctcaggtgatccgtccacctcagcctcccaaattgctggaattacaggcatgagccaccatgcctggcctccccacctttttttttgagacagtctcattttgtcgcttaggctggagtacagtggcacgatcttggctcactgcaacctttgcctcccaggttcaagcagttctcctgcctcagcctcacaagtagctgggactacagtcatgtgccaccacacccagctaattttttgtatttttattagagatggggtttcgctggtctcaaactcctgacctcaaatgatcctcccgccttggcctcccaaagtgttcgtgttacaggcatgagccacacccagcctcccaattttttttttttttttttttttgagacagagtctcactctgtcacccaggctggagtgcagtgagtggcgtgatctcggctcactgcatcctccacctcctaagttcaagtgattcttctgcctcagcctcccagtaactgggattacaggtgcacaccaccatgcctggctaatttttgtatttttagtagagacgaggttttagcatgttggccaggctggtcacaaacttctgacctgaagtgatccactcgcctcagcctcccacagtgctgggattacaggcgtgagccaccatgcctggcccccatttgagtttcttagcatcttatcaaatagcaattgtgaccatttatttctggactgtcagttctattcaattgacttatatatctatctttaagcagtatcacactttcttggttcctgtatgtttgcattaagcttccaaattgtgcagtgtgatttcttcaatttttttcttctttttcaggcatttacttttttttttttttttttttttgagacatatctccctctgtcgcccaggctggagtgcagtggtgggatcatggctcactgtagccttgacctctccaggatcaagtgattctcccactttagcttccccagtagctgggactacaggtgtgcaccatcacacctggtcaatttttgtatttttgtagagacggtgtttcagtatgttgcccaggctggtctcaaactcctgggctcaagagatcctcctgctttggcctcccaaagtgctgagtttacaggtgtgagacacattgccctgcttgaatttgttgattgcatctccatggtgttatttaacatgttcttctgtccctgtattttagtcattcaacagtgtgatctaatttagggccacttttacagcaggaataatttgcaggtggtgtatgtgtttccagagtcagaacatgtttggtttatgctcttggtgatattcagggctatcagtgatcctctcctggatcattttttaattagaggtgatttgtgttttgaaagggtcacttgggttgctggggggtgtattgtatatgagtaacagggttcttataaggacggagtcggataatcatgcaacagagcacttggtgctattcctggcacgcaatgaccatattgttgttgttgttgttgttgttgttgttgttattgttagagctgtgtgtgggggacccaagtcctgagctcggaggcattttctggccagggctgtttcctcccttctcccctgcctctggaaaagtctgcagtgccccaaggctctgggaggcatgttcaggactgcagcagccatctctgtgcacctggtggggccccttcagggaaggaaggctggagccccactcacttggttctt

SEQ ID NO: 42903 - DNA, 2300 bp, Homo sapien
acacagaaggcaccgcctttcctgagaactggcagtgcccagagaaggcaaggggccaaggctggggcagggcagagaagagggccacagctgggatctgtttctcctgagtttctgccctgtgctggcaccaggtgtacaatctgctataaggcctgcaggagctcaatgtaagtgttgttattttagtatgttaggaatttcctcacctgttaatgagggtgaggatagcacttgctttacagagttgttgaaaggatccagtgacaaaagtattgggacagagtgagtcctagtaaattaaagctggttgtattattaatattattcttggccaagtacagtggctcacatttgtaatcccagcactgggacgctgcggcaggaggatgccttgagcccaggagtttgagacaagcctgggcaacacagtgagaccacatctctacaaaaaatacaaaaattagctcaattcacttgagatgatgaagacatgacttagaatgttgtcacttcaggaaaaaaagactgatttgatggacacagagtccgatgtgggggagagtgtcagagagagaattgacctaccaggcaactgtgggtttttaactcagtggtcagaaagcagtagagtgggtcccggtagggtgaaatccagctcctcctgtagtcctagaagaagtagcaagatgttgggtctaggacaggaaatggctaacctaaagagaccctttggcccaggatggttcccatcccaagacacccctcagtcctgggccagcagatagttggtcttcatagaacaggcagagggcacagagtgcctcccatgaccagccctgggcttgggcctgcccttgggccgctcatccgtttagctgagttacctgagctaaagcaccagactccctcccttgaggtgacaccaaggaatgtccctcctgggatggcagtaacactaccctttgttgctcaaggcacaggtacttagtttcaggggtcagagtacatacttcaggcctctcctgggaaccgctctcaaatctaaggaacgagagggtgagctctggcatcgccttgtgtgttagcccattctcccactgctataaagaactgcgcaagactgggtcatttataaaggaaagagatttaattgactcacagttcctcatggctggggaggcctcaggaaacttaaaatcatggcagaaggggaagcaaacacgttcttcacatggcggcaggagagagaactgctgagcaaagggggaaaagctctttataaaaccatcagctctcatgagaactcactcattatcgccagcacagcagcatgggggtaactgcccccatgattcaattacctcccactgggtccctcccaggacacgtgggaattatgagaactgcaattcaagatgagatttgggtggggacacagctcaaccccatcaccttggatttgattcctaaggctgttgtaacaaactagccacacttcattgtattgcgtttggcagatatcacggtctttgcaaattgaagctttgtgagaaccttgcaccaagcaagtctattgttcccattgttccaacagaatgtgttcccttagggtctgtgtgtaattcccacaatagttcaaactttatcattattattatgtctgacacggtgatctgtgatcagtgatctttgatattactattgtgcttgttttggggaaccacaaaccatgcccatataagatggtaaacttaataaatgcgtgtgggccggaggcagtggctcacaactgtaatcccagcactttgggaggccgaggtgggcagatcacctaaggtcaggagttcgagaccagtctgaccaacatagtgaaaccccatctctactaaaaatacaaaaattagccaggcatggtggaatgcgactgtaatcccagttacttaggctgaggcaggagaatcgcttgaacccaggaggcggagcttgcagtgagccgagattgcgcaactgcactccaccctgggcgacaaagcaagactccgtttcaaaaaaaaaaaaaaaaggctgaacaaactgaaaaaccagcggctctttttcagttcatcagaaaattaggtcacagggtaacctgctgcccccaaactggagaggcagaaaggtagatacagagaatcatgatttgccagagcagaaaccttccctggaatcagcacctgggtgggaaaacctgaactgcaactgacgaatgtctggcagcgtggatgtgtgctgctggttaatgttaggtggcagctgga

SEQ ID NO: 42904 - DNA, 2300 bp, Homo sapien
gacttatctgcgtgtaaaatacaaagtataatacgtgggaacattcactgtctacaactgtggttctggttgttcattttacaggcggggacatggaggcccacggagtacctggcaggcccacagtccacaggttggaaagaggtgcccaagccctggactttaagcctgggctctgaccttcaacgtttgcttttcacaccacacatcatgtcaataaatagttactggatgcctgttgtgtgccaggccccaagacgggtgttgcgtgactgacaacagaaaaagcatctcagtggcgagggataagctagatcatgggcattagtgtaaatctcccagggttcaaattccagcttctccacttcctggctatgatttttttttttttttagacggagtcttgctctgttgcccaggctgaagtgcagtggcccaatctcagctcactgcaagctctgcctcccaggttcatgccattctcctgcctcagcctcccgagtagctgggaccacaggcgctcgccaccacacccggctaatttttttgtatttttagtagagacggggtttcaccgtgttagccaggatggtctcgatctactgacctcgtgatccgcccgcctcagcctcccaaagtgctgggattacaggtgtgaaccaccgcgcccggccctggctatgatattgctaagtttcctaacctctctaaggttcttttctcttctattaaaagggaaaaataagacctcccaacagaagtgaaactaggcattggcttaacacgtgatggatgggagccacgactatcttcatcatcttatttttaattatctatctgtgcacatggtagtaaatttctcgccctggcccaggtacccaagaccccaattctgtcggagacaaccgcaattaacaacttcttgtgcatcttatcagacagctggcgcgcacacccgcagatacgcccaccctcaggcgtccttctacgcaaagatggatagcacccatcaacgctgttttttctttttttagacggagtctcgctctgtcgcccaggctggagtgcagcggcgcgatctcggctcactgcaagctccacctcccgagttcatgccattctcctgcctcagcctccagagtagctgggactacaggcgcccaccaccacgcccggctgatttttttgtatttttagtagagatgaggtttcaccaagttagccaggatggtctcgatctcctgacctcgtgatccgcccgcctcggcctcccaaagtgctgggattacagacgtgagccaccgcaaccggcccaacgctgtttttactgttgtttccttttttaacctaaggtatcttagaagtcaccctacattagtgcatattaaacattgttcgtcttaatggctgcacagtattccactgtatggattattttttaatttggttgccggtactgttatcagccagggaatttgcgaggacccagcgggatttatggagctgcagagttggagtctggggacccaattccaaccccagatctgtccagaattctgttgtctcgggtatcatctccaccggcgcggtcgtgggagggggatttgggtgcagacaggaccagccccagtgtccgagcgagaatcagcgagcagcacgcgcagttgattcccgcgggcggctcaatcattctgtgcagccactccgttatacttagtagcatcaaactcattaagcactctagcacaaccaagctcggaaccgttagccgaccctcccagcctcggcacctgaccttggggaagtggcgctccgacacagctactcaccctcacctgggccgcttcacccctcgttcccaagtacaccccgtaggttgcagcagtccctgtccctttaagggggccgagcccggctccgctacttccgccccgaagcagcagggcgctagcgcggaggcgagagcgggagaaagcgccgctagaattctcctcataaagatggcgacgccctggccgccgcgttcgcgcccggcggtgacgtcacttccggggcggaggaggctgagtggtgcagtgagggacaaacaaaaggaggcgccggagcagcgctgcggccggcggcgggacggagcggccggggcctggggctgcctgccgggcggccgggcgcggcgagcccaggtgagtggacggggtggggaaaggggcgcgagctgtcacctctcgaaacccacttacacacgccctcggccagctgcccggcccggggcgcccggggcatctggggctctgtctccg

SEQ ID NO: 42905 - DNA, 2300 bp, Homo sapien
ccacggcagtgatccccaggattccctacagtccagaaaggtcattcaagagtttgcaaaggaaacggcttcctggtgggtgtgcctaagggatggagaaccaccacatctagtcaagttctggggggaagtcatgaacatttcctgtgcccccgctctgtttttttttttgtttttttgagatggaattttgctcttcttgcccaagctggagtgcaatggcgcgatcttggctcactgcaacctctgcctgctgggttcaagcaattctcctgcctcagcctcccgaatagctgggattacgggtgcgcagccccatgcctggctaattttttgtatttttagtagagacaaggtttcactatgttggccaggctggtctcgaactcctgacctcgtgatctgcccgcttcagcctcccaacgtgctgggattacaggcgtgagccaccacgcccggccctgcaccccctgctctgtaccctatggtccctagaacgcagagggcatcagaccccatgccaaagccctgagaccaggaaaacaaggaagcagagaccagccacccagtcactcatccctggcatgtccacaacagcctcctccagcacaggtcatctgtccttgcctcacttcatgagccagaggaagacttgaccttcatggaagcaacaccagtgagactgagcaatcagcactgcccagtctctctgaacaaactcccactcccacatcccctccacaggaagtatcagcaacagccgatctcctcccgcttcttacagcctgtctgtctgccaggttgtctgctccaaagggcagaatacagtttggcaggggttaagagtactactaacagaagaggtggaagaggtccttgggaacttcgggctcccccagttcccttcctcttaccaggtgctctccctccacacctcattctcaaaaggcttcctgaggtagggcaggggaagaggagtcagtggaagtgtggctcacccaggaaccgcccacccttccagccaagtctccatcaggaggcggctaccagacaacccccgacccatccctccttcccaaaaaaggcaacaatcgcaacagctgagaaccggcagacctcggttcaccccggtccagatcaaggggaagaagcagtcagcgaaagcagcagaatcatcatgaactccatgaccccagctatgccccttcagcctgggagctcagtttgctgggtatccagctcacctagggctgcaccaggcctggacctcactggatctcgcctcgccctcgggcccacctgaatgcacaggactgggacagggtctgggttcttagattccggaccggtcttcccaaatatcccatcccagaaaggccccaagagcctagccggggatcctgcccccaagtcagggcactgcccccatcggaacgataggaaggaggggtgcaagggaagagaaggggaccaggaactcaggagaagacagctaaggaaatctttgaaaaagaaatggcaaggagagagcccagaggtggaacctctaggaacgggagagtgtgtgtggaggggtgaggatctggggggacccaggggatgacaaggggacatgggggagccgaggcggaaactcctggtttctgaagcacaaggaggcacaggggtgcctgggagggggctcgcgcgccgcggagccggcgagaaggtggtgccccggagactccgggcactggggagcccagaggtaggccgaacaccgcgggaggtccccagggggccggcccggagacagagccccagatgccccgggcgccccgggccgggcagctggccgagggcgtgtgtaagtgggtttcgagaggtgacagctcgcgcccctttccccaccccgtccactcacctgggctcgccgcgcccggccgcccggcaggcagccccaggccccggccgctccgtcccgccgccggccgcagcgctgctccggcgcctccttttgtttgtccctcactgcaccactcagcctcctccgccccggaagtgacgtcaccgccgggcgcgaacgcggcggccagggcgtcgccatctttatgaggagaattctagcggcgctttctcccgctctcgcctccgcgctagcgccctgctgcttcggggcggaagtagcggagccgggctcggcccccttaaagggacagggactgctgcaacctacggggtgtacttgggaacgaggggtgaagcggcccaggtgagggtgagtagctgtgtcggagcgccacttccccaaggtcaggtgc

SEQ ID NO: 42906 - DNA, 2300 bp, Homo sapien
cttgggcaagaagagcaaaattccatctcaaaaaaacaaaaaaaaaaacagagcgggggcacaggaaatgttcatgacttccccccagaacttgactagatgtggtggttctccatcccttaggcacacccaccaggaagccgtttcctttgcaaactcttgaatgacctttctggactgtagggaatcctggggatcactgccgtgggtcagaactcagggaagtggccggaccctgggttgctgcctggcttggcctggaccttgcctgtaggagttggagggaaatcagcctggttcctgactgcctcgtcttagagtagagctgattccaggttttcacatggagaaactgaggcacacactgatgggccaagacctcttggagattcaggtgggatggatgtggggctcttagagcccagcacagtgtctctccatgccttgactcattcattcattcattcattcattcagccattctttagaaagtgcctgtcttgggcctgggatggctgggaaaacatccctggcctcctgagagctgcagtctgggaggacaggcaaaccagaagacacataagttctgatatactgtggccaccatattaatagaaatattacagaggcagcccagaggaagaaggaattagctctgggtggttatgtagggggtggtcagggtatgctttctggaagaggagggactagaataattagtgacagggagtccaggggcccaagttctggacctggctctgccatgggcaggtgattggaccacccagcctcagtgggtgccccatccttgacaaggagggtagagtgaggtagaggttggcttggatggcctccgtgcctatatagctgtaggtactttactgcctagtcaccaccaccccgtatggaattgcagggttattgacctacctcccatgacggcggagaccatcttccatgtctgccctcccagcacagggcctggaacttagtcaatatagtaaatacccagtggtagaaatgatggaaaaacagccatccctcctagatcagtccaggtgtctttgtctacccccgccctcctccttcctgggtaactcctgctgatcctttggctctctctggtggctgggccactctcccagctcctggctccccgaaacccgtgtcgtagtgatcacagctttccctaccctgccactcccatgcacagttctgcacagtgtctggcgcatatggagtagatgctcaccagaggctggttgactgtcggagatgatgggtggatttggtgtttaagttggagtctgggcactggctggtctctgcctgacccagccaccccactgtggctcatctcttgccacttcccctctctggctctggatctcgccatgccgagcccgcaagccttctccagatgccatgtactctctcctccaggtaaacatgtgctgttcctcctgcctggaatgctctttttccagctcctactcttaggagtcaactcagacaactcctcctccagaaagccttccctgaccccactagtctgggtctagtgcttctcctggctcccccgcagcagagctctgagctctcagaccgtcgctactgacttggcacctcctcagtagaccaggttctggagggaggtgctctgtcagaacctcttttgtctgccaggcgcggtggctcatgcctgtaatcccaatactttgggaggccgaggcgggcagatccctggaggttaggagtttgagagcagcctggctaacatggggaaacgctgtctctactaaaaatacaaaaaattagccaggcttggtggtgcgcacctgaaatcccatctactcgagaggctgaggcaggagaatcacttgaatgcgggaggcggaggttgcagtgaaccgagattgcaccactatacaaaaaaaacctcttttgtcaccccagagcccagccaagggcctgctaccaagcaggctctcaggaagtgctggcggtgtggcaggtaactgcgacagtcacacatgtgcctgctgacggcagctctcgcttccttgtagggaggcagcgtccatggagcaaaaggaatgccaggatcctgcacaggcagacgcgggccagcctcagcaccgacagccgacgcgcagatagcagagccatccttggggtaaggactgggcccctctccttctcagccagctccagctccagtcaagtgcccttcccagcctggggagcaaagggtagcatctccatccccacagtcctttgcttttcttgctgtaggtcca

SEQ ID NO: 42907 - DNA, 2300 bp, Homo sapien
aaattccacatgggggctggcatggtggctcacgcctgtaatcctagcctgtaatcccagcattttgggaggatgaagtgggaggatcgcttgagtccaggaggttgaagctgcagtgagctatgaccccgtcgctgtactccagcctgggtgacagagaccctgcttcaacaacaaaattccacatgtgtgtatagttatgtgtgtacaagattctgggaacactcggaagaccaaaggtcacatagtgggtcttaatgacaggctcctaggggagcggcctcaagagaggggattaagaataaggctctcctccctcacaaactgggtgatcacagagaggccttaatgtaaaatcatctctggttgcgtgtgtataaaggaattaaaaacagcagcaacagcaggctctcccagagagagtctagtttgactactatggcgagaagctggaaatctgatttttcttttttttttgagacggagtcttgctctgtcgccaggctggagtgcagtggcatcatttcggctcactgcaacctctgcctccagggttcaagtgattctcctgcctcagcctcccgagtagctgggactacaggcctgcaccaccatgcccaggtaatttttgtgttttttagtagagacaaggtttcacgatgttgaccaggatggtctcgatccctttacctcctgatctgcccgtctcagcctcccaaagtgctgggattacaggagtgagccaccgtgcctggctgggaacctgatttttaacacataactttggtgactctaatgattggccaagcttgggaaacactggctgagaagccacattaggaaacccagactgtgctacacaggaggcacgcagcaagatctctgtgagaatgcctctctgtggccattcgtggtcacacggccaaggctggttgctcttacaatgaaagacgtatggctgtcacggagggataaggtactagatgttccctggagaacatacggaaaattgtaaaaaagcgtagcagcaaaaaaagaagaatccgctttacaatccccaccagggttacacactgttaacttttcactgaataataaccttccagtcctttctgtgtattttataattttataatttttcttgtaagagattggatcttgctctgttgcccaaactagagtgcggtggcgtgatcatggctcactgcagcctcaacctcctggtcaagcaatcctcctaccttagcctcccccaggtagctggggctacaggtgtgtgccaccatgcctggctaattttttttttttttttttttttttttgagacggagtctcgctctgttgcctaggctggagtgcagtggtgcgatcttggctcactgcaagctccgcctcccagattcacgccattctcctgcctcagccttccaagtagctgggactacaggcacccgcccaccacacccggctaatttttttttgtatttttagtagagacggggtttcaccgtgttagccaggatggtctcgttctcctgaccttgtgatccgcccgccttggcctcccaaagtactgggattacaggtgtgaaccaccatacctggcccatgcccggctaatttttaaaattttttgtagagacaggatctcactatgttggccaagttggtttcaaactcctggcctcaagcaatcctctggccttagcctcccaaagtgttggcattacaggagtgaggcactgcacccagccctttctgtgtattagaataaattgtgcttttatttatttatttatttagagacagagtattgctctgtcacccaggctggagtgcagtggcacaatctcagctcaccacagcctccgcctcctgggttcacatgattctcctgcctctgcctcccaagcagctggattacaggcacacgctaccacgcccagctaatttttgtatttttagtagaaacggaatttcgccacgttggccaggctggtctcgaactcctgacctgaggtgatccacctgccacggcctcccacagtgctgggattataggtgtgagtcaccatgcctggccaaattgtgcttttactttacattcaatttttactttacactgtaacccagaacctagatttttatctaaaccaagttttaaatgcctgtgtcaaatgtgtctgtctctcttaggagaggaacaggggtgcccagatgatgggccacctttctttgattactgataatgttaataaccagaatagtaacaaactttttttttttccctttttgagaca

SEQ ID NO: 42908 - DNA, 2300 bp, Homo sapien
tctcaaaaaaaaaagaaaaatcagatttccagcttctcgccatagtagtcaaactagactctctctgggagagcctgctgttgctgctgtttttaattcctttatacacacgcaaccagagatgattttacattaaggcctctctgtgatcacccagtttgtgagggaggagagccttattcttaatcccctctcttgaggccgctcccctaggagcctgtcattaagacccactatgtgacctttggtcttccgagtgttcccagaatcttgtacacacataactatacacacatgtggaattttgttgttgaagcagggtctctgtcacccaggctggagtacagcgacggggtcatagctcactgcagcttcaacctcctggactcaagcgatcctcccacttcatcctcccaaaatgctgggattacaggctaggattacaggcgtgagccaccatgccagcccccatgtggaatttttttttttttttttttttttgagttggagtttcactcttgtcgcccaggctggagtgcaatggcacaatctcagctcactgcaacctccacctcccgggttcaagtgattctcctgtctcagcctcccgaatagctgggattacaggcacccgccactacgccaggctaatttttgtatttttagtagagaccgagtttcaccatgttggccaggctggtcttgaacttctgacttcaggtgatccacccacctcggcctcccaaagtgctgggattacagacgtgaaccacgtggaatttttaaaccttgctctttgttttatggaagtgagttcatgttgtgccccctctgcatgttgctttctttcctcatattttgcgggaatccctccagccctttgctgcagctttacagcagctggttcccagtgaactgggagttttaaatgtgtccctctggtcaatctgttcattaaataggtggactttagaaaggagttcccgattgctcttactggaatgcaagggatggagcagagaaccctgaggctgcactggggatctgtctaatctcactgtgctcagtcttcctgtgtattaaatggggagcctgcctgcctcccccagggtggtttcccagccaagtggccacatgctttctgcagaagggctgataagtgggctgccccgtggagtaggcaggctttggctcccagctagatttgaggtggaattttggacaatggaagaattttcattgtcttcttcccctgacccctggtcctaggaaagccaggccaccctgtgctaacccccctcctatggctcccttttaggttgaaccatgattccggtgacagagctccgctactttgcggacacgcagccagcataccggatcctgaagccgtggtgggatgtgttcacagactacatctctatcgtcatgctgatgattgccgtcttcggggggacgctgcaggtcacccaagacaagatgatctgcctgccttgtaagtgggtcaccaaggactcctgcaatgattcgttccggggctgggcagcccctggcccggagcccacctaccccaactccaccattctgccgacccctgacacgggccccacaggcatcaagtatgacctggaccggcaccagtacaactacgtggacgctgtgtgctatgagaaccgactgcactggtttgccaagtacttcccctacctggtgcttctgcacacgctcatcttcctggcctgcagcaacttctggttcaaattcccgcgcaccagctcgaagctggagcactttgtgtctatcctgctgaagtgcttcgactcgccctggaccacgagggccctgtcggagacagtggtggaggagagcgaccccaagccggccttcagcaagatgaatgggtccatggacaaaaagtcatcgaccgtcagtgaggacgtggaggccaccgtgcccatgctgcagcggaccaagtcacggatcgagcagggtatcgtggaccgctcagagacgggcgtgctggacaagaaggagggggagcaagccaaggcgctgtttgagaaggtgaagaagttccggacccatgtggaggagggggacattgtgtaccgcctctacatgcggcagaccatcatcaaggtgatcaagttcatcctcatcatctgctacaccgtctactacgtgcacaacatcaagttcgacgtggactgcaccgtggacattgagagcctgacgggctaccgcacctaccgctgtgcccaccccctggccacactcttcaagatcctggcgtccttcta

SEQ ID NO: 42909 - DNA, 2300 bp, Homo sapien
catgttgctttctttcctcatattttgcgggaatccctccagccctttgctgcagctttacagcagctggttcccagtgaactgggagttttaaatgtgtccctctggtcaatctgttcattaaataggtggactttagaaaggagttcccgattgctcttactggaatgcaagggatggagcagagaaccctgaggctgcactggggatctgtctaatctcactgtgctcagtcttcctgtgtattaaatggggagcctgcctgcctcccccagggtggtttcccagccaagtggccacatgctttctgcagaagggctgataagtgggctgccccgtggagtaggcaggctttggctcccagctagatttgaggtggaattttggacaatggaagaattttcattgtcttcttcccctgacccctggtcctaggaaagccaggccaccctgtgctaacccccctcctatggctcccttttaggttgaaccatgattccggtgacagagctccgctactttgcggacacgcagccagcataccggatcctgaagccgtggtgggatgtgttcacagactacatctctatcgtcatgctgatgattgccgtcttcggggggacgctgcaggtcacccaagacaagatgatctgcctgccttgtaagtgggtcaccaaggactcctgcaatgattcgttccggggctgggcagcccctggcccggagcccacctaccccaactccaccattctgccgacccctgacacgggccccacaggcatcaagtatgacctggaccggcaccagtacaactacgtggacgctgtgtgctatgagaaccgactgcactggtttgccaagtacttcccctacctggtgcttctgcacacgctcatcttcctggcctgcagcaacttctggttcaaattcccgcgcaccagctcgaagctggagcactttgtgtctatcctgctgaagtgcttcgactcgccctggaccacgagggccctgtcggagacagtggtggaggagagcgaccccaagccggccttcagcaagatgaatgggtccatggacaaaaagtcatcgaccgtcagtgaggacgtggaggccaccgtgcccatgctgcagcggaccaagtcacggatcgagcagggtatcgtggaccgctcagagacgggcgtgctggacaagaaggagggggagcaagccaaggcgctgtttgagaaggtgaagaagttccggacccatgtggaggagggggacattgtgtaccgcctctacatgcggcagaccatcatcaaggtgatcaagttcatcctcatcatctgctacaccgtctactacgtgcacaacatcaagttcgacgtggactgcaccgtggacattgagagcctgacgggctaccgcacctaccgctgtgcccaccccctggccacactcttcaagatcctggcgtccttctacatcagcctagtcatcttctacggcctcatctgcatgtatacactgtggtggatgctacggcgctccctcaagaagtactcgtttgagtcgatccgtgaggagagcagctacagcgacatccccgacgtcaagaacgacttcgccttcatgctgcacctcattgaccaatacgacccgctctactccaagcgcttcgccgtcttcctgtcggaggtgagtgagaacaagctgcggcagctgaacctcaacaacgagtggacgctggacaagctccggcagcggctcaccaagaacgcgcaggacaagctggagctgcacctgttcatgctcagtggcatccctgacactgtgtttgacctggtggagctggaggtcctcaagctggagctgatccccgacgtgaccatcccgcccagcattgcccagctcacgggcctcaaggagctgtggctctaccacacagcggccaagattgaagcgcccgcgctggccttcctgcgtgagaacctgcgggcgctgcacatcaagttcaccgacatcaaggagatcccgctgtggatctatagcctgaagacactggaggagctgcacctgacgggcaacctgagcgcggagaacaaccgctacatcgtcatcgacgggctgcgggagctcaaacgcctcaaggtgctgcggctcaagagcaacctaagcaagctgccacaggtggtcacagatgtgggcgtgcacctgcagaagctgtccatcaacaatgagggcaccaagctcatcgtcctcaacagcctcaagaagatggcgaacctgactgagctggagctgatccgctgtgacct

SEQ ID NO: 42910 - DNA, 2300 bp, Homo sapien
aatttttgtattttttgtagggacggggttttgccatgttgcccaggttggtctcgaatccctgagctcaagagatccacccacctcagcctcctaaagtgctgggattataggcgtgagccaccgtgcttggcccctcatgagttttgatgggtggggatgggagaggagggcactggaatgggaaccagtagtcctgggcctttgtcccagcttcatgggacaggatgtgcatgaagctaggcagatcccttctccagtggcctctgtatccccatgtggacaatgggaatttccactctgtgctctcaaaggtcccttgcaattccaacagtgagtcccaagtggtctacagaggtggggctgagagtcatcgtggggaagcctgcctcagctcccagcccctttgggggcctttgggaggtagtgtggtaaagggcagaggctgagacagctgcttccagatgccagttctgccgtgtttgatgtggggcttcagtgttctcatttgtaaaatcaggaaggtaatggcacacttgcaggactgttcaaggaacaatggcgattatgtaggtagatggggtttttggtggaggacctggctgctagtacccaataaatggccttgtatcttccacccagaccaaggatccttgtggtgggccaacgtgggcgccctgcggcaggagactgggtgaggaagaaaggccatcatatctgactttgaccttagtgatgaggcctgggtggctgcttgggcacctcctctacaactggacagagtctatccctcctccctccacggggactctgacccctccaggtgaactcaggcctgagccaagattccctccctcttctccccctgccatgggctgacaggctgagcagctggactgtgactgccgggctggggccttcttttctgtttccgtggtggaggtccctcccccagtttggtacccttcccaccaccccccgaccccactcccgcccccaccctggccttgaggctgtccagcgcctggagcaggagagttcgatctggagctggtttacatttggaaaaaaccaccatgtagaaacaccgcccacccacttcccaaagttgagcagaatgaacagttagtgggaggctgggcctctcccctccccctcccccacccacccagggctctccactctgcctaaaaccactgtggtggtcttctctctgattgtaacagcaattttggaagctcaaaaaaattgtttaaattatattccacccagctgggcgcggtggctcacgcctgtaatcccagcactttgggaggccgaggcaggcagatcacaaggtcaggagattgagaccatcctggctaacgcggtgaaaccccatctctactaaaaaatataaaaaattagccaggcgtggtggcaggcgcctgtaggcccagctactggggaggctgaggcaggagaatggcgtgaacccgggaggcggagcttgcagtgagctgagattgcgccactgcactccagcctgggtgacagagcgagactccatctcaaaaaaaataaataaaataaaaaataaataaataaataatattccactcagaacagcccctgctaacatttggtgaacaacttgttcaccagttggtaggcacttactcagcgccaggcctggtgccaagctctttatcagctgcgaagcattcatcttatttactgctcacaggggatcctactgctagccccaaattacagactgggaaagtaaggcctgaacatctgggacgcaaacacagtctgcttcactgagtctctactacaagccttctgtgggggctcccaggggaatggctggcccagtccgaggggacctcagtgttcttggcacatggtaggcatctgtctttgttgggcagttgcatcagaagggttaaggacagctgggaacacatcctgcctctagtgaacctcgtggttctgtcatctgcctgcccctcacccagcctaacccctctgaaccaggagcctgagctgcacttactgctcccccctgccccccggacggcctggaccaagcagcagctcccagagcggtggcccagcaaacacgacttgactcgaggccaaggctcttgagggctgagcagtgtccccatgcacactcctgaaacactttgtcccttcgccattcagaaggcatcattttggggaaggcagcagccggtttttcagagccagcgagtggccctgccagctgctgagcagggcaagctgagaagggtggtggtgtgcaagtgtta

SEQ ID NO: 42911 - DNA, 2300 bp, Homo sapien
aaatcaggaaggtaatggcacacttgcaggactgttcaaggaacaatggcgattatgtaggtagatggggtttttggtggaggacctggctgctagtacccaataaatggccttgtatcttccacccagaccaaggatccttgtggtgggccaacgtgggcgccctgcggcaggagactgggtgaggaagaaaggccatcatatctgactttgaccttagtgatgaggcctgggtggctgcttgggcacctcctctacaactggacagagtctatccctcctccctccacggggactctgacccctccaggtgaactcaggcctgagccaagattccctccctcttctccccctgccatgggctgacaggctgagcagctggactgtgactgccgggctggggccttcttttctgtttccgtggtggaggtccctcccccagtttggtacccttcccaccaccccccgaccccactcccgcccccaccctggccttgaggctgtccagcgcctggagcaggagagttcgatctggagctggtttacatttggaaaaaaccaccatgtagaaacaccgcccacccacttcccaaagttgagcagaatgaacagttagtgggaggctgggcctctcccctccccctcccccacccacccagggctctccactctgcctaaaaccactgtggtggtcttctctctgattgtaacagcaattttggaagctcaaaaaaattgtttaaattatattccacccagctgggcgcggtggctcacgcctgtaatcccagcactttgggaggccgaggcaggcagatcacaaggtcaggagattgagaccatcctggctaacgcggtgaaaccccatctctactaaaaaatataaaaaattagccaggcgtggtggcaggcgcctgtaggcccagctactggggaggctgaggcaggagaatggcgtgaacccgggaggcggagcttgcagtgagctgagattgcgccactgcactccagcctgggtgacagagcgagactccatctcaaaaaaaataaataaaataaaaaataaataaataaataatattccactcagaacagcccctgctaacatttggtgaacaacttgttcaccagttggtaggcacttactcagcgccaggcctggtgccaagctctttatcagctgcgaagcattcatcttatttactgctcacaggggatcctactgctagccccaaattacagactgggaaagtaaggcctgaacatctgggacgcaaacacagtctgcttcactgagtctctactacaagccttctgtgggggctcccaggggaatggctggcccagtccgaggggacctcagtgttcttggcacatggtaggcatctgtctttgttgggcagttgcatcagaagggttaaggacagctgggaacacatcctgcctctagtgaacctcgtggttctgtcatctgcctgcccctcacccagcctaacccctctgaaccaggagcctgagctgcacttactgctcccccctgccccccggacggcctggaccaagcagcagctcccagagcggtggcccagcaaacacgacttgactcgaggccaaggctcttgagggctgagcagtgtccccatgcacactcctgaaacactttgtcccttcgccattcagaaggcatcattttggggaaggcagcagccggtttttcagagccagcgagtggccctgccagctgctgagcagggcaagctgagaagggtggtggtgtgcaagtgttattctctctttttgtttttgtttttgttttttgagatggagtcttactctgtcgtccaggctggagtgagtgccgtggcatgatctcggctcactgcaacctccgcctcctgggttcaagcgattctcctgcctcagcctcccgagtaactgggactacaggcacctgccaccatgctcggctagtttttggtatttttatttattatttatttatttattttgagaccgagtctcgctctgtcgcccaggctctagtgcagtggcccaatctcggctcactgcaagctccgcctcccgcgttcacgccattctcctgcctcagcctcgcgagcagctgggactacaggtgcccgccaccacgcccggctaattttttgtatttttagtagagacggggtttcaccgtgttagccaggatggtctcgatttcctgacctcgtgatccgcgcgcctctgcctccaaagtgctgggattacaggcccgagccgccgcacccggcctgcaggtgttg

SEQ ID NO: 42912 - DNA, 2300 bp, Homo sapien
gtggcaggcgcctgtaggcccagctactggggaggctgaggcaggagaatggcgtgaacccgggaggcggagcttgcagtgagctgagattgcgccactgcactccagcctgggtgacagagcgagactccatctcaaaaaaaataaataaaataaaaaataaataaataaataatattccactcagaacagcccctgctaacatttggtgaacaacttgttcaccagttggtaggcacttactcagcgccaggcctggtgccaagctctttatcagctgcgaagcattcatcttatttactgctcacaggggatcctactgctagccccaaattacagactgggaaagtaaggcctgaacatctgggacgcaaacacagtctgcttcactgagtctctactacaagccttctgtgggggctcccaggggaatggctggcccagtccgaggggacctcagtgttcttggcacatggtaggcatctgtctttgttgggcagttgcatcagaagggttaaggacagctgggaacacatcctgcctctagtgaacctcgtggttctgtcatctgcctgcccctcacccagcctaacccctctgaaccaggagcctgagctgcacttactgctcccccctgccccccggacggcctggaccaagcagcagctcccagagcggtggcccagcaaacacgacttgactcgaggccaaggctcttgagggctgagcagtgtccccatgcacactcctgaaacactttgtcccttcgccattcagaaggcatcattttggggaaggcagcagccggtttttcagagccagcgagtggccctgccagctgctgagcagggcaagctgagaagggtggtggtgtgcaagtgttattctctctttttgtttttgtttttgttttttgagatggagtcttactctgtcgtccaggctggagtgagtgccgtggcatgatctcggctcactgcaacctccgcctcctgggttcaagcgattctcctgcctcagcctcccgagtaactgggactacaggcacctgccaccatgctcggctagtttttggtatttttatttattatttatttatttattttgagaccgagtctcgctctgtcgcccaggctctagtgcagtggcccaatctcggctcactgcaagctccgcctcccgcgttcacgccattctcctgcctcagcctcgcgagcagctgggactacaggtgcccgccaccacgcccggctaattttttgtatttttagtagagacggggtttcaccgtgttagccaggatggtctcgatttcctgacctcgtgatccgcgcgcctctgcctccaaagtgctgggattacaggcccgagccgccgcacccggcctgcaggtgttgttctgaccccagctccactgtgccagcccgacttgagatgccaagtatcttgggcctgagggtgggtaacaggaagcatctctctctcctcagccccttcctcctactaagataccccatgtctcctactttcgtctgagctgcagatggatgcgttaattcccttccataatcctcccaggaccgagagggtttcagatcggtgctgggaggggcccagatagttctccccaggacctcttccacctttggaatgcccattacctggagaaggggggtgccgcacatcccccagaccaaccctgcatcccattctatccagattgaggcctagagagaggcaggcgttcctcagagtcacagggaatggcggcgcctggactgggactcagcccagctgcttggcctgaccctctcacagcataatttcccggcacctggtaagcagtggtggggggtggtttccagaagaaacacagaggaagcagataaaatccttggagatgggaaagggcaaatcctggattagttgtgggggtgggggagattagcctggaggtcacaggctgatctggctgtgtctagggaaggagggttgggtggtgggaccgggttttctccgggtagggaagggttaagtcctcccaggctcctaaactttctcctccccaccaggaggccgcgcttagaagccgcccagtgccctgagcgtctccatggcctgcctgagcccctcgcagctccagaaggtaggagcctgcaagtcggggccgggagggtcatggcgggggggtccctgccggaccttcagtagtcccagtgcccaacccaccccctgccccattttaccgaggacgaaactgaagcccagaggagcgggttcccaaccgcaacccctcctga

SEQ ID NO: 42913 - DNA, 2300 bp, Homo sapien
gctcttcatgcccaagtagctgtctgctgtggggactgttcaccctccccatgtctgtttcctccgtcactgctgctgcactgtaacagctaggccatcagcaatatcaggaggtagagaggcagaaggagattgtctatctgtgtagtgtatgcttccaggagggacacagtgctgatggaccccaaaatccaagcataactgtagtttaggtccactccactgtcaaagattaagatcagagctacagaaatgatctgcgcaaatatagatgtcatggtcccctcaaaagtctttttggttccaggccagcggatctcccccatggtgctaccgaagatggaggccacagtatcacccacacccacagccaggacaccggcataggggacgagggccctggctcctcccaggctacccttctgtgtgcagggtctggggatcagccagatgggaagagacatgcccaggagcaggtagatgtgtgtcagaatgagtggtccactgtctcgttcatccagaaaaagggacaggaagctccgtagagtgtgacccaaaggcttgatgcggaagtagcgcacatactccaggaagatgaagaccgccaggcatacagtggcggctacatagagcagtggccggtcaaagatgatacctgggatgtaggtggctaccacaatgaggtggaaatactttcgggcgatggtgggggcctggtgcttcttggactcggaagatgaccgcttggcattctggtacagcaccaccaggcaggccaaggtggccagcagagaccaataggctaggaggtagatgcgggtgtctgtctggaagagaaactgaagaagccagagcaggggattcctgcggatgagccggtgcagccagggtaggaccacaccaaggctcagcacacaggtcatgaggtggaagaagatggaggaggcccaggtgcctgagtccatgaagacaaacagagtgctgaagaaaatgcccatgagtaccatccctactaccaccaccagcaggaagaagtccactgggtccccctgactttccaccagtgtcagagagcgcttgatgagctggttgaggacaaagctaatgccacccaataccagcagtgcctcaccaggggtgaagcagcggggcagcaggtacagcaggatcatgttgagataaacgaagatcagaaggacttccaggacttcgatcacctcccccacgctcaacgagtgcttcatgatataaatgataacacctccagccaagcccaagatgacacaagtgttggttggcactgggcgagtgatgccgagcgccaacactgatgagaagagggccactgccatgccagtggctgccaccacaatgccaaaacgctcaaagaacgggttcccagcagtctggcaccgctccttcatgactagtccaagcaaaggcatgaccatggaggcgggcaataggccactgtttgcggacattcggaactggaagacggcgcttccctgctgtagcagccggtcccacttgtattggacgtagaaggcctgcactgcgagggccacggcgcaccacgagtatcggtcccatacggttgcgtggatgctcagcaccactgcaaacactactgccgcctctgccagcaccgatccactcagcggagccccaggccccggggccggagatgggcactctcgggtcatatctctagacctggggcttcacggaggccggggcgactacggacgccctagacttcgggcccctcagccccgtcaagcagagggaggcactttcacccggccagcaaccttctccctccgttctccagcagcgaggagggaactccaccgcaggtcacttctgcggcctgggagctggcgcccggccaccccccacagcctccaacctacggcgtagacgtcgccactctgcagccttcctcacagttacagccgcccccgctgccggctcctcacctctttgggcctcgccatcttggcaccgccccgcggcaacgtcacgtgacgaaatccccgcccacgctccgggtccgggggcgagcggtcacgtgggcatggcgtctgggggcggggttagggcgagcgggcgcgcgaagatggcggcggccgccggcgggccgtgtgtgaggtgcggagcgggtcgaatggaccggggtggctgtgaagcgcggtgtcaaagccgagcggaagcggggcgggaattggaggcgggatgtggcgacagtggcagggccaaccccggctggatggacgggcaccgagacgggaggcggt

SEQ ID NO: 42914 - DNA, 2300 bp, Homo sapien
aacatggtgaaaccctgtctccactaaaaatacaaaaattagccaggtgtggtggcatgcacctgtaatctcagctactcgggaggctgtggcaggaaaatcgcttgaactcgggaggcggaggttgcagtgagctgggatcatgctgttacactccagcctgggtaacaagagtgaaactccatctcaaaataaataaataggccaggtgtggtggctcacgcctataatcacagcaatttgggaggccaaggagggcagatcacctaaggtcgggagttggagaccagcctgaccaaaatggaaaaaccccatctctactaaaaatacaaaattagtcgggcgtggtggtgcatgcctgtaatcccagctactcgagaagctgaggcaggagaatcgcttgaacctgggaggcggaggttgcggtgagccgagatcacgccattgcactccagcctgggaaacaagagcgaaactctgtctctaaataaataaatgtgtttacttcctacatttaaaaaaaggttttttttggtaacaaaagctacacaaagaacccagagaacccactcaagaacaccaccacttaccagctctctcagagctgaccttccaagcagaatagtccacagttctctactgctcctgcaaaatgagagaacagaggtaattttgctctttctgatcatacaaacttgtacactgcctcatagccattttgtctgctctctaaaagcaaaaaatctcaatatacaaaacgatttgttaaatttttggaaagtaatcttgttatataataatattgttagggccgggcacggtggctcatgcctgtaatcccagcactttgggaggtcgaggcgggcggatcatgaggtcagaagatcgagaccatcctggctaacacagtgaaaccctgtctctactgaaaatacaaaaaattagccaggcgttgtggcgggtgcctgtatccccagctacttgggaggctgaggcaggagaatggcatgaacccgggagacagagcttgcagtgagccgagatcgtgccattgcactccagcctgggcgacagagcgagactccgtctcaaaaaaaaaaaaaaaaaaaaaaaaaaaaaaaagtggggaaaacactgctggcacagggaaggataagagacggggatgtttaactttgagggagggtggtgggaagaacgaagaccttcgagctgcaatgtggaagacagaaggaggcgtggtggtctggttatagcactggaggtacgcagacttcagcttgaaggctctctttatcacttggctagctctgagccggacttctgagtcatctgtgaaatagaaggcgcctctcggagttgcgagaattgaatgagataactcctgggaagcgctccaccagggtctgacgctagaaagcactttgtcagaattgtagttttcgtatataatatttcatcttcttgtccctaaagcctagttcaatccctgaaatctcttggaggatttggacatgctggctgacttgattcagtgcaagaaaagaacgatacgaggcgcggagaggacagaagccgcaagcgtggctccgctcaacgcgaaacaaaatcctaacaagaacagatcgcgggagaggtcggggagccagcagggcgcactcgacgccggggcaggacactgggagcctgcagcagggacgtgggtggggggtaccccaggagaccgcaaagctccccgtggctcgagggagcgtcacggccggagaaggaagcgcgggtggggcgccaagagacgcgtcggaggtgagagaggaggaaggcaaagggccctgggtgaggagatgggaggccgagcgcggagggaaggggtgaagagccggcccccctcctgaagaagactcttcagatccccgcgcgcggggaccgtttggacgtaaccgcctcccgtctcggtgcccgtccatccagccggggttggccctgccactgtcgccacatcccgcctccaattcccgccccgcttccgctcggctttgacaccgcgcttcacagccaccccggtccattcgacccgctccgcacctcacacacggcccgccggcggccgccgccatcttcgcgcgcccgctcgccctaaccccgcccccagacgccatgcccacgtgaccgctcgcccccggacccggagcgtgggcggggatttcgtcacgtgacgttgccgcggggcggtgccaagatggcgaggcccaaagaggtgaggagccggcagcgggggcggctgtaactgtgaggaaggctgc

SEQ ID NO: 42915 - DNA, 2300 bp, Homo sapien
actcacccagaattcttgcactctagtctgggtgatagagcatgaccttgtctttaaatataaataaataaataagtcaaccaacccatccacccttaagcagtttttttgtttgtttgttttttgagacagagcctcactttgttgcccaggctagagtacagtggcatgatctcggctcactgctacctccattgcctgggttcaagtgattctcatgcctcagccactcaagtagctgggattataaggtgtgcgccaccacacctggctaactttcgtatttttagtagacatggggtttcaccatgttggccaggctggtctcgaactcctgacctcaagtgatctgccggccttgcctcccaaagtgttaggattataggggtggcccccacacccagccaaccaaccaattcttaaccagttttttctgactttctatattaaggtgtttattttattttatttatttatttgttttcaagaagaggatttactatgttccccaggctgctctggaactcctggattgaagtggtcttcccactttagtgtttattggtgttttggtgtttttatttcaacagaatacaataataaagatagactggttcagctagggaaaatgatccatttttcttcccttcctcaaacaggatataattgatacagcatgtgaagtattggccgacccttctcttccggaactgttctggggaacagtaagtatgtcagagagagtcactgcatagcaaaagaattgttcaaacacttgttttcttacaggttttgtactaagcattcatgtgcattttctcatttaatcttcataaaaacgtatgaagtagatactattactgtccctcttttaatgtgatgacacatgacacttagagatgtgaagtgatttgctcaaagtcacacatagaaagaggcagccagaacccagttctgtctgacttgagtctgcagcccacgttattaccagtgtgctgtctccagcccaccaggtttttttttttgttttggttttgtcttgttttttgagatggagtcttgctctgttgcccaggctggagtgcaatggcgcgatctcggctcactgcaacctctgcctcccgggttcaagcagttctcctgcctcagcctcccaagtagctgggattacaggcgcccgccaccatgcctggctaattttttgtatttctagtagagacggggtttcactatgttggccaggctggtctcgatctcctgacctcgtgatctgccagcctcggcctcccaaagtgctggggttacaggcgtgagccactgagcccggccttccaacccaccagttttttgtttttatatatggcagtgttttagacaccagtgttcctgcagctcttgaaagtgcttttaggagattgtaaccgtagcctatgagttgtcagggtattgtaactagttagagtgagaatttggctttgaaaagaacaatttctcaccagtacttgctctgagcattgacaacagtctcaaacctcaagatccaactgatgatctacctgtgtattttaccctcttttttgtaagatgctgtctgatgttatagaaccacagtgctcctgggagaaggagaagctggtatgaaacagtatctagagtgaggatctgtggttgctgtgtggtagccaactgctgacatagttgggtaatttgcactttagtggaaacatgtaatgcacaggtgaacaatactgtcttcccatagaaaggatggctgggaagaggtcactggatagaatagtaatctttttttaggtccctcactaaatcaattattttatatcctttttcagtggaaatatgaaagtcttaaattattaaggagggatgatatctgtctaaaaggaaggattaattctaaattttctcatgattgctgggaaatttggagagatgttaatttgtggataatgtgaagatcagtgatttgtccccttccaccacaggagccaacttctggccttgggatcattctggacagtgtgtgtggaatgtttccccaccttctctccccactcctgcaactgctccgagccctggtatcagggaagtccacagccaaaaaggtaagttgcttagtcagataagtaaagagaatgggagattctttatggagactttattaggaatcttttttgctttccacattgcagttctactgccatgacaaaagtttgtctgaaggtgaatgaaagataccaaagatagcacctcaattctaaaaaattaaataatcttttcat

SEQ ID NO: 42916 - DNA, 2300 bp, Homo sapien
ccgtgaggtcacaggctgtctttcttctcagatgtgattcagcactgccagcgagtcaaacccatcattgatctcgtccataaggtcatcagtacagacctgtcgatagcagactgtctcctgcccatcacatctcgcatctacatgctgctgcagcggtgagtctgtcttggctgaccctcagctgcccagtagagatctcagcacttgtgccctcagtttgcaggaacctggacacatacccactgggttaaagttcgcgcatattccttggttttcctgtttttatatctgtgagggttttcctgtttttatatgtctgctgaggggagagactggggagagagaagtggaaaaatgtttgtgagggaaccagttgtattatttgctttattgagtatagtgtattgttctccaaccaggttaacgacagtgatctccccacctgtggatgtcattgcttcttgtgtcaactgcttaactgttttggctgcccgcaatccagcaaaggtgagatgccagatcttcccaagagccaaaaatgtagcacttggcacatacctgaagatatgtgggcatttaactcttccttttccttctcaggtctggactgatcttcgtcacacaggttttttaccatttgtggcccatcctgtctccagcctgagtcagatgattaggtgagccaagtcctagggtggtgggccatattccctagtgagaaccacatatgtctcagatctagcctaggtttattaattttatttttatgtatttgtttgtttatttttttgagatggagtctcactctgttgcccaggctggagtgcagtggtgcagcctccgcctcccatgttcaagcagttgttgtgtttcagcctcccgagtagctgggattataggctcgagccaccacgcccagctaatttttgtattatttatgtatttatttactttttttattttttgagatggagtttcgctctgttaccgaggccagagtgcagtggcacgatctaagctcactgcagcctctgcctcccgggttcaagcaattctcccacctcagcctccccggtagccaggattacagatgtgcggcaccacgcccggctaattttttgtatttttaatagagacgaggtcttaccatgttggtctgactcgtctggaactcctggtctcaagtgatctgcccgccttagcctctcaaagtgctgggattataggcgtgagccaccgcgcctggcctgatttttttttttttttttttgagatggagttgcgctcttgttgccccggctggagtgcaatggcgtgatcttggctcaccacaacctccgcctcccaggttcaagtgattctcctgcctcagcctcccaagtagctgggattacaggcattcaccaccacgccccggtaattttgcatttttggtagagatagtgtttcaccgtgttggccaggctggtctcgaactcctgacctcaactgatccgcctgccttggcctcccaaagtgctgggattacaggcatgagccatggtgcccggccgagagcaagagagatttcttatccaacatcaatcacgttagtatgtgagcatttactttccagcccagaaaatccagaggtttctagattcagggacttggtgtcccgttattaagccacaatcactctgtactttttctcatttcatgggttctcgagctcagccagtagaccacttaccagtacacaggctccatcttactacctgagcattctcgccttgctgtctcttgacaaaaatgtttccctgatgttcctttgatttttttactttcaatctaggttttacatcaataaaacatgttcttaatgtttaccctgggtacagaactgtcttgattggattatttccactggagagcttttctattttatattcaagtcatctagactataacaagaatgctctatgattagtttcttgaaaccttgaaatttccctatcattttttttccctctacttctttttccagtgcggaagggatgaatgctggagggtacggaaacctcttgatgaacagtgaacagcctcagggcgagtatggggttactattgcctttctgcgcttgatcaccacccttgtcaaggtacagtctgattttgttcacaaagggcagaaaaagaaaaggtccagtcttgtcagatgactctgaaatagtttccctggcccctggtgctgtaatcttcttgtctgtaggcagaatagtcatcttgaagttacagtgacaacagtttctatgtat

SEQ ID NO: 42917 - DNA, 2300 bp, Homo sapien
gtgcaaagttccagcagtggaaaagagcttgatatgttcatgaaagaggcaagcagggttggactagagtgagcacagatgggactgatactacatcagttggaccagatcctgtggggtctttggaccatgttgaagagcttggtttgcgtttcccgggcactgggaagcctttcaaggattctaagcagagggaggacagagtctcaaagaggaggtgaacctgggcttgattctgaccatatctaagggttgacagaagaacagcagggccttcaagccctattttactttattttttagggaacaggatctcactatgttgatcaggttggagtgcagtggtgcaatcatggctcactgcagcctcaacctccagggctcacgtgatcttcccacctcagcctcccaagtaactaggactacaggcatgcaccaccatacccagctaattaaacattttttgttgttgttgagatagggtctcatcatgttgcccagactataagccctattttattttatttatttatttaagacggagtctctctctgtcgccaggctggagtgcagtggtgcgatctcggctcactgcagcctccgcttcctgggttcaagcaattctcctgcctcagcctcccgagtagctgggactacaggtgcgcgccaccatgcctggctaatttttgtatttttagtagagacagggttccaccgtgttggccaggatggtcttgatctcctgacctcgtgatccgcccacctcagcctcccaaagtgttaggattacaggcatgagccaccacgcccggcctatataagccctattttaaatcagggagactgttttaccaatgactaattgcctagcagaggaccccatgtttcttggcctctaaaatctggaaaattttcccagctgaaacctttttctgttcctttgcaggcagatataatgcacctgactgactctgtggtgcgtcgccagctctttcttgacgtgcttgatggaaccaaagcattagtaagtgtgtctgggagattttacatttctcccagggaggttgtctttgaagtcaaatagcagaggtcatgagtctgccagccagccgcacaaatagtcaggtcacagggctcacgttggcctgggaggcctgagactgtagtgggtcagcagagctctgctgctgccatgccaaccctggcttctccccctccactccactcctgtgagctcactgctggggaagaaaggcaatgaggccggaggtgccctgtggatggcatgcgaatctttccactgacttctgactggtgtgctgtctcctttcagctcctagttccagcctcagtgaactgccttcgccttggctccatgaagtgcactctgctgcttatcctcctccggcagtggaagaggtgaggctgtgccaggagaggcaagcccgaggccagagccttcttgtcagtgcctgcttgccttcctgaaagggagaaatagtgggtggaagctgggctggttttccatcttgaggaatgggagtgacatagcagataggagggtgaggcagactggtggatatcctgagatggagcaggggcagtgtgtggccttttatgaggtattttgtctcactccccaccccgtattcttttttttttttttttttgagacggagtctcactctgtcgcccaggctggagtgcagtggcgcgatctcggctcactgcaacctccacctcccaggttcaagtgattctcgtgcctcaacctccctagtagctgggattacgggtgcgcgctaccatgcctaatttttgtatttttagtagagacagggtttcaccatgttggccaggctggtctcgaactcctgacctcaggtgatccacccgccttggcctcccaaagtgctaggattacaggcatgagccaccacgcctggcccacccagtattctttctagagagttaggttctgtggatgaaatccttggacccttgacggagatcctggagggagtgctgcaggccgaccagcaactcatggagaagaccaaggccaaggtgttctcagcattcatcacagtgttgcaaatgaaggagatgaaaggtgaggggcagaggcagggggagcagcagctgcagtctgcccactcctgctgacagccaggcagggcttccttcagcttagggccacacatttcttctgggacttttgagtttccagtcatggaattcttaccccaagaaagctatttttttccctcatgtgtctctccctcctctcccactggaca

SEQ ID NO: 42918 - DNA, 2300 bp, Homo sapien
cctaaaggctgcctcataccttgcagagggaactcccaggcccaggcctactagggagatggctacctgtggctgccagctgattagccgagggaggccaggcctagcctgggctcacagctgcccatgcaccttgcgttcccctcccatagtgtggccccagagccagcactgcccctggcgagaaccgtctcaggtcactcaagtgtgtggggtctagatcagaggcaggggtgtagttgtttcaatcttggggttggctagggtgacctgtgcctattgggatgacctcttctaaggcacctgaacaggacagtctcccccgtcacttcgggccagacaccgtctctggagtaactcagccagaacacactctctccatcagccaggccagaggagcctttcctgtcattgcagtggtgtggcctctccctcacctggtgggcctggacaacctcacatcctggggttgggccaggccacctttccagagctaggacttgggcagccccaggaacagcattccagaggactcaagctccacagctctgtccccataagcacgcacacgttaggactcttcaggagggcaggctgtggtgcctccctccgcccgaccgcctggtgtcccctcccactggggcctggggggcctgctcctgcctgcgctgtggactcactaactctttgtttttgttcctttccgtcctgctttgggtaacttggctcagtgtgagggagatgtgagtatacctgtcccacgcgctgtgctgcttccggtctgcccatcttgcccgtggacccacggtgccatggccagcccacgtccttggggcattttgcaagcagctggtctccccgccagagcctctactgtgcagggcctctggtttagggggggatgccaggcgttggggcctgtgagtcagctttttgcaaatgttggacgcctgtcactctgtctgcccatgcatccatctgtccaccttcattgtcgggaggggcctggcccttgatgcaggagcaagagatgtggtgtgcggattctgggatggaaaaagccatcccagttgggggtgggctgtgtttgcgggaccctggggcatctgagtgccactggtctggggaggagggggctgtggcccctggcaggggagagcccagcctgtgacttgctcaggcagcctcggccatctcctcaccgcatttgctctcctgagctccagtgcctgcagccacttgatctttgtctggactctccaagtccctaggcccctcatctccaggtggttggagtcgggagaagggggtttgtgttgtgtttgtatccccgtccctggggtcaggcctcttggcatctccttgtgcaagactctggggtagcctcctgacctcgaccctggccctggcccagggtgaccccctccccacatgaactctgttccccgccagacggtgcctgactttcaggagactagacctcgtaattacattctctcggccagcgcctccgcggtaagcgcaccccacccccaccccacccctcgtcctcctctctccccacgtcccacaccactgcctctgactgcacaggagctagaagccagcttgggtaaggcgggggcactgccatgtgatcaggtcagtcctgagacactggggaggggcagcagcccccacctctgtccacggcctggccccggtgccctgtggccatggagctggacttgtttccctctgcaaaacgctggagctggcggcagggccagccacactgagtagtgtggagaactcagggcggcagctgtcccatccccagggcccctccacctcctgctgtctctgaatgccaggccctggggaggccctgaggatagaggaggaggcctggccgtgcctttctggagttcacagacccctaaagacaggaggcagggatggcgtcgtaggcctggagagcgcctggggggcgggagggcctgaggctgtgcttaaggcccagaggtcctggagcagggcatgtcttgtcctgaggcttaggcagggcccccaggggagttggggcaggaggtggggaggacaggatcgtggaggcttcgcatgtcatggtgtctgttggtttttaggctttcttgggaagtctggtgtttcctatgtagtttggggactaggccacacctctccctcatgcttgtcaccactgctacaccttgtctgcccactttctctccttcccgcccctggaggtgagaccctcacctctctcgtgagcatgctgcctcatgtcttccgtgccgtcg

SEQ ID NO: 42919 - DNA, 2300 bp, Homo sapien
tgtacatactggcccaagtacatgacaggatggcccaggtaggtggagttttgaaagctcccaggtgatttaatgttagagccattgacttgttgacccagaaccagggctgggagagggaacagggtctggattttgaacaagcccccaggtgacttgaggctcaccctgcagagccatgctgggataggtgacagaaactggggtaagtatagaaagatgaacaaagccagatagaagagggtacagcttgggaacagagctctccactgggttcaaaggtgaaacctaggccgggcgtggtggctcacacctgtaatcccagcactttgggaggcggaggcaggtggatcacgaggtcaggagttcaagaccagcctgaccaacatggtgaaaccccgtctctactaaaaatacaaaaatcagccgggcgtggtggcacatgcctgtaatcccagctactgtggagggtgaggcaggagaatcgcttagaccccgggaggcggtggctgcagtgagctgagatggtgccactgcattccagcctgggtgaaagagcgagactccatctcaaaaagaaaaaaaaaaaaaaagaggaaacctagaggtagacagcaaggagaggtgaagaccagtacaaagcctctatctgagccccaagggaaggcatttggggtcaggagcacctgtaggtcatctccttgcctggggctgtgaggagctggtttcaaggttatcacacatctgtgctcccagggcagctcattctctccaccctgacagtcacccaacctttgatctcctcctctcaccacacagggggctccaggccccagctccagaaccccctcccttcccgtgaccgccaccccaaccctcctccaatttggggaagccacagggcctcccaggctgacaaacagctgttccagcggtggagggcaagtcccaagcctgactccggctcagtcaccaaggtcagggcagaagagaggaggagaggtcagagaggaggagtaacgggaggaaacccaagggaaacagagtggaagaaatgggaatgggagggagggggtgtgaataaagagcggagatgaagaggcacaaacaggggagaggcagcaggcctgggtggtgggaggagaaagcaagagaggcccattttagagatctgttgcacatattggtgactactcagtcacttagtgactttgggagactgaggcaggcagattgcctgagatcaggagttcaagaccaccctgggcaacatggcaaaaccttgtctctcctaaagtacaaaaaattagcggggcatgttggtgggcgcctgtagtcccagctactcgggaggctgaatgaagcaggagaatcgcttgagcccggcaggtggaggctgcagtgagccgagatcgcgccactgcactccagcctgggcgacagagcaagactctgtctacaaaaaaaaaaaaaaagtattgcatatttcaaaattgctaaaagagtacatttgaaatgttctaaccacaaaaaaagtaggtgaggtgatggatatgtcaattaacttgatttcatcattccacaatttcatcaccttgtaggccgtaaatatatatttatcaattaaaacttttgaaaagcattggtaagatggcaaataatatgtaattatggcgtgtacctgcaatcatctaagagcacatgtgttccagttttaataattttagtaaaaggaaaaaaagaggccggcccaatccgcggcggcaggcgcatgggggcagcagcgagcactgcccagcagcgagccctgcccagcacaacctgctccccagaccaacccccgctctggccgcgccaaggcctcgcccccacccatgtagctccgccccactgccctctcgctccgcccctgtcccgccagtcccgccccctccgactccgcccggcttccgccaaccagcccggcccccgcccctctagctccgccccactgccgtcccgtcccgccccggcaccgccagctccgcccccgcccctctggctccgacccgcggcctccgcgccccgccctgcgcgctcgggctggctcggcggctgcggcgggcgggcaggcgggcaggccggcaggcgggtgcgcggagggctggtgccccgcagcaggtgggcggggtgcggttggcggcggcggctgggccgggggctgccggctgcgctcgggccgtgcgcggcggccgtgcgggcacgccatggacttcaacatgaagaagctggcgtcggacgcgggcatcttcttcacccgg

SEQ ID NO: 42920 - DNA, 2300 bp, Homo sapien
agctgggattacaggcgcatgccaccacccctggctaatttcatcatgttggtctggctggtctcgaactcctgacctggtgatctgcccgcctcggcctctcaaagtgctgggattacaggcgtgagccaccacatccggccttggaccccttttctttctggagcccttcacctccccaggcaagcccaggtatctccttggtatcccacattcccccattagagtaaccatcacaggggattgtgattaagtatctgctccccagacaatgagctccctggtgccaccacatacctgtctcttgtccaccactgagctcccatgtccagccaaaggattggcacacttaattagttgaatgaatgaaggaatgtggctttaccgacaattgtaattttcctttttttttttttttgaaatggagtcttgctctgtcacccaggttggagtgcagtggcgcaatctcggctcactgcaacctccacctcccagtttcaagcgattctgctgcctcagcctcctgaatagctgggactacaggcacacgccacaatgctgggctaatttttatatttttagtaaagatggggtttcaccatgttgggcaggattgtctcgatctcctgacctcatgatccacctgccttggcctctcaaagtgctgggattacaggcgtgagccactgctcccgggctttttttttttttttttttttgagatggagtctggctctgttgcccaggctggagtgcagtggcgtgatcttggttaactgcaatctcctcctcccggctcaagcaattctcctgcctcagcctcccaagtagctgggattataggtgtgtgccaccacgcccagctagcttttttatttttagtagagaccggttttcaccattttggccaggctggtctcgaactcctgacctcatgtgatccactcacctcagcctcccaaagtgctgggaatagaggcatgagccactgctaccggccgacgattacaattttaaaacgtagttgtgcccagctcttcgcagttatggaagggctgatacaccgtcctctttccatcctcaccaaagccctatgatttgggaaagggaagattttatccctatttctttttttctttttgagacggagtctcgccctttggcccaggttggagtgcaatgggtggatctcagctcactgcaacctctgcctcccgggttcaagagattctcctgcctcagcctcctgagtagctgggattacaggtgtgtgctaccaagcttggctaatttttttttttaatctttagtggagacagggtttcaccaggttggccaggctggtctcgaactcctgacctcgtgatccacccacctcggcctcccaaactgctaggattacaggcgtgagccaccgcgcccggcctcatccctatttcatagaggggtaagctctagagagctgaagtggcaacacttgattctatctcaggtcggcctgatctcaatcctggtatttagtgtaagacccagataggtggccagaactgaagaccccttgactccagctctcagagagacactgtctagcggcgagacctggcacttttgcaaacaactccagaacaagggggagagtggcgacagtataagagcatgctgcgggaagtcaggggcggtagtatttgaaaatgggcgcttggagagtgggaaggatttgtccttgtgtggaacaagaatagaggatcctaatacgagggctcagcctgctttggcgtactccaagaaagccccttggaggtctgactgctccgcttcagcccctttaagaatggccccgccccacccagccgcccatgtcgatctaatctgaatgaccaatagtagaagagaagagaccactttcgcgcttcaaccgcactaggaggaggggaagagggcgggagaggcggaatataagcttggtcacatgacccgcctaattggccagaggctgcggcggccctgagagactcagcgatgctcattggccagaagagggtgggggcttggcgctaggccacgcccccgggcggccggtttggttgcgcagccgccggggaaggagacgctgcccttccgcagcgatggcatcccgggtgagtatcggccccggccgagcccccaaggcgggcgggcagcgcggcagggccgggacttgagcggaggaccgagtaggcgcaggtgtccgggcccaacaggaccaggaaggtgtcggggttggaatgagtgggtacccgggccggggacggtgcgagagg

SEQ ID NO: 42921 - DNA, 2300 bp, Homo sapien
agccaaaggattggcacacttaattagttgaatgaatgaaggaatgtggctttaccgacaattgtaattttcctttttttttttttttgaaatggagtcttgctctgtcacccaggttggagtgcagtggcgcaatctcggctcactgcaacctccacctcccagtttcaagcgattctgctgcctcagcctcctgaatagctgggactacaggcacacgccacaatgctgggctaatttttatatttttagtaaagatggggtttcaccatgttgggcaggattgtctcgatctcctgacctcatgatccacctgccttggcctctcaaagtgctgggattacaggcgtgagccactgctcccgggctttttttttttttttttttttgagatggagtctggctctgttgcccaggctggagtgcagtggcgtgatcttggttaactgcaatctcctcctcccggctcaagcaattctcctgcctcagcctcccaagtagctgggattataggtgtgtgccaccacgcccagctagcttttttatttttagtagagaccggttttcaccattttggccaggctggtctcgaactcctgacctcatgtgatccactcacctcagcctcccaaagtgctgggaatagaggcatgagccactgctaccggccgacgattacaattttaaaacgtagttgtgcccagctcttcgcagttatggaagggctgatacaccgtcctctttccatcctcaccaaagccctatgatttgggaaagggaagattttatccctatttctttttttctttttgagacggagtctcgccctttggcccaggttggagtgcaatgggtggatctcagctcactgcaacctctgcctcccgggttcaagagattctcctgcctcagcctcctgagtagctgggattacaggtgtgtgctaccaagcttggctaatttttttttttaatctttagtggagacagggtttcaccaggttggccaggctggtctcgaactcctgacctcgtgatccacccacctcggcctcccaaactgctaggattacaggcgtgagccaccgcgcccggcctcatccctatttcatagaggggtaagctctagagagctgaagtggcaacacttgattctatctcaggtcggcctgatctcaatcctggtatttagtgtaagacccagataggtggccagaactgaagaccccttgactccagctctcagagagacactgtctagcggcgagacctggcacttttgcaaacaactccagaacaagggggagagtggcgacagtataagagcatgctgcgggaagtcaggggcggtagtatttgaaaatgggcgcttggagagtgggaaggatttgtccttgtgtggaacaagaatagaggatcctaatacgagggctcagcctgctttggcgtactccaagaaagccccttggaggtctgactgctccgcttcagcccctttaagaatggccccgccccacccagccgcccatgtcgatctaatctgaatgaccaatagtagaagagaagagaccactttcgcgcttcaaccgcactaggaggaggggaagagggcgggagaggcggaatataagcttggtcacatgacccgcctaattggccagaggctgcggcggccctgagagactcagcgatgctcattggccagaagagggtgggggcttggcgctaggccacgcccccgggcggccggtttggttgcgcagccgccggggaaggagacgctgcccttccgcagcgatggcatcccgggtgagtatcggccccggccgagcccccaaggcgggcgggcagcgcggcagggccgggacttgagcggaggaccgagtaggcgcaggtgtccgggcccaacaggaccaggaaggtgtcggggttggaatgagtgggtacccgggccggggacggtgcgagagggtgccttgcttgggagcggaacgagaaggtacttgggtcagggaggtgatgcccgggcctggaacgtggcggggattggagcaggcgcgcaggtacccgatccgaggcggggagagcacccgggatggaaggagcaggcgtgcgggccgtgagcggcgccagagggtacctgggtgagtttcaatgatattccggggtgggggcaagagaagaaggggctgcccaagatgcctggggtggagtgagcaatttctgaagacggggatattgctgaggtccaacgcggggatgcccggtgcccggcatggtgggactattgaggggtccggc

SEQ ID NO: 42922 - DNA, 2300 bp, Homo sapien
gagtcacagcggaaggagtttgcagagaagctggagtccctgctgcaccgtgcctaccacctgcaggaggagttcggctccaccttccccgcagacagcatgctgctagacctcggtgagctgggcccagtgcaggtggggtgggcgtggagggtggcagggatggaggtgaggagaagttgcgagaaccgggtcgtggttctctcagtgcgtccaatgaatcagaatccccagggctctccgacctcgcgtgatccagcaccttatggcacagatggggaaactgaggtgttcccttctccatggcaggctggagcagagctgaggtgaggcccagaatccccagcaagtgcacctggctccatcctcttgggtgcagccttggggttcgtgtggcagcatctccctgatggctctcccaggccttcgcttcgagtcctttcctgtggctcaaactgggtgggtggatggagtgactcacgggaggttcactcagagcaggccaaaggccaagaacagaagttcctgttgttgggtgcgctgaggtgaaatgatgtgacatactgagggggaaccaagttattctgccaaacagccactgtcctcttcggacccctgcagtgaatgacaccctggcccctccctgtgcactcaaccctgtgggaccctcagactcctgagggtccagctgcctggctctgccagtggagacacagaaccggagtgggtcggccgagccacgcaccctgccctggcttctccccacgtgctctgggtgtggtttctctgttggaggaatctgcctcctctggcctccctacatggcagaaagggctgggggacctttagggtggcccgccgcaggtctgtggcctttgcttatttgctcgacaatcctttcctgagcacccttggaggtccacacccctcagcccttgggcgagcacggaggggaactccaggttagtggctgtggactctttcgagcccttggtatcaatggctgagtttcagcttgtcagaggagagaggcgatttccccggggccacacagttcaaggtcctccccctgcagagcttgggccttcaggcctcaggtccagcggtgcaacctgtgagcctggcagagccgctcaccagccgagggctcacacctgaggctgacgacctccgaggatgtcgtgggtgttgaaggaggtcactcactgaggcgaggagtccagcgtcctcacacagaagcgcttggcacgtcagagctttgccattgagtgtgggaatcacaggctcgggatgaagcctcccctgggcctgatgggggacttcgtgtaccgggattccagctgagcactgtgtggggagtctcagccccgctttctctcactgctcttcccagagaggaccctcatgctgcccctgaccgagggctcgctgcggctgcgggcggacgatgaggacagcctgacttcagaggattccttcttctccgccaccgaggtgactcggggtggggaccaagcctggggtggggtgaaggctgggcctcctctgcaggtccatggggccagcactgggtcatgggaaagtggaggcatttcctctgatgggagaatttggatgctcccacgggcctcctcgaagctgttggggatggggggtgctgagaaatcgggggctgttgtcctgtgggtgagagcaggggttccaccccgaagggctccagcccgtgctggcctttcccttctccagaccgctgtgcccattgtttggcctcagtctcctgccatgggcacatggatcaggcactgtgtccttccttgggatgggaggacatgcacatgtgtcctttagatggcctttttgggagggacccctggagatggggatgctgagggccagaactgggctcgaactggagcctcctggccagtgttccctctgacatcccctcagagacgttggcagtgggcaggcacctggggtggccgctgtggccgaccaatgggcaggtgcccttgcgccgtggcgtgctgctcacatgggcttccctggtctcttcctctgcaccctctcccagctctttgagtccctgcagactggagattacccgatcccactctccagacccgccgctgcctatgaggaggccctgcagctggtgaaggaggggagagtgccttgccggaccctcaggtgagcaggtgtggagggagggagggagggagcaggaggcgatgggtgattctggcccttgcgggaggcggagaagccagcggtgcttggcgaggacttagcctgagtga

SEQ ID NO: 42923 - DNA, 2300 bp, Homo sapien
tcacgagttaatccactctgagaaccgaccctaacacttagtgtttttctacatcgtaaatgcagacccacatctgaaaagagcatcccaaaccccagctaacccccagggtcccagagagtgaaggatgtgtgccgagagcctccgtgccgtgcagcggcactttaaacgctgtttgttgaatgctttggcgctggactgactgcgtcacacacgagctcggcaactgccctagaagagcctcatcagggtgcggctgtagcttctcccctttcctgttgaggtccaaggtcacggagatttgaaccttcagctgcctgactctaaccctcacattctgtgtccctccaaagtgagatcacactgtcacactgggcactcctggaagttagcaggtgctcagcagaggagctggcttgagacctgactgggtgccctggttctctggagaagcctgctgtgctgagtaggagacacttctctgccacgttttctctgtgcctgctgcgtggggatgggccccagccgtgccttggcatgtcccccatccacaggccagcctgtccctgtgggtcttgtccagtgaccaggatgggccgtgcttctctccacagagccccaaaggcttcctggagagctacgaggagatgctgagctatgccctgcggcccgagacctgggccacaacacggctggagctggagggccgaggggtgagttgctttgtgctgaaccccgacatcccgggctcccctgcatctgagcagcaagggggttcttgtgccgagctctagctcagttccaagcggctgagacggttccatcactgctcatagtccccggttcctgccctgccccaggccaaggcagagggaggaatggcctcagctacacccgttgcacagcagagcgggaaagacgtgtcccccccacgtgtgctcatgccctggaccccagcttcagtctccccatctggaaagtggccccgaggctccggcagtgcccccatgcatgagcctcccgggggcaccctctgtaggtggtatgcatgagcttcttcgacatcgtgctggacttcatcctcatggacgccttcgaggacctggagaaccctccggcctcggtgctcgccgtcctgcggaaccgctggctgtcagacagcttcaaggagacggtgggtcactgccctgctctcagacccacacttgctcacatcagcccgtgtggttgcctggctccgtcccctctgtccctagcactggcaccagggctgggcccccaccccctagatccgcggctgccaggcctgggagaccagagtctgccctggagaagcctccagggtgccccgttgctgcctggtgccccagtttagaaccaacatggtgtgcgctttcttcctattgtgtggttttacttttgtgctggtatgaattcgattccattttaatgcatcctgttaaatcaagttaaaagaggggaaagcaaaaccaaaaggaaaaaaaggcacagagtgagagacaacccagcacaggacccccaggaaggcaagcagtaacgctccagcagccgggctgtgctgcctgggcccaggcttctgcgaggtggtttacaggcgggaaccattgctcccacaaccaccaaaggaggtgggagtgctgtgttgtgcccctttacagaagaggagaccgaggctcagagaagatccagcagtaagattagagtcaagattcaagtttaggtatgtctgagtccaaaatcagaggaggaagcagcagagcttaggcacctggccccatcttcctgcttggagtggggtgagctgggtttaagggcttggtgctgggctggcagagggcgaggggctgtgggctaggcccattttgacacccgggggacatcctatttttgatgtaggccttggccactgcttgctggtcggtcctgaaagccaagaggaggctgctgatggtgagtgactggcaggcccgggggagcacgagctgggctctgaggcagcgtggtggggagcggagcgggtgcagggtggctcgctgggccacttggccttcaccgctcacagtcctggcccccttgttccgccgttacctctccctgtgccaggagctccctggaggctcgtgtagacccacttcctctcctccccaggcccagcacagagcaggccactggggaggggaacggataccctagggtagtggccacagggctggcagctggcctggtgcaggcgtctcggtgggggcaggatacccaggagcaagcagagccctgtccct

SEQ ID NO: 42924 - DNA, 2300 bp, Homo sapien
cacagcagggcagtgggccttctgggctctttggtgggttctgagtcgccatcatctccggccacacaggccagctcacggtccccgctctactggcctggccactcgcagaaagagccactctcagtgggatttcctgggtaattctcaactcacctcaggggcgctcgtgtcacttatcagacacttgctctaggtctggtctggaccaggctcaggatgtaccaggccctgtcctcatgttgcccagggtttctccagtggtggctgtaaccacctgtatcagaaccaccagagcacataagaatgcagacacctgggctccaactcagacctactggatcaacccaggccccattgtgacccaggaatctgtgttttctacaggctgatctcagcactccatgaatctgagagccgctgctgactgggagggatagggagccgattacagtccagtgaggtcagggctgagaaaggacaggaaatgcaaccgtgagagcccagtactggcccctcacttgactgtggaaacctgtaagccgaggagacacctgaaccagattgggccgggcaaagtagggcaggagaggcagtacatcccacgcagcaaaacagcacatggtggccaggggcggtggctcacacctgtaatcccagcactttgggaggccgaggtgggcggatcacgaggtcaggagatcaagaccatcctgaccaacacggtgaaaccccgtctctacgaaaagtacgaaaattagccgggcgtgccactgcactccagcctgggcaacagagcgagactccgtctcaaaaaaaaaaaaaaaaaattagctgggcatggcggctcacgcttgtaatctcagcattttgggagccgaggcaggtggatcacctgaggccaggagttcgagaccagcctgcccaacatggtaagacccggtctctactaaaaatgcaaaaattagccggatgcggtggtgcgcgcctgtagtcacagctactcgggaggctgagacaggagaatcacttggacccaggaggctgagcaagatcgttccactgcactccagcctgggcctcagagcaagaccctgtctcaaaaaacaaacaaacagacaaaaacagcacatgctagcggcaggagacaagaggctgagccctcccagcccaccttacctgcactgtaatccaatccagccagagacagagtcgggtaggagaggtgaaggcgggtgggaaggtgtggctgttcacgcaggaatgtcttgggaaaactgaggggtaggtggaaaaccgacttcttgtttgaaatgctcccaagacgcctcattaagtagcatagacgtgactgaatcaataaatctttattaaatgaatgaaaggaggaaggagtccttaactgtagctaagcttccactcttaagtatcaattaagcttctctgttcagtccagcgtttagggcgcctactgcgcgccccgccccacacacttttgacaaaaaggtcgcctgctctgtgtgacttgccctttcgccggccagtatggggcagagggaaataagccccctctgctctctggtctcagtttactcgtaactgaaagtgggtcggttcaaaccccctggagctgaggttgcctctcctcttcgagcacgcgctatcggacgcgcaggtccccaagaccgcggatcggcagggggtaccagggaagccttcattcagggcgcaggtcccagccgaaccaaagctcccaccaaagttcaacacgcccccaaagccagcgcctgattggcccgccctgcccacaagctgaggcagcctcaccttctgattggctgttatgctccctgttcggtgctggaaccctccccttctctgattggccagatgcctacctgcgctcgccccagattgggcgccagctggggcggctcgttggctcccaggggccccgctctctgattcgccgctcgggccagcccccacggcctgcacgctgaatggctgcgccgctacctatattggcctccgattgggtgcacggcgcctccccggcgtgataggtcaggaccaccgcccccctggctccccattggctgctcgaagaagcccggtctccgggtaagatggcagcggacggacagtgctcgctccccgcttcatggcggccggtgaccctcacccacgtcgaatatcctgcaggtaaaaggcggtcccggctccaaggacgccttcccagggacggcctctcagtcccgggcgctccggcctgctcgagcccgcggagggggcgccgg

SEQ ID NO: 42925 - DNA, 2300 bp, Homo sapien
cggtcaacatggttgtgttttcctatcactctaagagttaggctcaaggacaccagacggagttggaaaggtgcacaccactacctccaacagcttagaagacatgtggggacaggggagagacagctggacggtgacctcctccttcctcctccacaggtctcaatgactcgccctcggccctgcccctctgtccccgcccgccgtggtcccgcccccgactcgcagccagcctactgcgacccgctaccgggcgacgccccgcccctccgtccccgcccctcctgtccctcctcaaggagactccgccccatcgatgccccgtccccgccccacagccaacctcccgggcaccgttgcccgcccggggcccgctaccggcccaggccccgcctcgcgagtcctcctccccgggtgccttcccgcagcccgctcggcccagagggtgggcgcggggctgcctctaccggctggcggctgtaactcagcgaccttggcccgaaggctctagcaaggacccaccgaccccagccgcggcggcggcggcgcggactttgcccggtgtgtggggcggagcggactgcgtgtccgcggacgggcagcgaagatgttagccttcgctgccaggaccgtggtgagtgcggcggatcccgggcctgagggccctggacggcctgggcgggccgtgcggttgcgtccgggaacggagaccgcgtcctgcggccgctgttcgacccggcctccagctgatggggtggggtcaggcgggcgtcccaggtttggcagagcaggagattggggcgcaaggtcagaagcgggattaaacccacgtcctggagcattcagttccaacgacccaggaaagacaagggggaccccggcttcagttagcacccccacccttagacccagagacaggccggtaggggagagagaccaggagcatccagaccctagctcactctcccagttattctccgattgacacacccgtcgcacgcttaggccagagccactcctccgaccctgtccagttggtcacactcctttggtttatcagacggtccctggggaattgtgtgtggccagagaaacacgcggaggcatcaagctagaaaggcctcagaactggcaggtggcagccccatggtctccctcccctccagcccccttccccaccctggctgtatccttccctccagcccccttccccaccctggctatatcctcccctctagcccccttccccaccctggctatatctacccctcagtcctccccggtgagcagcccggatgctagcctaatttcagtcccttccgtccctgatccaagcatatgttgctggtgtctcactctgtctcagacacacactacggggccagagggcggagggtgcatccaggctcaggcctagaggctcttttaggtgttgcaacaccctgagcctccaccgcacccttgtcactgtctcccaagctgcatccatcccacaaacagcctctagatcatcctccaggaccatccgactggactggttaccttcctgcagggaaactgaggcaaggagggacttgcccagagtcccctggacctgctcattcaaatccagcccaatcccagtgtcctttggtttatttttcataccaaaagtcctccgctcttggaccctagctgaatgagccacagctcaggaaaaaatgagtgttcgtagagggatggctcagatgggtcccaggagtcctggagagaaacaggaaataggcagggcttctggctgtcccatccactgatggccttttcctggtgtctgctcccttgcaccaaccctaatttcaggaccgatcccagggctgtggtgtaacctcagcggccaggcagtctctgtcctccagccaagttttccctcatcaaaacgatcttcgcagattctgacaggtggattttttattaccttttgtcctgactccctggcactgagcccatgcagagaagaaaggaaagaactttccaggttcccttctactggaatgcccccccactagccctctcacctgctccccattcctctacttctgggagctcgggagggtggagcagcttctagagtccaggagcttcccctgccactgccacaacccccgattccaccacagccatcgccactgccacctgcctcccgctgaatcttggctcttgtcttctctttccagcccaggcaagtggctgcctctggctaggttctgctcactcactttgtagcacagttaggcttagagatccagccaaggcagacagac

SEQ ID NO: 42926 - DNA, 2300 bp, Homo sapien
agtgagcagaacctagccagaggcagccacttgcctgggctggaaagagaagacaagagccaagattcagcgggaggcaggtggcagtggcgatggctgtggtggaatcgggggttgtggcagtggcaggggaagctcctggactctagaagctgctccaccctcccgagctcccagaagtagaggaatggggagcaggtgagagggctagtgggggggcattccagtagaagggaacctggaaagttctttcctttcttctctgcatgggctcagtgccagggagtcaggacaaaaggtaataaaaaatccacctgtcagaatctgcgaagatcgttttgatgagggaaaacttggctggaggacagagactgcctggccgctgaggttacaccacagccctgggatcggtcctgaaattagggttggtgcaagggagcagacaccaggaaaaggccatcagtggatgggacagccagaagccctgcctatttcctgtttctctccaggactcctgggacccatctgagccatccctctacgaacactcattttttcctgagctgtggctcattcagctagggtccaagagcggaggacttttggtatgaaaaataaaccaaaggacactgggattgggctggatttgaatgagcaggtccaggggactctgggcaagtccctccttgcctcagtttccctgcaggaaggtaaccagtccagtcggatggtcctggaggatgatctagaggctgtttgtgggatggatgcagcttgggagacagtgacaagggtgcggtggaggctcagggtgttgcaacacctaaaagagcctctaggcctgagcctggatgcaccctccgccctctggccccgtagtgtgtgtctgagacagagtgagacaccagcaacatatgcttggatcagggacggaagggactgaaattaggctagcatccgggctgctcaccggggaggactgaggggtagatatagccagggtggggaagggggctagaggggaggatatagccagggtggggaagggggctggagggaaggatacagccagggtggggaagggggctggaggggagggagaccatggggctgccacctgccagttctgaggcctttctagcttgatgcctccgcgtgtttctctggccacacacaattccccagggaccgtctgataaaccaaaggagtgtgaccaactggacagggtcggaggagtggctctggcctaagcgtgcgacgggtgtgtcaatcggagaataactgggagagtgagctagggtctggatgctcctggtctctctcccctaccggcctgtctctgggtctaagggtgggggtgctaactgaagccggggtcccccttgtctttcctgggtcgttggaactgaatgctccaggacgtgggtttaatcccgcttctgaccttgcgccccaatctcctgctctgccaaacctgggacgcccgcctgaccccaccccatcagctggaggccgggtcgaacagcggccgcaggacgcggtctccgttcccggacgcaaccgcacggcccgcccaggccgtccagggccctcaggcccgggatccgccgcactcaccacggtcctggcagcgaaggctaacatcttcgctgcccgtccgcggacacgcagtccgctccgccccacacaccgggcaaagtccgcgccgccgccgccgcggctggggtcggtgggtccttgctagagccttcgggccaaggtcgctgagttacagccgccagccggtagaggcagccccgcgcccaccctctgggccgagcgggctgcgggaaggcacccggggaggaggactcgcgaggcggggcctgggccggtagcgggccccgggcgggcaacggtgcccgggaggttggctgtggggcggggacggggcatcgatggggcggagtctccttgaggagggacaggaggggcggggacggaggggcggggcgtcgcccggtagcgggtcgcagtaggctggctgcgagtcgggggcgggaccacggcgggcggggacagaggggcagggccgagggcgagtcattgagacctgtggaggaggaaggaggaggtcaccgtccagctgtctctcccctgtccccacatgtcttctaagctgttggaggtagtggtgtgcacctttccaactccgtctggtgtccttgagcctaactcttagagtgataggaaaacacaaccatgttgaccggggaatgtcctctaatattccttgggttagggtcagtaccacccacaa

SEQ ID NO: 42927 - DNA, 2300 bp, Homo sapien
caatgccgcgatctcagctcaccgcaacctctgcttcccaggttcaagcgattctcctgcctcatcctccctagtagttgggattacgggcgtgtgtcaccacgcccggctaattttgtatttttagaagagacggagtttctccatgttggtcaggctggtctcgaactcccgacctcaggtgatcagcccgcctcggcctcccaaagtgctgggattacgggcatgagccaccgcgcctggcctggacatccttgttctaagggcacacacccagaggttttgtacaaaataaatgtctggttttgaatgtcctaagaaacggaacccagctctttgttcacctcttttgtggggcatggaggggatgccttttctgattttcaacatttctccctcctgagaccttcccagggaccccaacattggagacaggatagcaagaatatcaaatgctttcaaaacattagctgtgtttggtcggccaacctatttgcctctgtcgggaatgtaaaagttatctatggccagtccttcttagttcaaggtaggtcggcaaacagccttctccttctgcacaaaaagggtctctaagatccttccgtagcacctccatcccagttatttaagatgaactaaaaagaggctacaaggtaaataagagttaccgaaggagatgccggagagactaacctccttgcacaaccagccttttaaaattagggatttagacaccacgggcagtttccctcaataaattctcaggcactggaaccagagagtaggaggatgaggggtgagcaggacgcggaggccgaaactggaggcgaggcgggcgcaggcccacggagcaccaccccatcccctaagcagcgactaataaagacggcagcctccggaatcactttcgcccccctccctggcagcttccccaccgagtcagcagcttacttaagcacgcgctgcccagagatgcaaaaggcccccttatgaccacggcgctgcccacccagcattcgggcagcctggactcccacaaaacccagagttgcgccccaatcaccacccctttgcagcccctggttccctccccagcggcgccccaccacccacctctcccctaaggccattcaactcagtccctcctcggggcccctcagcttttgcccctccagttcctccgtgtcatgactctcgccctcctgagcctcccacacctggcaccgcccccaccctacccgaccccggcccggcctggccccgccggccttacctggcggcggctgccgctcgccctcagccatcttgctccggccaggagccgacccggatgcttgcagtcccctctcgcctttcactcttgcacccacccttcctctccccggctccaccaaaggctccgagcttcctgaagacaagtgagcgccggccggctataaccgaaaaccgagagttaaagtcaccacagcgaagacggccgccatgtcggtgcggggcgctcagggagcaagcctattaacggccggcgcgcggcggacgcgcggaaccgggcgacggccatgtcagtgcggggcgcgcggggcgcatgcgcgccaacggccgccaagcgctaggaccgctcacggccgcccgaacgtcgggcgccgcgactgccacgattgtgcggggcgtcaagtttgggttgtgctcagccatgtttttccgggacagtctcctgtcccggagtaccacctgtcatctttgtgggtggtactgaccctaacccaaggaatattagaggacattccccggtcaacatggttgtgttttcctatcactctaagagttaggctcaaggacaccagacggagttggaaaggtgcacaccactacctccaacagcttagaagacatgtggggacaggggagagacagctggacggtgacctcctccttcctcctccacaggtctcaatgactcgccctcggccctgcccctctgtccccgcccgccgtggtcccgcccccgactcgcagccagcctactgcgacccgctaccgggcgacgccccgcccctccgtccccgcccctcctgtccctcctcaaggagactccgccccatcgatgccccgtccccgccccacagccaacctcccgggcaccgttgcccgcccggggcccgctaccggcccaggccccgcctcgcgagtcctcctccccgggtgccttcccgcagcccgctcggcccagagggtgggcgcggggctgcctctaccggctggcggctgtaactcagcgaccttggcccgaaggctctagc

SEQ ID NO: 42928 - DNA, 2300 bp, Homo sapien
tcagcatctttcggtggggccccacaagggtctgtagaaccatgtgctgtggatgtgtaaaatgaaaccaccagaggagatggagcgaacttctggtgcagacagcttttctgtcgaagggacacgtctctgtcagtgcctgaggacgtgggcccgagcaaagtgctggagtgggagtgcgcaggcctggcctgtggtggcagtcactggatagccagccccacggctgggttctggaactggaagttattgtctcaccaaggcaggattccttgcagtgggccctggaccacttgtgcgagatctcctagtgtgtttgttaaaacgcacattcctgggccctccatcccagcttattgcatcagaatcttaggggacaagagccaggaacctgcatctaaacacacgtgccaggcgactgcacaggaaagctggggaccctctgctctctggacctctcttgagggaggtgttaggacttctcatcctctctgccatccccatgccccagtttccaaagggcgccctcgctcagctatctggagagggtttgagagttctatccctcctcagtccctttcccgacaccagcacggatgtctgctgcctcagtgaggttcctagcaggcctgtggatgctggccacgggggctgctctccgtccgggctgtgtattctgagcccccgacgaggtggagaaagctgggttataaccagcagccttggctccaggctcttcctggtcaacattcggctcaggcttctgccaaactccagaggccagaggggaatgacacattttttccaagtcagcaaatggagccgggactgacggctgggcggccaccacttcattcccggagatctgctgccctcagcagtgtggcaggcccaaggtcgggaggacttgggggcagcctggctcactgccttgaaagccagtcacgcgctgctctctgtggagtggaatgtgggggtctgcggagccctgggggacctcaggataagctggaggagcagggtgggaagaagggtgcagatgccacactgagttcttgggtgtggctgaaaggctgagctgtttgggctcccccggcggctggccaggcctctgggtccctgtcggtattctaactaggaggcatgccaggcctggcctccaggattttgggaattgattccatggtaaaattttgtctttagttggttggttgattttgttggtataaacaccccaaaagcttttccaaagtttgggacccagttcctccagtagaggaaatctcaaagtagccactaggtggcaggagaggcacactgaacttggagagggtttggtgacatttatttgaggcagcagaaggaacagggaggggagggcgtgcctagagttgttggctgttccgcaccttctccacaggtccgggttttcactttgggtctaggctcttgggcatggtgttcaacagtagaccctaggaggagtgtgcccaggagccggggtggctgcagcaagggcccatcttgccacgtggccgctggttgcagcacacgttgtgttggttctccagagcgcccaccctcttccacctcggagcagtgagcagcattttgcagtccctagttggtgagtggcctggcctagctcactggggacctggaggcttgcatggagttctgtacgccttgcttgggaaggaggcagtgtttcctctggagaccctggattcaccatggtgctcttttaactgggagattaactaaaacaccgagaacttgggagtggaatcaggcagccctttcagggtctcatgccaagactgccctgatacccgtgggcatcctaggtgagggaccccaccttgcagggcctctacagcctctgtaaatgcagccctggcgcctttaagagcccagggcaggcaggaaaagaatttcagtttcaatctggcttctaaatttggagttttgggaagggagggatcagatttcagctggaagggaaggagctgacaggaaggcgctgtgcagagcctccccacccccgcccatccccccagttactgacagaggagccatttacaaaaggccgattctctggggagtggagaggcaggaacgcagcgtctgtgagtaatttcctgctcaatatggctgctctgactcacacgattcccctggggtcactgcgggctgcagctcgctcgctcattctggttctttctcttctccctttgtggctagaatgagctaattttttctttgtcttccagccccgattcctttttctcccactcgtc

SEQ ID NO: 42929 - DNA, 2300 bp, Homo sapien
cacacgttgtgttggttctccagagcgcccaccctcttccacctcggagcagtgagcagcattttgcagtccctagttggtgagtggcctggcctagctcactggggacctggaggcttgcatggagttctgtacgccttgcttgggaaggaggcagtgtttcctctggagaccctggattcaccatggtgctcttttaactgggagattaactaaaacaccgagaacttgggagtggaatcaggcagccctttcagggtctcatgccaagactgccctgatacccgtgggcatcctaggtgagggaccccaccttgcagggcctctacagcctctgtaaatgcagccctggcgcctttaagagcccagggcaggcaggaaaagaatttcagtttcaatctggcttctaaatttggagttttgggaagggagggatcagatttcagctggaagggaaggagctgacaggaaggcgctgtgcagagcctccccacccccgcccatccccccagttactgacagaggagccatttacaaaaggccgattctctggggagtggagaggcaggaacgcagcgtctgtgagtaatttcctgctcaatatggctgctctgactcacacgattcccctggggtcactgcgggctgcagctcgctcgctcattctggttctttctcttctccctttgtggctagaatgagctaattttttctttgtcttccagccccgattcctttttctcccactcgtctgttttcctttgccagagttacaggcaaaggactgtaacctccctgaaggacttagggagaccctggggtactgaaggcctgggggcagcctgcagcccctccaaagaaactacctctctggcctttctgtgtgtaggggcccagggccactggagctccaggacatgggcctagccctggctctgccagaggccttttgaggatctgttctttggccctggtaggcgaggctggccaggaggcaggggctcttgtcttccagtgcccatctgcctgcctttgcctcggagcccttgccgggcaggcccctggcagacaaagccgacaaagccgacagggtgcctcctggttgcttgctcagagggccctgtccagagagtgaaactggttacacagctccatgctccctgagctttcctgggcctggaagtgtgcacagggctggagcctgcagactggggaaggggtggggtagggtggggaggtgggggaggggctgggggtggagtgtggttgagcagggcagttgaaacaaagctccccagaggtgaggcccctgtaggctcggggtgcctggctgccctcctggaggagagagcctggggtgattctgagtgaagcgagtggtccaagacaaggcccccagggaccagagtgggctttgtctctgttgggtgcctcgggctcttgcctggctgtggtggagcctgggagagaagaggaggggagggaggagcctgttgtccttgctcctgaacatgggtgtttggatgggctttttgggaacctgggccaggggagggaaatgagggggataaaatgacaggttttttttgacttaaatcttaaaagttttgtcacagttgcccttactagagaagtaagaggcctgccaggagtgggtcaccaggtggcagcccatggctcaagagtgggggctcctgagggctcttgtggtgaactgatgcccctttttggagagcgtttctggcttatcttttctccttcaaaaaataacccagtctcccctgacacccgcatgtttctagaaccttccaagtctctgtttctttgccagattcagcctctttgcagagtcttccttctgcagcatgggtctggggtacagagccctgttcccctgtaaatgctgcctatgagctggggggctgtgtcgaggggaattatgaactgcttggttaataaatacaaatgtgctggacttgcggtgtcagggggatatgctcaggcacacaggcgtccctctgtggtttctgacgtcatgggaacttcatgctggctgcagaatctttctcttccgtcctggagggtcagactctttggcaagagggaggaccaggaatggagccgtccttgtgcctgcctctttcagctgctgtggcggccaccccttccccacctcctggccaggccaggctggctgctgcttcaggcacccctgcctcccatcggccctctcttccctgcctgcatggcaggcagagggctgtcggatacctgggtttggtcatacccaccttggtcct

SEQ ID NO: 42930 - DNA, 2300 bp, Homo sapien
ctgaaggacttagggagaccctggggtactgaaggcctgggggcagcctgcagcccctccaaagaaactacctctctggcctttctgtgtgtaggggcccagggccactggagctccaggacatgggcctagccctggctctgccagaggccttttgaggatctgttctttggccctggtaggcgaggctggccaggaggcaggggctcttgtcttccagtgcccatctgcctgcctttgcctcggagcccttgccgggcaggcccctggcagacaaagccgacaaagccgacagggtgcctcctggttgcttgctcagagggccctgtccagagagtgaaactggttacacagctccatgctccctgagctttcctgggcctggaagtgtgcacagggctggagcctgcagactggggaaggggtggggtagggtggggaggtgggggaggggctgggggtggagtgtggttgagcagggcagttgaaacaaagctccccagaggtgaggcccctgtaggctcggggtgcctggctgccctcctggaggagagagcctggggtgattctgagtgaagcgagtggtccaagacaaggcccccagggaccagagtgggctttgtctctgttgggtgcctcgggctcttgcctggctgtggtggagcctgggagagaagaggaggggagggaggagcctgttgtccttgctcctgaacatgggtgtttggatgggctttttgggaacctgggccaggggagggaaatgagggggataaaatgacaggttttttttgacttaaatcttaaaagttttgtcacagttgcccttactagagaagtaagaggcctgccaggagtgggtcaccaggtggcagcccatggctcaagagtgggggctcctgagggctcttgtggtgaactgatgcccctttttggagagcgtttctggcttatcttttctccttcaaaaaataacccagtctcccctgacacccgcatgtttctagaaccttccaagtctctgtttctttgccagattcagcctctttgcagagtcttccttctgcagcatgggtctggggtacagagccctgttcccctgtaaatgctgcctatgagctggggggctgtgtcgaggggaattatgaactgcttggttaataaatacaaatgtgctggacttgcggtgtcagggggatatgctcaggcacacaggcgtccctctgtggtttctgacgtcatgggaacttcatgctggctgcagaatctttctcttccgtcctggagggtcagactctttggcaagagggaggaccaggaatggagccgtccttgtgcctgcctctttcagctgctgtggcggccaccccttccccacctcctggccaggccaggctggctgctgcttcaggcacccctgcctcccatcggccctctcttccctgcctgcatggcaggcagagggctgtcggatacctgggtttggtcatacccaccttggtcctcttgcaaattgaccctttcctcatctcttctagctctgctggtggcaggtgcagaccacgtgtcctgtgggggggcctgggggagagggggtgggcctggaggggtggggcctagctgctgctgctatttatctgaacccaagtgaatccctgtgctggagaggcgctctgaggctcctggggagtcggtgggaacgacaccagaagctcaggtggagatcttatcttcctgaggctgctggatttggtgggcgataggaatcaggccccctttttttggctgtgggagaaagaggggtgactgcgggtaggtgggcaaggaatgttatattttcctagcaggccttgagggccaaaggggaaccttgtctctggcacttgcatgtgcctgtttgtatgtttgcccctcaggcagatgctatagcttggtccccaagtgtctgcgcgtgcattgtgtgcgtgtgcgtttgtgtgtgtgtgtgtgtgcatgcatgggtgtgactttgctgcaggggaggagggatgagctcccagccagaacctgtctcttcagcttgtggcttctctttttcagatgaagactggcccatttgcagagcactccaaccagctgtggaacatcagcgccgtcccttcctggtccaaagtgaaccagggtctcatccgcatgtataaggccgaggtgagtgggggctggccagtgtgcccgtccctgctgccgcacttggtcctgggctggggacaaagcaaaagatgtggaacctggggctcctgcttcctcctaccccactgttt

SEQ ID NO: 42931 - DNA, 2300 bp, Homo sapien
gagcgaggagctgtggggagtcggcagcaaacagccagcaggctgccactttgctttctttttctcgttctttctttcctaacccctctttgcaaagctggaactatcccgcgcgcccctgggcccaagccgcggctccagatgtggatttgtttccagtggggagaacgcgagcttcccccgggccttggcacattctcccactctgaggtcattccgtaggtggtcagaggggagcgcgcgccgggagccttcctccctccatccactggggagggaagagcggcgggtgggagggaaggagagggagaggggaggggcgcgaggagggagggagacgccgccagcacaccaccaagtggcaccgagcagtgataacaaactcaacttaaaaaaaaaaaagggaaaaagaaaaggaaaaaacttccccaagttgcagcccgagacatgcggacgtgcggggcagaggcgcggggcagggagtgcgggtggccctgaaacccccggcgtcccccggctgctttccccggccacagagagctcagactcgaggccgaccaggccctgcgcctgtgcctgggcaggaaatgtgctggaggctggctccgcttcccgctggagaccccggggcggccagttcccgtgggggacaggacccccctggagcgggggcggccgagagacgcgcagcacccgcttcatccccagccaccaacatcaccccccattctcccaccgccgaccttgcggatgtgggtagatcccgcccgcccaggccgaagagaactggggtttacatgggggtgggcggggtctctccccacacctctctatcctctctgacgcccccagacatctgaaaacaaggcaccaccatcttctgtaatcgactttttattaagattataaatttaaacaatctgaacagttttacccggtgatatacaattcagtatgcacaaaaatacagggtaatgagggaaaagggccgagaaaggaaggattggcaactcgttttggagtccacacggtgctgatggcagagaaccagaggggctgcagacgaaccccacctttttacaacaaaaggcttttaaattaaacaaatctatcgagctgaagacacaggacggggttctcacaggctcgaacaatgctggtttcatgaaatgcaaccgaaggctgaaccaaggcagtgcaacttagaagcacacacacaaacaccacagctgaccaggaacttagtgcaaagtctccaacgcagtcggcggtcccggcccctccctcccccggggccgccggggatccaggtgaaggaattgacttccttttttgtttagtgaggaccgcagtgctaggcatgatgggaaatgtagtccgccgtgcccgccccccaccccttacccagtgtccgagagtgtcggggtgtcaggcgccacccccgagtccgggagacgggtggaggaggggaggagaacggagccagaggggcggggagaagaggggttcaagacacccgccccgggaagaaaagaaaaaaaaagttgaagtgttttcatttctgccttctcattttgagaactttggagtccgcccccagagaggaaatgtgacccaaacgtccctttcggagatagagtttgcctttgtttttgctcagaatttcacaagacccattcctcaccccacagagggactcgggagagcggaacgtcgggcttcccgggtctgacaactgattggaatcggcttcccaggtccggcgccctcctgagctgcgcccccggcgcgccccggcggccagggcgccctgcctcgcccccggctgcccggcacctcctccgggcagcagccctccctcacgtggtaggctcctcgctaaacaccactgcaatcactacaataaaaagaaaaaaaggagtaggagaaacacaaagcatacttaaataggcgctttttctctctgcaaaaataaagtccaagattttagatttcttttttttttattttacaatttataaaacatcagccgcctgcccccgctcgcccccagctcagccccgagtggcccggcgcccgctcgttccctcctctcgcccctttgccgagtctttgtctggccccagccccgcggggccccgggtccctgtgccctcgggggtccctagaaggcgacaatggctcgagtccaggcgccgaggctggcgagcgcctgcttggcgcacagctgcccgttgagcggcggcggctgctccgaggagtccggctgtcggctcaccagccccgagaagccggagcca

SEQ ID NO: 42932 - DNA, 2300 bp, Homo sapien
tagagacagggtttcactgtgttagccaggaagctcttgatctcctgacctcgtgatctgtccgcctcggcctcccgaagtgctgggattacaggcgtgagccaccgcgcccggccataaataaagtctttgtgtgcctttaagacaggcaccagggaagtgaagggcagtgtatttttacttctacgtgttatcacctgagcaagttccacagcctgtaggtctgtatcaccaataaaatgtaggtaggacatcctttatctgaagtcccctgaaatttcaatcctggcttctctgggaggaggcctggagaggtgctattggtcacaggggcccaaagcgtttgagattgttcgagggggccaagggaaggacacagcaccagccctggggccatgtgatcttgggcaagtctcacgctgtcagtgtccgagtttcctcatcggaaaaatgaagtaaacacccgctaactctgtcttcactctcaacgcctggcatggagtagatgctaagaaacttttgcagaaatcttggaaattcttaagactaaagaaagacccagagaccacagggtgggctactgggtctctccactcccaccaagggatgaagtaggtgctgagaactcagaaggaagccccaaaaagcagagactcagaagatcccctgaggaggcggtgaagcagcaggacgtctggtcatgggcctcccccctgagtccagccccacaaggtccacctatctctgggagactctgcagacctcgttcatccttcagggatccactcatggaccctcctcaggcaaacctccagaccatttccaagagcctccagagctgtctgggcagcccccaccccaggcacctttgaaacccctgggagcagcaaccagcccccttcaggcctcttggtccagatagagcgcccccaggaatcagcaatcctgtccctctcttctcccactgtctcagtccccagctgggacctgaagggttcaggataagaaggaaagctgtgtcaacagaagttaagtcggtgagtccccgggcctttggtattcacctcccgtctcgagcgcagggtcctgtcccagctcctagctccgccccctgggaactgtgtggttccccaagtcactccactcctccgagcctcaggcccctcctctacaaacgttagagtgaggcattggggagttgctgggaagggcctgccccatattaggcccataataatagtccctattgtcattattattagttaggcacgaaaggaaaggttacagagctggtgattagggcactcagcgtttcggctcccaggacgcttttgagcctcagctggtcgcgaggtccacacactccctgggtcatgcctggcctcggaactctctccatcagagaaggtcaaaattcacgatgttttggtttttcctgtcagacaaatggggaggacttcccttccgcaagcattcccagaggcccctcgaccaaaaagtcaaggagtcaggccctacattctctgcggtagagggtacccccaaaacctcgctcctttgatgttccccagtgtcaagccggcggctccaccagcctcctgtagagaggccttgactcccgcgggtcactcgggggggcgacaggtgcgcaggtggaggcgccgcgccgctgggggagcgatgagcggcgcgcacctgccgcaggtgaggcccagccgtgcggaaaggggaggagccgtcgccgcagcactcaggtgagccgacccccggctcccgggacctaaggcgagggcagccgcgggcttcaacgtggccgctgccaggcgacctatgctgcagactgcggccccggcggctccgagtcccgcgcggcgcggcagccccaggagaacattcgaggcagcagcggcgttggaggcccggggtccgttcggtatttgaatagcacaaaggaaccgccttggtctgattggccagccgagtagccccggggcgggctgcgcctgtcactcaggagactctcagagctcctattggctcttctcatgtggggcggggcccgggcacccggctaaatagctggggccggggccggccgagactcattgctttggcgccgtctggggagcgcgagcccgcgggtggcgcgcggcgcatggtggcggctcctttcggagcgcagccgaacctctgacccggactccgttacccctgcccggcgcgccccggcggccggctggaggcagaaacagcagaagcgttaacagcagcagcggcggcggctgctccgccgccgtctc

SEQ ID NO: 42933 - DNA, 2300 bp, Homo sapien
caacaactctccttgctgtgtgccaggccccaggctaagccacttataccctagataccaatccctggggatggatgtcatcagtatccccatttgacagataaggaaggtgaggttcaaagggcctcctgccccccgtcgcccccgccctggccctgtaccagcttcgaatgcagtggcagggggccacgatcttgtgcccaggcctggttctcctacccccagcagcgggagagaatgccggggaggcacgaagccgatccctccccagggggctcccacagctcccaagctcactgacacttgggtttccttcctctcctctggccctcccctggccccctctgctgcacccccagcttgtcccacccacccttgagctcgacccctctccctccccggttcccaccatcaaaagcgcctgctgcagggcttggctctgtttggtttctccagagcctgcccagggagctctgcctctcggaggctgtgtgctcactttgcaaaacagcagaaatttatagcccaagtaattgatcacggcgcttctgcctccctccatctctctcgggctcctaattcccttctcccgctcttctcttttttctcagcgcgccatctgtggtgtcagagaaaaggaagccaaaagtgggggggtgtttctagtcccagttctgccaattacgagtcacatgaacctcagtttccccatccgcaaaacggagaagctaataatacctgctcacaagtgtgccgggcccgtggaggccggggccgggaggagcacccagacggagtgacttctggccctgagccaccctgtgggggtgcagggtggggtgggggcccaccttcccaatggggacactggggccaagagagctcgagccattcactcagggtcgcagagctggtaaacagcagccctggggcttgaaccaggtgagttgtacctcaaagacggaaccattaggccacactcccccgacgccggccccagggcccatcagaaaacaggtgagcctccccaggcctcccagacccctatttcactccattctggagctaactgtggggcagaaggagaggccactagggcaaagtgaacactttgcaaattgtagagagccgcgaggatggaaggaaacttcacaatcattcccatcactcttcagggccggcccccctggatcagacccctccactgtctgggagactcactgggacctaagagcttccctggccctcagttgctgtctctccctccagagaagctgtatgaatagcggcctccctccggccaggcccctacacctgccagtctccaggaaggcccacagaaccttgcagaacaactcacaaatgaccccgaagagcacttcactcgcccttccgtggcagatgaggcagcagacctgggaggggaggcccaggttcccggcccgagctctggggggcccggggctggaaactcccctctgagccccactccagggcggggctgaggccattcctgaccccttctgttcggttctgggggatgggggacgagtgcttccaggggggaaagtgcttgtcttttttcccctccgccctcagtctagcttgtctctgcctgtgtacgtctctctgtctctcgctgtctctgtgtgtgtctttctctccaagcccccagcccgcaggtacgggcttgcttccacccgtgcgtggcccccaagactgagcacagctcctcgggtgtttgcatccaaggtgcccacagcgccccggcctcctcccttccccatggcagccccgggggttgctctgggcagggcggtccgcagctcgggggcggcgggcacgttctgttccccgctttcgggcggggaccgcaggctccagccccggcggctgcctgctcccgcctggctggcggagatgagagccggctgcagggctgggagcgaggcagcagcacacagaacaaacagaatttttttttgcaactagagggggaagcacagagctaaaaataaaacgaaaagatcagtatctgtcagtctgacagctgattggctgctcggagatgcatataattaccagcaactggcgctgggtaggcaaagccgggagaaactgctgagacgaggttaggatttaacctttaaattctggagccatcggaaaccgaggggaggacgacgggtgtcggtgctaatgaggctgggggcgggcgatgcgcggtgggcctccgagtccggggcaggtctcgggggttccccggggaaggccctgggagcccttggccctggcggcct

SEQ ID NO: 42934 - DNA, 2300 bp, Homo sapien
gcaacccgaggttggcgaggaatgtttgcaatgcagagctaggaggagggcgggctgctagaggtgggggccgaggcaggcccgcggccaggctccctagttgagcaatggccctgctggttcctgtaactcggacccctcccgccttttcccgccctgccggcttcctccaccccggctgggctgcctgccgggcagtgggggcggcctgcactcagctgcagagggaggtggagggacagaggcccagatagcctgaaggtcaagagtgaaagagaggggttccctgagagacagagcaggggtgcagttggctcagccaccccagcccagagaagcggggccttttccaaagtcacacagcaagacaccagtgaattgggccacagctctgggtctggcctctttagttcccataactctaggctgcaactcccacacacagcagggaggtcacattgccactcagctgggaagctttgaaccacaggggaccctctcccaacagaaggcaaagcccccccaccccaatgcactggcttggcctcttcacctaatccccagggtctcagagaggacagtgcacccactggtctaggtgcacccctccatcctgccattaactccccaccacttcccactgcccactgcccggccaggtcttggggaccttggtcacctctgttcctcgcttccgggagtatgaagtaaatgaatgaaggccaaacttgagctggttcttgaaaaccctctctcccctcttcctctgggtcttttcaaggaaggaccaaactggcacggtggctcatgcctgtaatcccagcactttgggaggctgaggtgggtggatcgcccgaggtcaggagttcgagaccaccttggctaacatagtgaaaccctgtttctactaaaaatacaaaaaattagctgggcgtgttgatgggcacctgtaatcccagctactctggaggctgaggcaggagaatcgcttgaacccaggagttggaggttgcagtgagctgaaatcacaccattgcactccagcgtgggcaacaagagcaaaactccatctcaaaaaaaaaaaaaaaaaaaaaaaggaaggaccttcatgagtaccaaatattcacttgggctcagacgcaaaactcagctctttctccacaagcacccccctcctttggggggaagctgtgttccctgacactgtgggatgagctcctccctctgccggcagtatttcctctctgggggacctctggggaggtggccttgcagttgggcacacctggcttgcatcccagaggcaccaccttcaagcttcctggctttgccacacctctctgagcctcggtttccttatctgtgccatggaattcagagaggccccagtctcactaggctgaggctcagggccagttgccttttcctggccccacagatgtatggtcagtttgggggtatgcccccatccctgctctgggctttgcctaagacaggctgtgggcagccctcagaggcgccagtttggccacacctggctggaatcagcgggtgggtgggagcacacagcagggacccagtgccttctagaacacagctagcagttcccgtgaaaatcaaaacaccccattttacaggtaaggaggctctgggaggagtggcttgccacactatgcagatataaagagggatattcaccaagaaaaacataccaataacaccaagggccctcctacacattgttctaccactatttattgagcacttactacatgccaggcaatgagccaagtgctttacaaggctgacctatttcaatccaacagcataccgaagagggaggcatattgatcccccttttacgggaaacagtgaggttgatgcatttgcccaagatcacacagctcttggggagtggagcctgactttgaatttaggccgcccgcccccagagcctgtgttcttggccatccttcttcgcacctggcttagagacccaggctctgcatagaggggcccagtgatcttgggttagtcccttaagccccagcctagcaaaagggaaaggaaatatcttcagcacccagtgagggggagctcagagaggggaccccttttactacagggcacacagccggctgagccaggacccaccacactcaactccccggcccctggctcccaggaggtggctcctccatggccgggaaggacccccacggctgctcccgcaggcagatggacagacgatggccccctcccacggcctgcgggctgtgtggcatcgccacctcctcccg

SEQ ID NO: 42935 - DNA, 2300 bp, Homo sapien
ggcctcacgcccgctcctcttcctctctttcaagatttgccgggtgctgggccccagaagccagccctcctgacgtgtggcggccgtcctcaccgctccctccttccctgcagcattccccagcccccggcccaccctcctcccacccgcttcctgacccaggctcccgggccttcccctcgtggccacctagctgtgtgctttgtttggctgctgtcacccccaggaaggtgatccccgtgagaactcaaatagcagatgctcatctgggacccccgcctccagccccaggggaggtttcctggtcctcactgtggccggggcatggctccttcaccccggggctcaccctcggtgtccgtgaagtccagccgacggtgaccctaagtcctccctccactcgcctatgtttggggatagcccatccttcctgcaggcctttgtcttggtgtcaccctgcctgagctggccccaaccacagtagcaacagtgatgctgatgtgtgactgctgccaggagcctgctcacatgaccgtgtggagaaagttctttccctgaggaccatctggagtggacgcgtgcactacccctctctgaatacaccctccccacgaggccctctggagcatcctgtagagccagcccctacccagagaccctgagcccagagaatgcgctgggtggtgagcctggggacgaatgcagagccctaggtctcctctccagaagtaagtatggggtttgtgtaaattgcttggtcaggagggcgggacctggggtcttcactaggcttcccaaaaactgggttgagcacatagtaggtgctcactaaataactgttgaaatagataagcaaggaggctgggcgaggtggctcacatctgtaatcccagcactctgggaggctgaggcgggcagagcacctgaggtcaggagttcaggaccagcctggccaacaggtttagtgatgaaaccccgtctctactaaaaaaaaaaaaaccaaaaattagctgggcgcagtgatgcacgcctgtaaccccagctgctcaggaggctgaggcaggagaatcgcttgaacttgggaggcggaggttgcggtgagccaaaatcgtgacactgcactccagcttgggggcaacagagcaagacttgtctcaaaaaaaaaaatatatatatatatatgtatatgtgtatatatacacacacacacacatatatatatatgcaaggggatggaaggatggacacaggcatgggtttgggccacacagtcttgctgggcctcctgcccatggccctcctggggtccggaacctggcagaggctgaggttccggagaagttgggcccccagcctgttcactggggcacaggtcacgctgtagacgcagccccactagcttgtttaggggtcgaggactcctacaacatccccgggaggggggtggcactgggacccttatttcctcctgtggaagcagaaccaggtgaccctcgccccccggctggctgtggtgctgtgtgtcacccggctgggtcaggccctgacaccgagcagggttcactgtggctcttgaagaccttgttgttggggctgaaacgcatctgcacctccacctgggtcctccgtccctcagggtgggtgtttattcccaagcaaggggtcacccagagagcagcccaaaacctcccttgagtcctgaggaaggggcagccagaggctgggctgggaggaggcgtggcaggcgttgggagcagctgctccaagtgcagtgaccatatttttctgagctgaaaaatgaggacacaggatgtagctgagggctttctcaggttggttcacttaatgaaggggaaaaaaccttccaaaggtatgaaagttaaagcttatttagttatgtggggaatagcttgtttttgtggaaggaacctgagtttccaaaatcaggggttttctggaaaggaataattccatttggctaatatttggggggcacctggaccaaccttgtctttagtgggaagcaaagcaggcatgatcctggcctcacagagtgacgtagggagacggacagtattccaataatttcatggttcagaggtcttttaggaggtaactgatgaagagggagcgcaggatggggtggggaaagcacattccaggcagggaacagcatatgcaaaggccctgtggctggagggagagcttcgcgtttgagggacaggagggcagccccgaatgtgacgagcgagagggagaggaggatggagatgtgggcaggggtcagtctgggcggtggc

SEQ ID NO: 42936 - DNA, 2300 bp, Homo sapien
gcagacccttccccgcccgtcctcatgatccatgcccctctggtgagtggttcagagcccacgctctggagcgagaccctctgggtccaaatcctggccccgcgagtcacacgctgtgacttgaccccgcgctacccaaggcgcggtccgaggatcagtgctgggccacacactgtttgtggacacgacacgctaactatagaactgaggataagcatttagcaactttcatagcaatttgacactgcctacatcccattgtgactgtgtatattataaaaatatcattcctgacagattggaacattttttctcgaagttccttcatcacagatagtttgggaagcacggattcagcctactgtgtgcctcagttttctcactagtgaaatgggaataatgatggtctgtaacctcaccacatccctgagaaagtgtaaaggagtaaaattagggagggctctgaggctgggggctgggcattgcaatcgctcagtaaatgtcagtgtcactatcattttgacacattctccagattctgcattacaaacaccagattctcctctgagggcagaggaggaattgttggggagagagtggaccccattcagtgtatcctaccccaccccaagttcctatagcttttagccaatccttgagattggaacacctctatcactgcatccaaaacctttcaggtttccaaaggaactactgggtagtttattcatccacttaacaaatatctagggccagcaccatggctcacgcctgcaatcccagcatttgggaggctgaggtgggcaggtcgattaagcctagcagtttgagaccagcctaggcaagatggcaaaagctcattactacaaaaaaaaaaaaaatgcaaaaatggctgggcacggtggctcacgcctgtaatcccagcactttgggatgctgaggagggcaaatcacctgaggtcagaagttcgagaccagcctgaccaatatggagaaactctgtctctactaaaaatacaaaattagctgagtgtggtggtgcatgcctgtaatcccagctactcaggaggctgagacaggagaatagcttaaaccccggaggcaaagtttgcagtgagctgagattgtgcctttgcactccagcctgggcgacagagcgagactccgtctcaaaaaaaaaaaaaaaaaaaaaaagcaaaaattagccggatgtggtagcgtgcacctgtggtcccagctactcgggaggctgaggtaggaggatcacctgagcccagggaggtcgaggctgcagtgagccatgattgtgccgctgcactccagcctggatgacagagagagaccctgtctcaaaataaaattaaaaaataaaataaaaccaaatatctatagcccacgtacagggtgagagctggagagtctagtggttaggaactttggagcaagatggccctggggtccagtcttggccctgccacttactacctgagtggccttgggcaactcacttaacctctctgagccacagtgttcccagaagagagtcaggaggagtcctaagctcgggactcagttcaaagctgagatttggccttcaatgtgcacatacctgcagaaagcctggccaccccagacactcactacatccaggcttggatttacaggctgtggtgacctcccaggttccctaccctcaatgagttcctgtggattaagaaggaacgggtggtgccttgacatatcaaacttgtcaggtgttacttctagaaaaataaatgaatttaagggctttgaatatttgagaatggagagatttaaaaatgtaaaggtttcttaagatggatagaagacttaccaattggatttgtattctgtggaacagggaggcttgtgtgaggcctctctctagaaaacgcagctctgtttaaagggaaaagtgcaggcaggctggccaacccacgtgatggctcttgaagcttctcttttgaatggcctgctaggacttgggctccggattcactggctaacgcaagtcacgtggccaaacatgatttggtggggaggggaagtgtacccagcactggatgctctgcatgtcacgtagcaatggggcaggatggataatcctctcactgaggggatggtgaataactggaaacagtgaccaatctgctgccgttcaccatcttggttgcaaatatcactcccgtctcttgcatgggcgtggtggattggagatggctgcagattcttagtcattactctcagcaagacctggagtcttttcctcctccccttgg

SEQ ID NO: 42937 - DNA, 2300 bp, Homo sapien
tgagtcttggaagtagaacgccttgacactccagataagggggacacttgtccagggagggccagctgagcccccacccctgttctcactgccccgtagcccccatggcctcagggctccaatctccctagcccagactagaagcaggttggaaggagaacccaggtggggatgtgaagggcagagtcgggggaggcagcggaggtggggagtaaaaggactagattgagcccctctggctgccatatgcacgaccttctgcagggccaggctggtgagaagccagctaggggtgagcgtcctgagcagtggccttgggggtggtgtggttttaataacgaccttcaaatgtgtgggccccggggagaggcagattatatgagacccaaagtcggggcttcgagatggggaatactgggggactgggcatgttcccctctatgtaaagtttcccaaggacaggacctcccttcgaccgcgcccccacaaactctctgcccaagcgccccatctcccaagtcctgaagaccactggcagatgaggaagtggaggctccgagagggcaagccgttgcctaaggccacacagcaggggagtataggatacaaatccggatttggacccagctgtacctcgaaattccttcctgctcctaacccctccctaataccgccctctgctgtgggcgcagtggcacgtagtgggctcgcagtaaggatggggatgaaggaaggaaggaagggaagaaatgcctaggccaggctcttcccacgccccggtctccgcggcccgctctttccagctccgtcgcccgcccccctctcccctcccagtctaattgggaggtctccgagccgtctctcccgcttcctcaggttcccccgcgctcctcccggaccccaccccgaggcagctttctcacaacgggatcctccccgggcggcgtggggacgcctcccgaccccgaggcccggcaggagagccgccaccgcggccgggtggtctccgcgtcgcatggcccctgccggcccccccgcccatggcagctacataattaattcgcccataaataactgattggggtcgcgcacgcgcccggtgtccctaggactgggatccccgttagggttaggggcgtggggggtcgggggccgcggggctgtgcgtgccggggcgcacggttttgctccgcgggcctctctcgctccctcgcgccggctttttccctttttctctttcctttttttctttcctggagcggagcccggcgccaggagtctggaaccagcttgacaggcttttgagttatggaggggggagggggagaggcgggcggcggggagggggaagggagggcgccgccgcggcgtgggggcggggccggctccccggtttggagactcgccccgactttggggtccgccagcggcggccgggcggagggcgggggaccgcaatcgtggggggagtcaccccgcggggcccggcgggcgaaacgggccgggcttcagagccgcagtaaatgaggcccggggcgggcgggggtggacacggcctcggggccacggcctcccccgccgagcaaggcattcctttccgctgaactgggcgcccgggcccgcgccgcgccctgcacgcctcgcgcccggcgatcgggcccagggcgggggagcagggaggcggccccagccggtcgccggcgcccccaggcgctgcttcccaggagctcggctccccgggatggaagggactgatacccagttaatgggcgtggagcctgagcccctgagggtcgtcgctaacgggggtcgctcagcagggccggcctccgctgcctgcccggggtgtctaatcacctctccgatcctttgcccggatctgagcttcgtcattcacgcccctcctccctggcgactttgggcctggtgacagtcccccgaccctcgcagagccaggggcacagtaggcgccttagccactggcagaatttcaccggcgctctgcccgacgcccccagccccagggccgggcgtgggtggaagtgtctggaagggtgggttcaccagggctgggcacgtcagcggccccgtacagagaatccggtgcctggggtctctggagggggtactcagagtatccgaggaggagactcctggatgctaacagagcccccagttaggagcagtccgcgagacagttggtaacagtgctggccttgcccgggcgccggaaggttccgtgaggcccagcaagtcctgacttggcacagggcccagcacacggtaagcgctcggtactt

SEQ ID NO: 42938 - DNA, 2300 bp, Homo sapien
accagcccctggggttatttggcttggcagtcagaggaggacaagttgcaggagagagaatcaaagattcaggctgcctagtgtggccaccgccccatcagccctaagatgatcgcagcccctttctggccactgaatatgtgggcaccccagacctctgtggcaaggctgggtgagagctgtcttttgtgcacaggtgcccctagtcccccaccactagtgagcattcacacacagaggtgaacagcccccttgtgggcctggaggctcctaggccaggtagagatgaccagagtagggagcagagaatccccagtgcctagcacagtgactggcactgaagcatttgttggatgaatgaatgagtgattgcctgacctcaggcccagggaggaaggcctggtgtgcagggcagctcctgggaggcttcagggatggggagaggacagagagggactgggagagccacaggaaggcagcctcatctgatgactgacttgggagggaaacagaatgtgggctgtgtttctggggaaacacccccctgatgcccgggcacccaggaacttccaggtacccccggatcaccccagtgaggacactccacaattccccaggaggcatcacagtggggccgttaaacccagggacttgggattcagacacttctgggctccagtccacccctcactggctggaccagttgcctcagtttccctatgtgcacgggggacggataggaccacgtgctgcacaggtttgctgggaaggccatatgagaggtgccggctcagcacatcctgtctgccattgttacaaacaacagcacgggagagtcggggagcagagtcggccaaacgcaagaccctgggctctggcttccctgtgctactgacctatggggtggctttggacaaggcccagcctttctccaggccttagtttccccatttgtacagtcaggccctgctaacttggacagactttggcccttctccaagccccacagagacatcagagacatgtgcacacacggccctgggattgccgacagacacacaggcacacataggcacgtacacacaggcatacagacacaggcacagactcacactcggcccctccccactcacactcgctcacactcatgctcacactcacaccaacccccctcccccaaatctgctgcgcaccaacggttggtgcgagcggggttgagaacgggaggaaaaaagcccacgactcagcccgggaagaggggtgcggtgggggaagggcgggcgagggaaatgacagcccgcggtccccctcgagtcccggctcatgaatattaatacggcggtaattaaaatgcagggacgcagcaggatggatgcggctgcctccggagcgcgggggagcgcggagtctttgcaggcgggtgaagcccgctcctcgccggcgaaaagcggggccgggctccggggcctgggtccggggcgggcgggagtggggacatttttcgtggtcccgagcgtcccgtcccggcgtccccgcccccgccccgcggccgcctctccacgccctgccccgggccgcccgccaggccgccgtttcccggagccggccccctcccgccctcgcggccggctgatgtcatctgcacacaactttccgcttcccggcccgtctcggggccctgagtcatcgccgcccccggccccgacgctggcctgcggcgtctgtttgtgcagagcgaggccccgccggccgggcttgacgtcaggctggcagggcctggaacggccccgcatcgcggccccctgggggcaggacgacaccgctgggggccgagggcagggcacgccttcggaatccggcttcgaagccggccgcctgacctggggcaagtgctttcaactctctgaacttcggttcctcatctgccagttggcagacgctcagcaaatcttcctagactcacggggcgaattgtacagttgggtaaatcgaggcccagagatggcaaaaggaccgtccaaggtcgtacagccacccggaattacaattcttttctgccgggtcacacgctgtcatccacgtgttacctaagagagctttccagcctgtgctaagaaaactgccccacatcatctgcagtaggacgggggagttggagccctggtcaggccactctgctactgaccacagttttctcatctctaaaaaggcgcagtaacaatataattaccgtatgcagtcccccaggatacagggtcaaaggagagcacaaccatcgcagttggaagcccatggggcag

SEQ ID NO: 42939 - DNA, 2300 bp, Homo sapien
cccctgatgcccgggcacccaggaacttccaggtacccccggatcaccccagtgaggacactccacaattccccaggaggcatcacagtggggccgttaaacccagggacttgggattcagacacttctgggctccagtccacccctcactggctggaccagttgcctcagtttccctatgtgcacgggggacggataggaccacgtgctgcacaggtttgctgggaaggccatatgagaggtgccggctcagcacatcctgtctgccattgttacaaacaacagcacgggagagtcggggagcagagtcggccaaacgcaagaccctgggctctggcttccctgtgctactgacctatggggtggctttggacaaggcccagcctttctccaggccttagtttccccatttgtacagtcaggccctgctaacttggacagactttggcccttctccaagccccacagagacatcagagacatgtgcacacacggccctgggattgccgacagacacacaggcacacataggcacgtacacacaggcatacagacacaggcacagactcacactcggcccctccccactcacactcgctcacactcatgctcacactcacaccaacccccctcccccaaatctgctgcgcaccaacggttggtgcgagcggggttgagaacgggaggaaaaaagcccacgactcagcccgggaagaggggtgcggtgggggaagggcgggcgagggaaatgacagcccgcggtccccctcgagtcccggctcatgaatattaatacggcggtaattaaaatgcagggacgcagcaggatggatgcggctgcctccggagcgcgggggagcgcggagtctttgcaggcgggtgaagcccgctcctcgccggcgaaaagcggggccgggctccggggcctgggtccggggcgggcgggagtggggacatttttcgtggtcccgagcgtcccgtcccggcgtccccgcccccgccccgcggccgcctctccacgccctgccccgggccgcccgccaggccgccgtttcccggagccggccccctcccgccctcgcggccggctgatgtcatctgcacacaactttccgcttcccggcccgtctcggggccctgagtcatcgccgcccccggccccgacgctggcctgcggcgtctgtttgtgcagagcgaggccccgccggccgggcttgacgtcaggctggcagggcctggaacggccccgcatcgcggccccctgggggcaggacgacaccgctgggggccgagggcagggcacgccttcggaatccggcttcgaagccggccgcctgacctggggcaagtgctttcaactctctgaacttcggttcctcatctgccagttggcagacgctcagcaaatcttcctagactcacggggcgaattgtacagttgggtaaatcgaggcccagagatggcaaaaggaccgtccaaggtcgtacagccacccggaattacaattcttttctgccgggtcacacgctgtcatccacgtgttacctaagagagctttccagcctgtgctaagaaaactgccccacatcatctgcagtaggacgggggagttggagccctggtcaggccactctgctactgaccacagttttctcatctctaaaaaggcgcagtaacaatataattaccgtatgcagtcccccaggatacagggtcaaaggagagcacaaccatcgcagttggaagcccatggggcaggtgagtcactgttgtcactactggggtcaatttttttttttttctttttgagacggagtctcgctctttccccaggctggagtgcagtggcgcgatctcggctcactgcaagctccgcctaccgggttcacgccattctcctgcctcagcctcccgagtagctgggactacaggcacccgcagccacacccggctaattatttgtatttttagtagggacggggtttcaccgtgttagccagaatggtctcatctcctgacctcatgatccacccgtctcggcctcccaaagtgctgggattacaggcgtgagccaccgcgcctggggtcactattgaagttggctaatgtcactattgaagtcaagtgagagagagggccctcttggagtcagaccacctaggttcaaattctggatcctgcttccggctcctttcctctgtcccccttctcccctcggtgccctccaaccagtgggcctgggaaagcgtgttcatgctggaaatgcctgcccagcccttgcccagtcacacagagcaag

SEQ ID NO: 42940 - DNA, 2300 bp, Homo sapien
gggagggcagctgagctgcctgccctcatcctccctgcccttcaggtattagggcccttcccatggcccagtaggaacccagcggctcacctgagcccggactaaggatggggcattttaccccatatgcagagatgagaaacagaggcccaaggagggaagggactgaacacagggtggaacagccctgggctgcgcctgtgtttccatccgccttcctcctgcctgtgctcgagtcacgtgctggtgtgcagggaacaggaagacagccgctgccctcacaggctcagggtctagcagagtccacagtgaccacaggcgaataaacaaaggcagtgagacagaggtgggcaaggagaggtgctgggatggggagcaagggggtacccatgctcatgggtatgaacacatggacccatatacccatatgtatgtcccagagtttcttccagaacttttttttttttcccaagacagagtcttgttctgtagcccaagctggagtgcagtggcacgatctcggctcattgcaacctccacctcctgggttcaagcgattctcctgcctaagcctcccgagtagctgggattacagacgccctccaccatgcccggctaatttttgtatttttagtagagacagggtttcaccatgttggccaggctggtgtcgaactcccgacctcaggtgatccgcccgcctcggcctcccacagtgctgagattacaggggtgagccactgcacctgaccccttctagaacttctctatcagttcactctcacatctacactgaacacctttgcccaaggctgggggcagagtggttaaaagccaaatctagactccttcttgctgtgtgacctcggccaggtcactgtcccccactgtgcctccccatcatgtcctcctctaaaaaatggatgcatagccctcagggctgttgttgaagggtccctgagatgactgtggagctcttggtgtggggacccaagctcaaccctgccccaagtactgtcccccagcccaactgcagtacttggcccccctcaacttctagcctccagtctctgcctgaaccccagcacctggcagttcagctcagttcatttacgtagcccagcctgggttcctgtgagatgaaggccggtcacaatgacaagactgctggggacgattgggtccctggccaggtactcaggtctacagcctaacacacggtgagctgtttcccagccacccaactcttgggcatccctgcaggacctccacggggagtccttggctccctgaaggatggatcatcagaggagctgccaggctgccagagctggaagggacctcagggatcaccactgtggccaaccctccactgcacacacagaaaagctgcagctcagagctgggcgtggtggctcacacctgtaatcccagcactttgggaggccaaggcaggcagatcacctgaggttgggagttcgagaccagcctggccaacatggagaaaccttgtctctgctaaaaaatacaaaattagccaggcgtgttggtgcatgcctgtaatcccagctactcaggaggctgaggcaggagaatcgcttgaacccgggaggcagaggttgcggtgagccgagatcacactattgcactccagccttggcaaaaagagcgaaactccatcccaaaaaaaaaaaaaaaacaaagctgcagctcagagaagtggagacactggcccagggacccacagcaaggccttggcccagctggggctagatggcaagaggtggttcagcattggagctccattgcctgggttcaaatcggggtctgtcactggccagctgtgagcctaagtctctgaacttctctgtgccttagtgtcctcattctgtagagtggagatagtaatcattcctatttcaaagattgttgtgagaaataagtgaactaatacatgtcatatgcttaaaagcagggcccaggacacagtgagcatacaatagacattagctgctgtggtgtcttgatttcaagcccagtgcagatgcatctgacttacgaaacttcagtgacacctgctctgtgccagacactgaagatggagcagtgaacagcactgacccagcctgtcctcctgttgcctgcaggccaggtaggaaacacactggaaactgataactccatgtgctcatcgccatgtggtttctgctggtctggggagccggggacaaagagcagaaaacatggttccaggtagaggggggtagcacgcatgaagaccgtgaggcagaaagcacaca

SEQ ID NO: 42941 - DNA, 2300 bp, Homo sapien
catgcatgctcagcctttctttttttcttttctttttttttttttttttttttgagacagagtctcgctctgtcaccctggctggagtgcagtggcacaaccttggctcactgcaacctccgcctccttggttcaagtgattctccagcctcagcctcccaagtagctgggattacaggcacctgccaccacacctggctaatttttgtatttttagtagagacggggttttgccgtgttcgccaggctggtaattcttgtatctttagtagagacagggttttgccatgttggccaggctggtctctaactcctgatgccaagtgatccacccacctcggccttccaaagtgctgggatgacaagcgtgagccaccgcgcctggcctttgcattggttttcttgccgctcctgttttgctcttcccactccccatccctcactcttgcccctaggagtactcgtcccaaacaaactacaagtacaacagcctttgaggcctacttgcaggggagcccaaaccaaaccaaagcagatgttacaggctgaattgtgctcttccaaattcatatgttgaagtcctaacccccaggtcctcagaatgtgtctgtatttggggacagggtactatggtctgaatgtttgcatcccaccaaaattcaggttgaaacctaatttccagtgtgatgatattatgaggtggtggcttttgggaggtgagagctctgcccttacgaataagattaatgcctgtatcagtccgtcttcgaatttctgtcaagaaacacctgagaccagctaatttataaagaaaagtttgattggctcatgggtctgcaggctgtacaggaagcatggtgctggcatctgctcagcttctggggaggcctcaggaagcttccaatcatgacagaaggtgaagggggaacaggtgtctcacgtggccagagcgggaggaagagagagttgagggggaggtaccacacacttttaaacaaccagctcccatgagaacccaccactgtcaggaagacaacaccaagccatgaggtatccactgccaagcaaacacctcccaccaggccccatctccaactttggggattacatttttttttttttttgagatggagtttcactcttgttgcccaggctggagtgcagtggcgtgatctcagctcactgaaacctccacctcctgggttcaagcgattctcctgcctcagccccccaagtagctgggattactggcgtctgccactatgcctggctaattttttgtatttttagtagagaggtggttttaccatgttggccaggcttgtcttgaactcctgacttcacgcgatctacccacctcggcctcccaaactgctgggattacaggcgtgagccaccgtgcctggccagggattacatttcaacatgagattttggtgggacaaatatcccaaccatatcaatgcccttattaaagaggctccaggggccaggtgcggtggctcacgcctgtaatcccagcactttgggagcctgaggcgggcacatcatgaggtcaggagatcgagactatcctggccaacttggtgaaactctgtctctactaaaaatacaaaaatgagttgggcgtggtggcgcatgcctgtaatcccagctattcgggaggctgaggcaggagaattgcttgagccagggagtcggaggttgcggtgagcaaagattgcgccactgcactccagcctggtgacagagtaagactccgtctcaaaaaaataaataaaaagaggctccagggagcttgcttactcagtccaccacgtaaggacacagcaagaaggcaccatctatgaaccaggaagcaaaacagtcctcatcaggcaccaatctgctggcaccttgatctcggacttcccagcctccagaactgtgagcaataaatttgttgtttttaagccgcccagtctgtgatgttttgttttagcatcccagactaagtaagggtttaaaagaggtgattaagttaaaatgaggtcatcagggtgcaccccagtccgacatagctgatgtccttataagaagaggaaattaggacacagacatatgccatgtgaagacgcagggagaatgtgacatctgcaagccaaggagagaggctgcaggagaaaccagctctgctgacactttgatctcaagctctggccaccagaactgtgagcaaataagtgtctgttgtttagggcaccctgtccatggcaccttgctccgatagccccaggaaacgaatccacaggtatgttctc

SEQ ID NO: 42942 - DNA, 2300 bp, Homo sapien
ttttgtattttagtagagacggggtttcaccatgtggcccaggctgattgcgaactcctgagctcaggcaatccacctgcctcggtctcccaaagtgttaggattacaggtatgagccactggaacctggcctcttttttttttgtgagacagagtctcaaatgatctgtgtaacggattagagttggagatgtcagcatgagctcatgtttagcttaatataagtacagatggttacctatagaaatatttatagatatgtgtgtgtttcatagtatacacacacatttctttgtcagctgagactgcctgaaagaaatgacatctcaatagcaagaagcacacctagcacccagaccttggattattattattattatttttgagatggagtctcgctttgtcacccaggctggagtgcagtggcatgatctcagctcactgcaacctccgcctcccagggtcaagcgattctcctgtctcagcctcccaagtagctgggattataggtgcacaacaccatgcatggcaaattttggtattttttgtagagacgaggtttcaccatgttggccaggctggtattgaacttctgacctcaggtgatccgcccgcctcggcctcccaaagtgctgggattacaggcgtgagacaccgtgccccgcagggtctgttcatttctaggtccattgtattctgactgcctggtcttggggtggaagttctacttccagagccacccagcctaagcctcccagatctggaaagggtaggcctggctgccctggtcagagtcccagtgccccaggtggctgcggccagggcatccagggcacaatagccccacccttagtccccaggcctcagtgcccactgctactcagatgcccaggggtgaggggcggatcacaatgaccctgaagcggcccagaggcagccgggaggggctgggagaggcaccaggcagggatgatgggctctacagcctgcctgtagagagctctaaactcacaggaccttctagggccccacccagaagcccaccagggtgagtgtgacactgcccaggagtcagctcagagctgacaacaatctgggagtggggtgtggttgggaggaagcaggcttagaaacccctcagtgtcagagctgggagtaagactggggctctgcctcccaaagggggagtttgttaaaagtctgtgtcttggccagaagtggggactcacgcctgtgatcccagcactttgggaggccaaggcaagtggatcacttgagcccaggagttcaagaccagcccgtgcaacataaatacaaaaaaattctaccccatttctacaaaatatacaaaaattagccaactgtggtggtgtgtgcctgtagtcccagctactcaggaggctgaggcaggaggatcacttgagcccaagaatttgaggctgcagtgagctatgatggtgccattgcactccagcctgggtgacagcaggaccccgtcttagcaagaccccatctctttaacaacaacaacaagaacaacaaactgtcttggctccagcagagacgtactgaatcagaatgggggctgggggtaagtcatctgtattttcaacaggctccccacccaggggtctctgaggcagcaccagggctgggaggctgctggtcaggtctctcttccctcaagctggttccaggtttcctaattcccagtagagcgctaatgacggtaacagttccacgctttgaacactgcaaggcaggctaagtgctctctctaccagcggtgatgcggtgatgccgtttcacggctgcagagaggcaggtgctgctattatccccattctgcagaccagagcccccagggaaggcagagggaagttaattggcttggccaaggttacaaagctaataagtggtggagctgggactaaatcctaaataataataactttgaaatactaagaatggcagctagtctatgtgtaagcttggccagcgtgcctggcactgtaccgagcttgctgttctaagactggcatgtacttgctcatttaaacgtcacagcaacccccaaagttggctactcttgctgtcaccatttttcaggtgaggaaacagaggctctgggagctctcgcctgaagccactcgctgtccgccgggccggtggcgttcaccccgcaccgcgctgccccgcccggggcactatggcctggggctggactatgccctccccacctcagccggcgccccccacccacgcgcgctgagggtgcggtgagctgagtgcggggccaa

SEQ ID NO: 42943 - DNA, 2300 bp, Homo sapien
agtgctgagattacaggcgtgagccactgcgcctggcctaactagatggtttctaaggagccctccagcccttgcactctgcaaatatttatcaaggaactactatgtgctaggcttgggaattcagagatgccagaggctttgaggtcagggagccggccagtcctgggaaggccttggagcgtggctgtggggaaggggcttgctcttctgttgacaggaaataagacagggctggatttttaggcatacagagagcttggatcagagctgccccctggcggaggattccggacacccccaccgattgaaattgcccaggatcaatccctttgcttaaagacacagaaaatgaagcttgggagaggggctcagaccaggggtagcagttgtgacctagaatagtctagagggtatgccaaataagatgcacatacacacatcctgcggactcaatgcagaaggggctttttagcatcccctttctaccgtagctttcaacacatttagagcaaacacactttaagcaccttctgtgtgcgtcgcccagaggaaggaacaccaggatagtattattattattttatttttgagacagagtttcgttcttgtcacccaggctggaaagcaatggcgcgatctaggctcattgcaacttctgcctcctaggttcaggctattctcctgcctcagcctcagagtagctgggactacaggcatgcaccaccatccctggctaattttgtatttttagtagagacggggttttgccatgttggccaggctggtctcaaattcctgacctcaggtgatccgcctgccttggcctcccaaaatgctgggattagagtcgtgcaccaccgtgccctgccaacacaaggatattattaatagtataggaaaaatgaacttaagatggatattgtcattataacagcttccatttcctgagaacccactgcaggtgctgagctgaaggtctgacgtgcaatgtcccacaagtttaaccctctcagagcatcagaagttgagtaattattacgttgctcaacttcctcttctgacaggagactgaagctcggaaatgttaacaggctctacccacctgcaagctcccgtttccatcaccgctgcctcggagatagctccagaatttctttgcatgggaggagcctagggaagggccacgcttttggaatggaaacgtcatgggcttgttttgctcatttcagtgggaatcccatggcactgccgagagtatttctttttattttatttattttggggggtcggtattattttaagatgctaatggagatgggtggatttgaggaccaatggcttttttttccctttttactcaaagcccgcacaacacactcgtttttagaagtccagcctgcagcctccaaacgaactgttgtacgtgctggggacggggagagggcgacgctgcggctcttttccgttcgggaggtccttctagattcccaaaagtcaatttagtcaagttttgagctgtaacctgtgttgggcgcggtggctcacgcatgtaatcccagcagtctggaaggccgaggtggaagcctcgcttgaggccaggagttcaagatcagcctgagcaacagggtgagaccccgtctctaattttttttttttaaagaagtcaaattaggccaggtgcggtggctcacgcctataatcccaacacttcggaaggcagaggcgggcggatcacttgaagtcaggagttcgagaccagcctggccaacatggtgaaaacccgtctctactaaaaatacaaaaattagctgggtgtggtagctcacgcctgtagtcccaggtactctggaggctgacgcaggagaatcgctggaacctgggaggcagaggttgcggtgagccgagatcgcgccactgcactccagcctgcttgacagagcaagattctatctcaaaaaaaaaaaaaaaaaaatttaaattatttttcaaaagaagttaagttaaatccggagcccgcgcgggggaggggcgagctgagcgagggggtggagccagccatgggcccgcccctaaacgcccggaagtgacgttggcggacaaaggcagcgcgcgccgcgagctgtcgcgtctggtcgtggtctggcggagctgcggttggcttgtggcgtctccgccgccgccgccctcccttcctcttccccatcttcttctctcggtcccgggagcccccgcccggagtgagtagcgcgaggcggtgcgaagggtaggcagccgctgggagaggggaggctgcgacc

SEQ ID NO: 42944 - DNA, 2300 bp, Homo sapien
atgtagcagctgctgctgctgggattcctaccacccactgttgctgtgtgtcctcagcacggccactgccattctcactctgcctcctttaggttaggccttggcagtgtgggaaacacatcagccgagagttggtgcccagcatgcactcgaggccaccctcatccaggccccgtctgcctttccgagctcaccttccacagtcttcccccgctccactctccgccctctgatggcccatgctgtcccacggctgctccctctgtctgccccaccccctccagcactccctgtgcttggctgcccagctcgggctgcctcctccaggcggctgcccctatctgctgttgggaggagattcctctgccctttgagtgtcctcgacactttgtgggtccatgagaatccttatttttctgctgtgtattttctttccctttgttctttgtcctcctggactagagctctctgaggtcttggcaagcctcacagcaactagaacagcccctaagcgtggtgtgccttggtgacagcactgtgccttgggaagcttatggcagaatggccacccgtggagcacggagccgcccaactgtcatcgctgtcctgaagggtgaggtgggcctgggctctgctgccaggacccagctgaggctttctagttctctctccttctaccgtggcaaccgtctcctcatccccctgccatctccaccgccgccagcagtcttcagaagcatcggtcttcccgggccactctctgttgggcctcagggtggttgactcattgctctgtaggatgcagtcgaaactgctagagttgactgtgagaccaggaactggcagccgcgagggctgtctgtccttccctccaggagcagtgccgtcgccctccacctactgcgcttattcttgcccatccatcggtttcagcttacgcgtcccctcctcagggatgccttccctggtccccgcacccgactccacttcctccctccgtgctctgctggcactggcgcttctcctctgcagccctccctgcaggtgtggttgtgtctgtagaattgttttctgcctggctggctgcctggttcacagcccggtgcctggcacagagtccccactccttgttaacggaggactggaccccaccgtgagttgttgctgtgctctgagccagaggaagggaggcgtggaagcttccctggccctccagggtctgctggtgctctcggctttgcggtcgtttctctttattgatcagggttttctgtgccctgaagccactgagtcaggtgtcatatagagcatatcaagaacttgaagccaggccaggcacatgggctcacacccgtaatcccagcactttgggaggccaaggtgggagaatctcttgaggtcaggacttcaagaccaacctttgtaacatagtgagaccccatctctacaaaaaataattagccaggcatggtggcacacaactgtagtcctagctgctccggagggtgaggtgggagggtctcttgagctcgggagttggaggctgcattgagctatgatcacaccactgcactccagaaaaaataaaaatgtaaaagaacttgaagccaggacttggggcgggtgctctgagtgcaaaagacagaagatgctgttatccaaggggtagaagcagatttggggaccctggacttctctctgcactcagcaggatgtgtgacttgtgaagcctggtgtgagactggccctctgccctgggggcctttctgccaggtccctggcccgctgactcacgcccccttccttacccaggagagtcgcggttgctgatcgtggtgcttgagtagagccgtggttggtgacagcatgacgagcgaggtgatagaagacgagaagcaattctattccaaggccaagacctactggaaacaaatcccacccacggtggacggcatgcttggggggtatggccacatctccagcatcgacatcaacagctcccggaagtttctgcagaggtttttgagggtaggcaggtctggcgtgctctccaggagaggctgtggctctggtggcactgccgagtccatgtggggtgccaccttttacacatgtaacactgcaggattgttggctatctcttggtacctaccccaaagccttgaggagctgggctgggtgggcacagtggggtaacttctagattgtggacttagcctcagggttaccagacaggagctggctgttaggcagaattgaggtgcctgaattgggcaaacctctcttcaactgttgggttt

SEQ ID NO: 42945 - DNA, 2300 bp, Homo sapien
agcgcatgcctgtaattccagctacctggtaggcttgaacccaggggttggaggttgcagtgagccgagatcctgccactgcactccagcttaggcaacagagtgagactccgtctgaaaaataataataataataataataaataaataaatataaaaatgtttactctaagacccatcggattgtcttgaaatgcgcctttaaatgtttttttcctgggctgggcaactctcgctgtctggcaggttccagggagaggggcccaacttggcagagcaaggcccaggaggccaacgctgtgatgtggactgctggggcgggaaacccctcttcatcatcagcttcccagaagcaagaaggcatcaaggcccccccacgcagactccaggtgggagaggaggctcaaatgcatggcccaaggggaggtgcctcgactccagaaaagtggtttttccaaggcaagctggaaatgtccatttccatgtgagcagaatttcccgatttcacccagggagaaatttctttcctacagcgagaaccaaggcagaaacgtgctggcagctgtggactctgcggcctggagctgcttctaggaagcccaagctggtgttgccctaaaggggcttaaacccggctgcccactccgccccttcttcctgaaccagagggttttggctccttcccactgaattccacttccaccaacaattacagtgcgctggctccagcatctcaggtgagtgtgattatactttttttttttctttttgagacagagtttcgttcttattgcccaggctggagtgtgatggtgcgatctccactcactgcaacctccgcctcccgggttcaagcaattctcctgcctcagcctcccaagtagctgggattacaggcgcctgccaccacgcccgggtaatttttgtatttttagtagagacagggtttcatcatattggccaggccggtctgcagcttcgaacttctgacctcaggtgatccacctgcctcggcctctcaaagtgctggggattctacccattttacagatgaggaaatccaagttcagagacaggcggtagcacactcctgtgttcccagcttctcgggaggctgaggcgggaggatcacctgagcccaggggttcaaagctgcagtgagtcatgatcactacactacactccagcctgggagacagagtgagaccctgtctctaaaaaatacacaagattcgggctgggcaccgtggctcatgcctgtaatcccagcactttgggaggccgaggtgggaggatcacgaggtcaggagttcgagaccagcctggccaatatggtgaaaccctgtctctactaaaaatacaagaataagctgggcgtggtggccagcgcctgtaatcccagctactcgggaggctgaggcaggagaatcgcttgaacccgggaggcggaggttgcagtgagccgagatcgtgccattgcactccagcctgggcaacagagcgagactacgtcccccaaaaaaacaaaaacaacaacaacaaaaaacaagattcactgagtccatcaaggcagaggtggagagggctagcagccgtcctggccaggtgctccccgggacagagaataagaaactgaggaggggacgtgcgagtaccctggtcctcatcattccagtcagcgggccgggtggtgacagaggtggcccagcccctcttcagggaaggcgagggccagcccgaaccggaaggggcagtgtctgatgaccacagctctcaggggcgcccagggccagtggggcagcggcagggccgagagcacgaccggcggaactcggacggcgcccagcggtcgcgggcgggatcgcagggcgaagccgagccgggccgggccctggcaggaaggggcggacccgcctgagtctcggatctggcttggctcgatcctccactctcccactccgctggggccgcccactggacatcgcccgagtcggcctggcggtcgtgccccaggacgcgccgaggtcctccgagcccgcagggggcgctgtcgccatatggcccaccctgagtcggcgcgggcaggaagtacgagggtcacttccggcgggggcgcggcttggactgaggagcggacccggccgggcgcaggggctggactggcggagcaggtggggtccgcggccgccggagcgttccggtcggcgtctgggcatctcggcctcggcagaaagcgcgacggccctgctgcgcggggcccgcggcgatgccgttcctgcacggcttccggaggatcatct

SEQ ID NO: 42946 - DNA, 2300 bp, Homo sapien
tgcctctgggatgaagcctctactcagtgggctgtgcttttcctgggtaagacccctccactctgagggttttgctgggtgcaggggcagggtcctcccagacatcctgagcccagtagtggccctaccctgctcggttcctcagaaagtggttcagccacacacactgtgggcagcactgggtatgccctggtgcccagactgggctcctcccagccgcctaggatgagggagactggcgcctctttgctggcctttcttgctggacactccttggagcagaggtccaaggacggagaaccccgtcatctccaaaccctccctacccatgtgtgcacctgcacggattgctgtggctaaagacacttcagggacactcggcctcattttttaaattattatttcttatttaatttaatttatatatattttttgagatggagtttcactcttgttgcccaggctggagtgcaatggcgtgatttcggctcactgcaacctccgcctcccaggttccagctattctcctgcctcaacctccccagtagctgggattacaggcgcctgccaccatgcccagctaattttttttattattattatttttagtagagacagggtttcaccatgttagccaggctggtctcgaactcctgacctcaggtgatccacccacctcagccttccacagtgctgggattacaggcgtgagccactgtgcccggcctactcggcctcattttgaagtcgattcctttccagcgcgggagggggtgggggcggacacaaacaacacacgctgtgaggattaatgtattataatgtattgctaggctttccttaaaaatagtgttcccggctgggtgcggtggctcacgcctgtaatcccagcactgtgggaggccgaggcaggtggatcacctgaggtcagacgctggaaaccagactggccaacatggtgaaacccctcctctactaaaaatacaaaaattacccgggcatggtgatgcacacctgtaatcccagctactcgagaggctgaggcaggagaagcgcttgaagtcaggaggcggaggttgcagcgagccgagatcacgacactgcactccagcctgggcgacagagccagactcttgtctcaaaaaaataaaaataaataataataataaataataaataaaaataatggtccgcaggctttcagggatgtgtgcgggccggttttccatatgggaacagggaaaggatgtgctgaaggcttcctccggtaggcgactttggctgatgtgactttatgcctcgtagtgagggcagggcgacagagggacgggccggtgagcggctgtcctggagaaagagcagtggcatccggggggcttagggtctcaggtctgctcactccgcacatcttttctgtgctttcattgaaaaacaaaactgaaacaagagcggacacctaagtctgcctctctctttcctgtcacccgtctcaggctggctgtcctctgtgtgtgcgccaggaattctgcaacgaagcgcctgcctctccgcttggttttccttggggaagggcctggggcctcctggggggtgggcaccgggtgtgtgggtgtgtgtgggggacctggcagggagcagcgggggagaggcggggtggggggtcgcgtacaccccaggagcctgaggatgcgctgcctgctgggagagacagccttggggcgggtggtgtgcacagagctctgtcggccagcgcgggcgggcggggccgttgttgggggcgctgaggcgagtgaggctggagctgggagtggggggctcgtcgccttcgtctctgggccgccccctccacctgcggaggcgattgtaaagggaaggggggaatccctctgccatcacctcccagatacttgggggatggaaaacgacaaaacacggaacctcccactccctaaaaagtgggtggggagggtgaagggaggacaccccttccccgcccccagcgccagcagccggggtgggggcgggcgaggcgcgcggggaggagagggcggaggagaggacggggggcgaggtttgcttcaagaaggggcgtgtggccggcgcagcgcgtgcaccagcggctccggagcgagcggccgtggctgagaaggggagggcggaaagtttgtttccccgacgtcagcgccgggcgggccgcgaggctaggaggcggcgggagctgggcagagcgcggggcggccggggctctcgctccgacccgcgcccgcgacccttcctgggacccgagcccgagacccccg

SEQ ID NO: 42947 - DNA, 2300 bp, Homo sapien
gtgcggtggctcatgcctgtaatcccagcactttgggaggccgaggtgggtggatcacaaggtcaagagattgagaccatcctggccaacatggtgaaaccccgtctctactaaaaatacaaaaattatctgggcgtggtggtgggcacctgtagtcctagctacttgggaggcggaggcaggagaattgcttgaacctggaggtggaggttgcagtgagcagagatcacgccattgcactccagcctgggtgatagagcaggagtctgtctcacaagaaaaaaaaaaaaagatccctgaccttgtggaggtcctgccagaacccggggaagcgggcaggatgcagcaaggtgaggattttttttgagacagagtctcggtctgtcgcccaggctggagtacagtggtgcaatcttggctcactgcacctccacctcccaggttgaagcgattctcccgcctcagcctcccaagtagctgggattacaggtgtctgccatcacatctggctaatttttgtatttttagtagagaggggatttcaccacgttggccaggctggtctcgaacttctgacctcagataatctgcccccctcggcctcccaaagtgctgggattacatgtgtgagccacctggccaaggtgaggattttgaggtgagggattcaaagaatcttagaaaacaaacgttgatgctttctttcttttttgagacagggtcttgctctgtcacccaggctagagtgcagtggtgagaacatggctcactgcagcctcagcctcctgggttcaggtgatcctcccacttcagcctcctgagtagctgggaatacaggcgagcaccaccatgcccagctaattaaaacatttttttgtagagacggagtctccctatgttgcccaggctggtcttgaacttctgacttcaggtaatctgtcccccttggcctcccaaggggctggaattacaggtgtgagccaccgcgcccggcctggtgatgctttctactgaagagtcagttgataggtctttcggggagatcttgtgatgaagaatcaaagcatttgactggggaaagagttccaggatagtcaagtgatgctcaggaagtcagtggagccacgtgctggttccccatccctgctatagcaaattaccacagacttagtggcttaaaacaacacagcttcattctctgacagttctggtggatgaagcctgaaatgggtctcacagggctaaaatcaaagtgtcgggagggctgcgttctgtctgaacgcagagagtttgtttcgtccccttttccagtttctagaggcccctggtattccttgggccatgatctctccttcatcttcaaggccagcaggttagcgtctctcctgtctgacccctattctgtcctttcatctcctctcttaatgctgcctctgtttttatatcttttctctaattttactgcctccctcttggaagggcccctctgtatactctgggctcacccagataaactaggataatttctcccatctcaaatccttacgaaatcccatgtgaaaagtcccttttgccacatagtcacagtcacgggttctagggattgggacatggatgtctttaggggtggagggcgtccttcagcctgccacagatggcaaagtcatgccattgtggctgcagctccattgtccaggctgagtgtgggggcgcatggcgtggttctcatgcccaccacctaccctgaccctgcggaggtgggcaggaggcagcgataatcaccacgtgcagaggtcctgccaggtgcccagcctcatcattccctagaaggcaggcaccaccacatgctcccacactgtagataaggaaacagctttgaaacagatttgaaagtgtttgaggatttgcctggaaggagggctccagagccagggactgggtccgggacacccggagactctctgcttcttggagctccggcaactgcttgtctttctcttcacaggagaagggggccctgctgccgctgccgtggggcggggcgtgggcggtgctggctgcaggaaggctctcccctcccactttgtgctttccctgcaggctgctcctctgtcgagctgatcacacccacagttgagctgcgctggccagagatgcctgcccacagcctggtgatgagcagcccggccctcccggccttcctgctctgcagcacgctgctggtcatcaagatgtacgtggtggccatcatcacgggccaagtgaggctgcggaagaaggtatgtgcctccctgggggtc

SEQ ID NO: 42948 - DNA, 2300 bp, Homo sapien
ttctttagatcgcaactgagatagggaggagaagatccctccccacccacaggcctctgtgcatcctgcattacagccttggcccaccctggacataagctgcctgcttgctcatctgtctccctgactagttacctggaccacggcaacagcctcttcactggctctctgccttccatttcttgtgaacccagcagccagaatgatctctgatctgaccatgttgcttcctgtgtaaaaccctctgtggctccctattaccccccagaacagaggccaaactccttacaacattcgcaaggacttcaccttccagtctctgcctgattcttcatccctatctctcaccaccttccgccatgtggaatcctttcagttctccaaactgactgttgttttctgcctaaaacactctactcattttttgcctggcctaactccctcagtgcccagcttagacaaaagccttccctgtaccactgtccgatacttctctgcccactcagcattgagtctcacccctttgtcggcctcccccatagaccgtcagctctgagagggcaggggccaactccgtcccctcctctgctgtcgttcctggcatccagcaaggggcctgccacctagcgtgctgaatgaaagaatggacctcgggatttcagtgtggaagcctgggcaggtctgtcttggggccgctgcatccccagtgctcagtctagggcgcagcacggagagttcgcaactgtttcaggaagaaggcaggcgggtgggccgacccaagaaacgcacattatacctccggcgaagtgaagggagggataacaaagcaaagcttgagggctccgagaagctctgaagaaaacaaatccagccataagcccactcctgtaaccccaggctttggaagacggaggcaggtagatcgcttgaggtcaggagttcgagaccagcttgggccacatggcgaaaccccgtctctactaaaaacacaaaagttggctgggcgtgttggcgggcacctataatcccagctactccagcagctgagatgggagaatcgcttgaacctgggaggaagagtttgcagcgagccgagatcctgccactgcgctccagccggggcgacagagccagaccctgtccccaatatacatatcagataagaaaaaaatataagaaagtttaaaaaaattttttttggcttttttttgttttttttgagacggagtctcgctctgtcgtccaggctggagtgcagtggcacgatctcggctcactgcaagctccgcctcccaggttcacgccattctcctgcctcagcctcccgagtagctgggactacaggcgcccgccaccatgcccggctgattttttctatttttcgtagtgatgggatttcactgtgttagccaggatggtcttgatctcctgacctcgtgatccgcctgcctcggcctcccaaagtgctgggattacaggcgtgagccgccgcgcccggccagcctttttttttttttttgagacagtttcgctcttgtcgcccaggctggagtgcagtggcacgatctcggctaactgcaacctccgcctcctgggttcaagagattctcctgcctcaacctcccgagtagctgggattacaggcgcccgccaccacacccatctaattttttgtatttttagtagagacggggtttcgccacgttgagcaggctggtctcgaactcctgacatcaggtgatccgcccgcttcagcttcccaaagtgctgggattacaggcgtgagccacggcgcccggccaaaaaaaaaaaatttttttttttttttttagatattttttcactcttgttgcccaggctggagtgcaatggcgtgatctcggctcggcctcccaaagtcctgggattacaggcgtgagccaccgcgcccggcccgaaaaaatttttttaaaagaaaagggaaacaaaacagtctcctacaccttcggaccactcccaagaacgatggcaccgccctcctctccgcccctcaccaacatggccgcccccaagggagtgggcgggtctgcggggcggaagtgacgcacgagaggaagtccgtcctgccgcttggccgcggggcgcctggctcagtggcttctgcgggcttcgaggagcgggatgttgcgggctgggtggctccggggcgcggcggcgctggcgctgctgctggcggcccgagtggtggcggcgttcgagcccatcaccgtgggcctagccatcggggccgcgtcggccatcaccggctacctgtcctacaa

SEQ ID NO: 42949 - DNA, 2300 bp, Homo sapien
gttaattttaacaaatgtagcacactaataatgtaagattttagtaataggggaaattgcagggatgggtggcacatgggaactctctactatcttctcaatttttctgtaaatctgttctaaaaaataacgtccgttattattattattattattattattatttgcggggaggggacacagtcttgctctgtctcccaggctggagtgcagtggtgagatctcggctcactgcaatctccgcctcctgggttcaagcgattctcatgtgtcagcctccccagtagctagggctacaggtgcctaccaccacacccggctaattttatatttttagtagagacgtggtttcaccatgttggtcaggctggtctcgaactcctgacctcaggtgatccgcccgcctcagcctcccaaagggctgggattacaggcaggagccaccatgcctggcaaaaataacgtccataaacaaaaacacgtggccaacaggggcggagcagaaccgagtttccggaagcaaaacagggctttgtaccgaacaaagatggcggccgccggcgtcgggaggagggctgccctgaagaaagatggcctccgcgagaggaggaaccggaagcgtgggtctggcggctgcaccggttcgcggtcggcgcgagaacaagcagggtggcgcgggtccgggcatgaagctgggccgggccgtgctgggcctgctgctgctggcgccgtccgtggtgcaggcggtggagcccatcagcctgggactggccctggccggcgtcctcaccggctacatctacccgcgtctctactgcctcttcgccgagtgctgcgggcagaagcggagccttagccgggagggtaggctggggcgggggctggaggctggggctggggctggggctgggcgatggcactagggctgaactaggaccagggcatggagaatggaggatggaggccgggggatggcaccagggccgggctaggactagggctggagcggggcctgggggctggggctgggcgatggcactagggccgggttggggctggggctggggctgggggatggagcggggcccgggggctgggggtggggctgggggatcgcactagggctgggttaagaccagggcggttggctggggctaggggattgaggatggtggatggaggctgggggatggcagtagggccgggctaggactggggctggagcggagtttgggggctggggctcaggagcgggggctggggctggggctggggctgggggatggcactagggccaggccggggtaggggtcacatcccaggagggccgggcctgggcagagctgagtccgcgggggccggaccccggaagccaagcggccggcctgcaggatgaggcctggctcctcggccatgaccacagacgtgccagacttaagtcggagacctgaggagccaggctgcaggttggcctactttgcgctaagctgggggtggaccagtggtaacctccctccgaagtgggttctgcctcctttctagcctagcgggagacaggaaggatggtgaggactcttccgcagccgaccaggagggaccaaactgtttcctttcccggctctgccttggggtgggaggagcagcacaggggttaggggtgcaaactggtggcagtggcagtggcaccaaggggcttttcgggaaggagtcgggccagggctttagaataggcaggaccagcaaagggagggctccctggaccgccgtcccctctgggccaggagcttacagaccgcagtacttgaggtttcgcaaggtgcttggagggcgtctagacggctttgctggctttcttatgggctgtaaatgtggctacattttgccgctgtttcttccccactcctgattggctttgtctttcccagcactgcagaaggatctggacgacaacctctttggacagcatcttgcaaagaaaatcatcttaaatgccgtgtttggtttcataaacaacccaaagcccaagaaacctctcacgctctccctgcacgggtggacaggcaccggcaaaaatttcgtcagcaagatcatcgcagagaatatttacgagggtggtctgaacagtgactatgtccacctgtttgtggccacattgcactttccacatgcttcaaacatcaccttgtacaaggcaaggatggaagtttggaatcccttcctggatgtcatcgggtttggggtctctttgttgtgggatgagatttgggagttctatgttgaaatgagtgagcccggaaaac

SEQ ID NO: 42950 - DNA, 2300 bp, Homo sapien
gagactgaaagaaatgacatctcaatagcaagaagcacacctagcacccagaccttggtttctcttttttttttttttttttttttttgatacgaagtctcgctctgtcacccaggctggagtgcagtggtgcgatctcggctcactgcaacctccacctcccaagttcaaggaattctcctgtttcagcctcccatgtagctgagactacaggcacacgcaaccatgcctagctaatttttttgtattttcagtagagatggggtttcaccatattggtcaggctggtcccaaactcctgacctcaggtgatgcacctgcctcagcctcccaaaatgctggattacaggcatgagccaccatgcccagccagtttctaatgccattttacaatgaaaggaatcagggttcctcgtagaaaataggattctaggactggggcaggaaatacaagatgagcccggagtatcctgtagtgtcagaaaggaaagaggcactcaaacccaaataagctggtatatacactgggtgtatgtcaaaggagcacaaggaaccactcaaattcccagtggccaaaatgagaacaatttgaaaaaaaaattagtactgtagtataacaaaggataaaataacaatggtccacactgatataaatgattgaatacatgggggagaagaaacaaatctcccatgcagaattccaaataatttctgtagatactctgcccccaaggaggtggagcaaaatccccgactccttacgtgtgggctgtgcatggggacgtccttccaaagagtacagtagagaaaagaggggtggggggacctgacaaacactacttcagtcaagtgatcaagtcagcaccaacagtggtaagtaacgttgaacagtaagaacccttccttggtaggatgtgatgagcatagcactttacctctgtgatcttccttccaaaacgccataacgcttgtctaatcctgagaaaaacatcaaatcccaatagagggccagcccaccaaagatttggccagtactcctcaaaactatcaaggtcatcaaaaataaaaagctgaggccaggcgcggtggctcacgcctgtaatcccagcactttgggaggctgagacgggcagatcatgaggtcagatcaagaccatcctggccaacatggtgaaaccccgtctctaccaaaaatacaaaaattagccgggcatggtggtgtgtgcctgtaatcccagctgctcaggaggctgagacaggagaatcgcttgaacctgggaggcagaggttgcagtgagctgagatcatgccactgcactccagctaaaataaaaataaaaggctgagacactgtcattaacagtagtctaagacatgacaacgaaatataatgtggtatcctgaatggaaacctgcagcagaaaaaggcattaagtaaaaggaaggaaatctgaataaactacactttagttaatatgacaacagtgcatcgttaattttaacaaatgtagcacactaataatgtaagattttagtaataggggaaattgcagggatgggtggcacatgggaactctctactatcttctcaatttttctgtaaatctgttctaaaaaataacgtccgttattattattattattattattattatttgcggggaggggacacagtcttgctctgtctcccaggctggagtgcagtggtgagatctcggctcactgcaatctccgcctcctgggttcaagcgattctcatgtgtcagcctccccagtagctagggctacaggtgcctaccaccacacccggctaattttatatttttagtagagacgtggtttcaccatgttggtcaggctggtctcgaactcctgacctcaggtgatccgcccgcctcagcctcccaaagggctgggattacaggcaggagccaccatgcctggcaaaaataacgtccataaacaaaaacacgtggccaacaggggcggagcagaaccgagtttccggaagcaaaacagggctttgtaccgaacaaagatggcggccgccggcgtcgggaggagggctgccctgaagaaagatggcctccgcgagaggaggaaccggaagcgtgggtctggcggctgcaccggttcgcggtcggcgcgagaacaagcagggtggcgcgggtccgggcatgaagctgggccgggccgtgctgggcctgctgctgctggcgccgtccgtggtgcaggcggtggagcccatcagcctgggactggccctggccggcgtcctcaccggctacatctacccgcgt

SEQ ID NO: 42951 - DNA, 2300 bp, Homo sapien
cacacacacacatatgtacacacatatacacatatgtatatacacacatgtatatacacatatacacacacacacacacacatatatatatatacacacacgcatatatatatgtgtgtgtatatatctgggtgtggtggcatgtgcctgtagtcccagctattcaggaaattaaagtgggagaatcacttgagtcagggaggttgaggctagagtgagccgcgatcacaccactgcactccagcctgggtgacagagaaagaccctgtctcaaaaaaataaaataagtgaacctatggggaagtttcatataaaaacaattaacaaaaataataaattcaggccagctgcggtggctcatgcctgtaatgccagcacttcaggaggctgaggcaggcggattacctgaggtcaggagttcgagaccagcctgaccaacatggtgaaacactgtcgctattaaaaatacaaaagttagccgggcattgtggtgggcacccgtaatcccagctactcaggagggtgaggcaggagaattgcttgaactcgggaggcagaggttgcagtgagctgagattgcgccactgcacttcagcctgggtgacagagtgagactccgtctcaataaattaataaatcaaacattcaaataattcaaaaattaaaaaaataaaagtttactgtgtacttttgtgacaactatatagcatttacattgtatttggtattataagtaatctagagatgatttaaagcagatggtagtgtgtgtgtaggttagatgcagatattatactattttatgtaagggacttcactatctgcagattttggtatccttgagggacactagaaccaatcccccatggatacctaaggataagtgtatccactcaatccttggaggtatcactagcagccaacagtttgcttgcatatatttctagagtttcttttctttacatatactacggcatttttttttttttgccaactgtaaataggatattataaatgcttatgtctttgttttcttcttagaacataaaactcagcctcattgagttgtgacttgaaagctctgcctcattgttctctccctccaggatcagtgaggaggaggacctgcacctggggacatcgttttctgcagaaaccaaccgaagggatgaggatgcagacatgtaagtgtcagtctgtttggctgtgagcagttggggctggactccagtcagagtccaagatatttagtcaacagatgacatttctagaattttctagaagatgtcaaagttggcccctctctttctacttcccagcttaagaactttgaaaacctcttaaaaggtcttttcaggccgggcacggtagctctcacctgtagtcccagcactttgggaggccgaggcaggtggatcatctgaggtggggagttcgagaccagactgaccaacatggagaaaccccgtccctactgaaaatacaaaattagctgggtgtggtagtgggcacctgtaatcccagctactcgggaggctgaggcaggagaattgcttgaacctgggaggcagagcttgcggcgagccaagatctcgccattgcactccagcctgggcaacaagagtgaaactccgtctccaaaatataaaaaataaaaacttgttttcaaaggtggtttcatgactagtaatatttccccaaaacattgcagggataaaacatgggcttgcccactttttattttgccaacaaagctattggcaaactatcatctttctgtcttcaaagaaccttgtacatcataacaccaatagattagtgggacataacctcataggttggtgcttctttagaaaatttctaacttgatgaaaaaactcaagttattttttttctcgtttctccatggactgtcactggtctgcgggccagtgttggggaccactgatttagaggacacctggtgtgtgtttcccacccctccctgaggcctctgggtttctcacttcaggatgaagtacattgagacagagctaaagaagaggaaagggatcgtggaacatgaggaacagaaagttaagccaaagaatgcagaggactgtctttatgaacttccagaaaacatccgtgtttcctcagcaaagaagaccgaggagatgctttccaaccagatgctgagtggcattcctgaggtggacctgggcatcgagtatgtttgagacccctaggcagaagacacagtgctttccagttaaaagttatgggggacaggccaggcacggtggctcatgcctgtaatc

SEQ ID NO: 42952 - DNA, 2300 bp, Homo sapien
gtcctactaatgctgctgctacaggccccagctctctgagggaacctagacccaggcagccgctaaaggtgaatttgcatctaagcttgtcctgaacttacttatctttgcccctttccttcagtttcttcatatccaccataccacctgtcttcatctgaaagggatcatcctgcagaaagcaaacacagttaagaggaagcatctaaatacatggtagtggaatttttttttttgtgaagcacgctcactcactgaagagcactgcagggagggctgccataactactcagggaagaccccataacttaccactagagtggtctcctcttgtaccttctctcccaccagcaaggccacagcactgagcaaaaccaaaaaaaaaagagagggggagagagagaaatggcataattcagagataaggaggaaccctctcaggtatgcggattgcaacattagtgcaagggtgggatttgaggggtgggtaggcaagccggctggaaaagcctataagcataagacagggctcaacgagcaccgcagatgctggaagaagggtgcgctggtggtgaagtggtacactttgccactttcctgtaaagccatttggcattatcttggcctggaaatctcatttctaagatattctcatcatggaaagtgcagctaaagataaatttaagagaatatccactgcagccttatttgatagtaaaaatttacaaaatcacctacatgtcccaaaataggggatttgttaacaaattacaatacacacatctggtggaatattatgcagccattaaggctttctgaaaaatattccacaatatgggtgaatgcccacaatgtcataatgagttgaaaagaacagggaataaaagtacatagaaagttgttcacaatctgagagagagagacgaaaaaaaacagattggaaagagtattcaatattaataccagtgcattcttgggtggctctgcaaggaaaaaaaatgttaacactgatcatttccggatgggagaattatgggtgctttttatcgtcttgactatacttttctaaattatacaaactcttaacgatcgatatgcatttcacaattaattggttttaataaaaaacgcgagttagtgatctgtttctgtatctctggagcacaccccgagacgacacagctcagggcatgtcctggttaaacatttgcaaagaacgctgttctccaagttgggcagtggaaggtgtacagtgtgtcaagagaaaaatctacgtctgaggagatatttgtgacagcgacccggacgcggatgtgtctgtcgtccccgccgcctcctcctcctccccgcgtggtacccacctcaccccgttgggcctcttcctcaagttctgtacctctctggtctcttccagttttaatctttaaaaagaagaagaagcagcaatgcataagctgagtgattccccgcggaatccaaagctaacagagccaataaggcaccttcgagggcatcccagcccagctactgagccaccagcacagtggtccagaggacgaccttgtgcctagacccaccgggagtcagagccactgcgcatcccggaggcatctctctcaaccgttcgagcttggggcggtggcctcaccccttgagcctcaatttctgcgtccgcagaaggaaccaccacccgagctcacagttaacaatgtcagcgaagcgccgagccggtggtgagtcccccaaacaagtctatctttaccaagcctatgggagccccgccccaaacgcaccgaacctcctctgagtcctgctcatcttcctctgactccgagtcgccccggcggcgacggaaaatcttccggacgaccggcatggtgacaacggccgagttgtacagccgccgcgcctctgcgcagcggcccaggctgcttccggcgcgcggcagagcggtcagagcgcctgccccgtctggccccgcccccggcacgcacagtccgcgtggccacgccccctctcctggcgtcagcctcttccgattggacggcagagggaaggaggtggggcgtcgccagacggccccacaaccctgcgcgtcgcctcagagggggcgcgcttgactgacaggcggcggcggcgcagttgcgagtgcaggtgagttccgggccgccaccggctgcttctgtgggccgggcctctgagcattggcgaccccagcccggctccgggctgacagggcctggcttcgccaggtacgccagacgcagcggcccggtgagcggagcccgggacccccccgg

SEQ ID NO: 42953 - DNA, 2300 bp, Homo sapien
agagaaaacgtaaggcattctagaaatgctgccctgcttcggaatggtcttccagaaaggggaaccccagacagcccccatcggcccctccccctagccaatgagatgtaacagcagctgcagcagcagcaaacatctactgcactcctaccgtgccaggccctgtgcaaaccgtgcggcagagactgacctgcaaccaattcctgttccacctcctagctgggtaacttgaggcgtgcactgcccctcggagactccgcattctcatttgtaaaacgaaaaacaatctacctcaaaggattgctgggagaattcaatgagatgatgctttgcccagggcctgccacatagtaactgcttaataagaggtagttctcaaagtaagggatgacactgagaaaaggaaaactactgttacttaaggggttcttaaaagtcctagaagccattatttatgcatttaggtatttcctaagcgtttgctgataccagtttttcaaataaactttatcctcacagcatcttcggggtggaaggggcagagggtagagcgacagacctgccgaaggaggaaaaccagacccgtgaaggtccaggggggtggccggcaagcaccgaggaggagtcccccggctcaaaccctcttgcgtggcttcaaaacatcagacgcgcctctcctcgcggagaagctgggggccattatttgtgaggcagtcggcgctgggactctaagtcagcaccgcagagaagtggtcatcttttgttccgaaagaaaaaaacgcacgtcagggctcagagcccgaggaaagaaaagtcagcgcccgagacgcgagacgccacgcggatgctttcaacgctaggtcaggccccggcagaaatgagaggggggcggccccggttctggagaagccacgagcccccagggagctcagagtggggtggtgctggggcccagaggcccccctgggcgccgaccggaggaggggagaggggcggcggcggccgggggggtcccgggctccgctcaccgggccgctgcgtctggcgtacctggcgaagccaggccctgtcagcccggagccgggctggggtcgccaatgctcagaggcccggcccacagaagcagccggtggcggcccggaactcacctgcactcgcaactgcgccgccgccgcctgtcagtcaagcgcgccccctctgaggcgacgcgcagggttgtggggccgtctggcgacgccccacctccttccctctgccgtccaatcggaagaggctgacgccaggagagggggcgtggccacgcggactgtgcgtgccgggggcggggccagacggggcaggcgctctgaccgctctgccgcgcgccggaagcagcctgggccgctgcgcagaggcgcggcggctgtacaactcggccgttgtcaccatgccggtcgtccggaagattttccgtcgccgccggggcgactcggagtcagaggaagatgagcaggactcagaggaggttcggtgcgtttggggcggggctcccataggcttggtaaagatagacttgtttgggggactcaccaccggctcggcgcttcgctgacattgttaactgtgagctcgggtggtggttccttctgcggacgcagaaattgaggctcaaggggtgaggccaccgccccaagctcgaacggttgagagagatgcctccgggatgcgcagtggctctgactcccggtgggtctaggcacaaggtcgtcctctggaccactgtgctggtggctcagtagctgggctgggatgccctcgaaggtgccttattggctctgttagctttggattccgcggggaatcactcagcttatgcattgctgcttcttcttctttttaaagattaaaactggaagagaccagagaggtacagaacttgaggaagaggcccaacggggtgaggtgggtaccacgcggggaggaggaggaggcggcggggacgacagacacatccgcgtccgggtcgctgtcacaaatatctcctcagacgtagatttttctcttgacacactgtacaccttccactgcccaacttggagaacagcgttctttgcaaatgtttaaccaggacatgccctgagctgtgtcgtctcggggtgtgctccagagatacagaaacagatcactaactcgcgttttttattaaaaccaattaattgtgaaatgcatatcgatcgttaagagtttgtataatttagaaaagtatagtcaagacgataaaaagcacccataattctcccatccggaaatgatcagtgtta

SEQ ID NO: 42954 - DNA, 2300 bp, Homo sapien
tccagaaaggagctaggaaaccaaccaaaacctaggttgaatctgtacattttcttaaaacaactgaactcccaaacaagactaagaccttggattcatctttgaactgcatagaacctgtatttctcggagggtccttttgagagacagtctcatcctacgcttaaaagggcccagtgagacttgggctgcagtctcttggcaaagccacttactgccagattcatagctgccactttttcagcattccttttgctaaagagcactcaattagatctgccacagcacaggtggtggttatcactgggtcctctggcctcatggagcaagggtgggagcagctcatctgtaccctgggacttcagctgaggaggagggtccagaaatgcccctggccttcttgccctttccttagtagtgtccagtaccccctggtggatgggctgcttgatgggcagattcagagccacctctgagagcgtgagagctgcagacgttgaccccctggactcctgcagcaattcccaaggagcctctccatcatctgacagggactccgtatccagtgagtgcacgtgcatctgggtttggctgaaccagtctgcagagggcaagactttgagactttaatatatggcttttgaccaaagataaaacgctggtgcaagaagtcccgagtctactattttttccagcccaaggaagagaagaacaatctcagtggagactgttccagagaaaacgtaaggcattctagaaatgctgccctgcttcggaatggtcttccagaaaggggaaccccagacagcccccatcggcccctccccctagccaatgagatgtaacagcagctgcagcagcagcaaacatctactgcactcctaccgtgccaggccctgtgcaaaccgtgcggcagagactgacctgcaaccaattcctgttccacctcctagctgggtaacttgaggcgtgcactgcccctcggagactccgcattctcatttgtaaaacgaaaaacaatctacctcaaaggattgctgggagaattcaatgagatgatgctttgcccagggcctgccacatagtaactgcttaataagaggtagttctcaaagtaagggatgacactgagaaaaggaaaactactgttacttaaggggttcttaaaagtcctagaagccattatttatgcatttaggtatttcctaagcgtttgctgataccagtttttcaaataaactttatcctcacagcatcttcggggtggaaggggcagagggtagagcgacagacctgccgaaggaggaaaaccagacccgtgaaggtccaggggggtggccggcaagcaccgaggaggagtcccccggctcaaaccctcttgcgtggcttcaaaacatcagacgcgcctctcctcgcggagaagctgggggccattatttgtgaggcagtcggcgctgggactctaagtcagcaccgcagagaagtggtcatcttttgttccgaaagaaaaaaacgcacgtcagggctcagagcccgaggaaagaaaagtcagcgcccgagacgcgagacgccacgcggatgctttcaacgctaggtcaggccccggcagaaatgagaggggggcggccccggttctggagaagccacgagcccccagggagctcagagtggggtggtgctggggcccagaggcccccctgggcgccgaccggaggaggggagaggggcggcggcggccgggggggtcccgggctccgctcaccgggccgctgcgtctggcgtacctggcgaagccaggccctgtcagcccggagccgggctggggtcgccaatgctcagaggcccggcccacagaagcagccggtggcggcccggaactcacctgcactcgcaactgcgccgccgccgcctgtcagtcaagcgcgccccctctgaggcgacgcgcagggttgtggggccgtctggcgacgccccacctccttccctctgccgtccaatcggaagaggctgacgccaggagagggggcgtggccacgcggactgtgcgtgccgggggcggggccagacggggcaggcgctctgaccgctctgccgcgcgccggaagcagcctgggccgctgcgcagaggcgcggcggctgtacaactcggccgttgtcaccatgccggtcgtccggaagattttccgtcgccgccggggcgactcggagtcagaggaagatgagcaggactcagaggaggttcggtgcgtttggggcggggctcccataggcttggtaaagatagacttgtttgggggact

SEQ ID NO: 42955 - DNA, 2300 bp, Homo sapien
ggccatagaacattgccatcactgtagaaagttctgttggactcacagcacatagcaaggctcagcacatattaacgaggtgaatgttgaccacttgccagattttgtgactttttttttttttttttttgagatggagttttactcatgttgtccaggctggagtgcgcagtagcgcaatctcagctcaccacaacctccacctcccgggttcaagcgattttcctgcctcagcctcctgagtagctgggattacagacgggcgccaccacgcctggctaattttgtatttttagtagagacggggtttttccatgttggtcaggctcgtctcaaactcccgacctcaggtgatccacccgcctcggcctcccaaagtgccaagattacaggcatgagctaccgcgcctggcctagatttcctgatttctgaagcagtgtatcttagcattgtgttttgctgtattccagcttttaaaaaattctcagttctggaaaacatgctcatttgataaaactcaaaccgtttttcctctgctgttccactatgacaatcaacagagaagatttctgtgaccaaatatgtggaggcttccgctatatatcaagcagcagacactagctgggtgtcctttaattcaattccattctgatgctatctacctggagatagtggctgatcctgggggttgagggctcagtcctgaaggactgccccctccttcccaccagtcgcaagtccaggcttccaggacttctgatggactagcttcaagttggggttcccctgaccctctctttgggttcaattaatttgcaggagcagctcacagaactcagggaaacacttatatttactggtttgtttttgggtttttttttttttttttgagacagaatctcgcccgtcgcccaggctggagtgtaatggcgtgatcttggctcaccacaacctccgcctcccaggttcaagcaattctcctgcctcagcctctcaagtagctggaactacaggcgggtgctaccacactcggctaattttttgtgtctttagtcgagacagagtttctctatgttggtcaggctggtttcgagctcctgaccttttgatctgcctgcctcagcctcccaaagtgctgggattacaggcgtgagccactgcgcctggccaccacatttactggtttattacaaaggatattattaaaaatacagatgaagagatgcttagggcaaggtgtgggggagggggcacagagcatccatgccctccccgggcagccactctctaagaatctccccaaaaaccctgtcctcttgggccttttatgagacttcatcagatagacatgattgaagcatggacaaccatgtggaaatgagattggtcagaaactgcctgatcgcatcctaatagatcaggtagtgacacccagcagggcctgtctgtgcagattcttcttggcctccctgtgcagccttccttccttcagggtatggggcacgatcctcatgaagcctcttgaatgaggatcatatggccacaatcagaatcctgccttgggcaggtgaaagaagggcacgtggaggtcagatagagagattctgttttctgaggtcgaaagtgctctgatattttaacaaaagactgtagcaagaggccgcgcatggtggctcattcctgtaatcccaggacgttgggaggccgaggtgggcagatcgcctgaggtcgggagttcgagaccagcctgaccaacgtggtgaaatccataatccagaataatccagttttcaaataaatattgtagcaccatagtatacggaaaacaagtctttatttttatattaaaggttagttttgcttcatcttagatttagagtcaaacttctttggtttgctattaggaatagtcacttccattctggtttcactcaactcttatctcacacacatacacacacacacacacacattagagagtcagtcagtgtgtctgatgggtgtgtctttgagaacattagctgaaaggtctttgcgtggccttttgtggtcaactatttgctgaatcacacacttcccagcacatcaccctggcattttatcataatcagcctaggaacccagtcataagcccacatgtaagctgcttggcaaatgcaacttgcttctggaattacattaactgggtctcctctttctaccctgccccaagcctgccttgcccttgtttcaaaagaattgagggtttaaagtaaaatctcttttctaaatgccctggcttatccctggttatttgaag

SEQ ID NO: 42956 - DNA, 2300 bp, Homo sapien
tcacacttgtaatcccagcactttgggatgccaaggcgggaggatcacttgagcccaggaattcaagaccagcctgggcatcatagtgagacctcctctctgcaaaaaatacaaaaattagtgaaggcatggtggcgggtgccaatagtcccagttactcaggaggctgaagtgggaggatcacttgagtctgggaggcagcagcaagctgagattgcactactgcactccagcctgggggaaagagcacgactctgtctcaaaacaaaccaaccaacaaacaaaaaacagtctgaagtaagacactgaatgtatactgttagattgcacaagcgtaggattaaacactagctttatatttttatatttgagttggcacttccccatttcgcatgatcctcatgactgatttgtgaaattaggaaattagattatagctgcgtcttacaggcaaatgactaaaacttgaaacatttgggggcctgtctctgtgaaatccctttgctggggctagaaccctcatttatgactgttacctctcaggaggcagcaaattttccatggagaattccatttccactggaattctctcttccctgtgatgtgctcatgccccctctggctcgcccccttagtcctttctgggctctgcttcctgggccaggccctctttgctaattctgtgtatccttgctgtcgtctttggtgttctgatcctcggctgttgcttgagatccacctactcacttgatgcccttcttgagttctaaatccttctgtgtttccagctctcttctggacaggccagtccctcattcaacatgtcaaaacaacatttaattttcaccccaaactgtagctctttcttatctggatcttctgtttaattccgggaagcagaacctgaaagtcactctggaatcctccctccccctcatacccttgccagcctccacgtccaaccggccactcacacactagttgattgtgtttgttaaatgtccctagaattcttcccttctgtgcctattttgtctcatctagactgttggagccatttcctggctttctcttccaagtcctcttgtgcctgctggagagtctaaactcctaagctcgtccttcaaggccttgggtgatctagctctgagctgtctctagtttcatcactcgccaactccacttcccttctgccccacccacctccaccttgcactcaaagacaaattcacttgattcctggatatctccatgtctttgcattagctgttgctagcatacctgtcccctctcattctttatttggggggacagagtcatgctcttatacccaggctggagtgcagtggtacaacaccatgcccagctaatttaaaaaaattgtttttgtagagatgggttctgtgttacccaggctccctcttgttcttccagaccagaaaccccaaggcacaatgcaaactcaggctgtatttttgttcattttggttccccagctccaggcactgttcctggctcacagtgtgggtttggtgtatgtttggaagaataaaatccatgtgttttattttaatcatttgaagaaagcaaaattttgtaacacttccccccgttcctcggctcagattcaatcagctgttttgaatgattacccagagataacagttaaggtgcaaaccgtgtgtggctgtgtttgtgtgtatgtttcacctgtcggtttttggcgtctgggaatgacatttttccttgcactgagacatcagttatatctgaaaactatgtttctaaaaggaataggaaatatgaatgaataggtcagagttcagtactccaggcggttttcaaaccaaatttggtaatgttgatttaaaatggctcaacaaaaaagcaccccaagtataatcatggaaaatattagtactactttgtatgtagtaatatgttgttaagagaattattcattgaaattatgttaatcacagggaaagaccataacttctctcttggtttgtttcaacaggatcagtttgacaacttagaaaaacacacacagtggggaattgatattcttgagaaatatatcaagtttgtgaaagaaaggacagagattgaactcagctatgcaaagcaactcaggtaagttgatattgaaaaaggttatttgttaactgcaaaatgatgtaaggataacgtatattctcattttacagtataaatgtatattttaaatatttttccttttatgtaaggtaatatttcaatagaagtgattgtttttcatacagaaaattaattttcat

SEQ ID NO: 42957 - DNA, 2300 bp, Homo sapien
aactcactctggctattaatctgccttaggagataggtagctggccgttctcattgttatatatctagcagtctctggaggaaagagaattcagacctggtaactgagagcaaaatatttatacagacacaagaatgggggtgggcaggaagggagggttgtaactgaaaaaaggcagaccaaaacagttttgacaacttaaatttattgtaactgcccaacaaaggaagtagagttggaggtttatctgcaagaggtttttttttgttttgttttttgtttagtagctccacctcttaatttattattattattcattttattttattttttgagacagtctcgctctgtcacccaggctggagtgcagtggcacaatcttggctcactccaacttctgcctcccgggttcaagcgattctcttgcctcagcctcctgagtagctgggattacaggcgccctgtcaccacgcccagctaacttttgtgtttttagtagagacggggtttctccatgttggccaggctgctctcaaactcctgacctcagatgatccactcacttctgcctcccaaagtgttgggattacaggcgtgagccaccatgcccggctttaattcattattgttaatatttttgagacagggtcttgctctgttgctcaagctggagggcaatggcaccatcatggctcactgcaacttcaaccttctaggctcaagcgatcctcctgtctcagtctcccaagtagctgggaccacaggtgcatgccaccatgcccagctaacttttttttttttctttttgtagagacagggtcttgcgatgttgcccaggctggtctcaaattcctggcctccagccatcctcccacctgggcctcctgatgtgctgggattacaggcgtgagccaccagacccgggttagctccaccttttaatggaggagaatgataagcaggttgaaaatggtggggtgggattggagaaatgcatcatcgtaaaatattttttaactgggggcccatgttgggagtcgcacggtttctcagaaaaggatccagtagtagcattaaccgagggagaaagataagctgtggggaaagggctagtgattcaggagttggaattccaaacattttccatagcttgtcaggaacatttgtgcagacctttggatatatagagagggagtccgtctgctgataaaatgagcgctgggtttaccaaccttcggccttggcccacccctgatcctcaccgccgggcagtgagatggacacgttatttgcctccatttggtggactgcgctctgcgcttccagaggtggagcaattgtccgcctccgcccggccagcacgtgcgggaggctggatttgaaccaaacaagttatctgtgtaccccacgcctttgcttttacccactaggcggtaacgtgatttcacgcctgagagtttcttggctgaacaagttggaaatcactggtttcagagattggaaatcactgggtgcacgcccctggattctttccctagccactcgaggccgtcgcgcttgcctcgacgtctctattcgcacagcgcgcagttaccaccgccccactcccaccgcgccagcctgcgggactctcgggcttccctcgggcggtgggaaaagagcctcccgggctgactctgctcggcgcgcatggctgccaggggaaagtattgtccttaaatccagagcggcgatacgcgcaggggagcgatctcagaccgcggcggagcatcggtgatcccagggcctgccgcgttccaaggcaagcgctagtactgcgagcagacagtggtcactaagaagtcattaccagattggcagggggagtcctagggatccgggtcccgccgtccctcacacctccctccgcgtccttccggaccccagggcgacgcggacccggccgggggagcccgggggagggggccgggccggggtggggcgggcgcgcgtgcgcgagctgtcagaccggccccgcccctcccctcccgcccctcccccgctctccgggtgtagggcgggcgggcgctgcggcggccgcggctgctgcttcctcgggccattttgctgtggagcggcggggaggaggagccgccgaggagaccccgggcgaggagctgcgagccggaggaggccgcgcggactccgggctttccgccgtcgcggggatctcggggggcaaagggatcgccggggagggggaccagagagccgcgcccgccgcgcggagcgccccttcgcgtcccctgcaccatgagctg

SEQ ID NO: 42958 - DNA, 2300 bp, Homo sapien
ggagttcaagaccagcctggccaacatggtgaaaccccatctctagcaaaaatacaaaaattagctgagcatactggcgcacacctgtggtcccagctagggaggctgaggcatgagaatcccttgaacctgggaggtggagactacagtgaacagatgtcacaccactgcactcagtcctgggcaacagtgtctctgtctcaaaaaaaaaaggagagaaaatagaaaaataaaatgtacttgactaagagagtaaggctaaaagccaagcttaggagatcagtctttccagcccctgcaggctttttcagtcaataccttaaagtgtaatgtccctttgaaaatgttgccaggagaagcaggcataacttgttctgttactcagcctgtttgtttccagttacagcatcatgattatgcaaataatcttttcttgaaactatgaaatcacatggctaaatgtaattgtcaaggcagcagttttctagaatttaagaagtaactgtagagaaaatgctcaacaatgtctttgtagtcagttttccctcattcttattcctctcaattccaaaataatgactggcacaatacagctttcaaatatgtgaaagaagaagatatcctcttaaacccctggacagacagcactggtatgaccctatgtaggtcacatgataatacccaagtatagagaagcaaggaatgctatgaacccagttttaagcccttataaaactgttgtccagaaactaagacaaaagtctcctatttaaaactattttaatgtttcatcactattgtattataaaatgggattaagattcttacctgattttttttttattgagacagagtctcactctgtcacccaggctggagtgcagtggcatgatcttggcttactgaaacctctgcctcccaggttcaagtgcttctcctgcctcagcctccccagtagctgggactacaggcgcgcggccgtgatgccccgctaatttttgtatttttagtagagacgaggttttgccatgttgcccaggctggtcccgaacaactgactttcaagtgatccgcccgcctcggcgttccaaagtgctgggattcaggcgcgaatcaccaccctgccaggcctcatttcgtttttagtacagtattatattcaaatttaaaaccagagattttcaaagatgccacttaactttaaaagataaaaagtactccaaagcaggttgggcgcagtgactcacgcctgtaatcccagcactttgggaggccgaggcgggaggataacttgaggtcaggagttcgagaccagcctggccaacatgggagaaaccccgtgtctactaaaaatacaaaaattagccgggcgtggtggcgcaggcctgtaattctagttactccagaggctgaggcaggagaatcgcttgaacccagaaggcggaggttgcagtgagctgagatcgtgccattgcactccagcctgggtgacaagagctagactccgtctcaaaaaaaagaagttcctataatttctgaaagaagcaaagaaagtttccatacagaattaagagaaaaatgttaagacccagacttggggttggatgaaatagcatgaggcaacagaacacaggagttaagagcttccgtgtgattcccagctcaacctggagcaaatgacttatttctcagagcctcagtttgcttacctgtaaagtaggaataatgataatacgtacctcctagctcatcaaattgttccaaaaattaaatacaacaaaaggcctaacaaattgcctcataagggctcaatcaatcgtattattgcaaccatttcgcttgtatttgagtgtgaagcgcctagaaaaccacaggacccctacggcgagccgggaatttttagatattttcctccgagtcaacgctcagtgaaatcagttcaatcagtggcccgacaccgtgcggctgacacagcttatcccccgaccctgagatcaggggtccccggagcccaaggtcgcttccaaagctcagcgaggcggaggtgcggcccgggctggtctggttcggccaccgttgttatggcaaccgccaataggttggcttcatctctaactgaaagtctgcacaggagcggccgatcgaagggccccgaggtgggcagcacaggctcctcgacgacttcctaggtcgcaatctccaggaaaacgaccacagggtcagcggagctagccgccgagccccgctccccgggcccttccggcggctgcgccctttcaccccggacgtgggcgggagag

SEQ ID NO: 42959 - DNA, 2300 bp, Homo sapien
ggaggctgaggtgggcggatcacgaggtcaagagatcgagaccatcctggccaacatggcaaaaccccatcttaactaaaaatataaaaattagctgggcgtggtagcatgtgcctgtagtcccagctactcgggaggctgaggcaggagaattgcttgaacccaggaggcggaggttgcagtgagccaagatcatgccactgcactccagcctggcgacagaacaagactctgtctcaaaataaataaataaataaataaataataataataataataatacttgtaaatatcccgattcagccagcattgcttcagggccagcagtgtactggttagctttcgtgtggtgttccattcagttctcaagcagatagcccctctcacaggtgggcaaattacggaggatttaggaagagtaattgatttgctgacaagagtgagtgacagtgtcagaccacagccgccttccctcacacagcctgtctgcctgtgccctgttcagccctcagggaagtctctctgttggtggcttttcatggtgcctccacctctcacctgcggctcctgtaataatgttaatgttcctctgcctgaaatgtaatgatggtcattaggtaccagcacatcacagccccagacagtgtccctggaggctggcatttttcagcagtgttaaaaatctccactcgataagtttgcatggtgctgtatgttcacagctcttagacctagactctagaagtcagctggtgactttcttctagggtttattctctcctggtggcaggtgagcccagtgatgctccattgtcatgggagtgttgggtagggggtggttgtgggagtgagagattaacaggagcattaaatgatggagttttgttttctcctcacgctctggtccctgctagacttattgccacagatttggccagcagagggcgactttacctcagacgtgttgatatcaaccatttccccccctctacccgttttagggagagtgctctaaagtgatgtagtccaacctttcagcatgtaattgagaaattcagcctcaagttactagagctggaaatagagaggagtgcagatttgtcagctaactttttgttctctaaatgtttatttttaggtcaatcagacatttacaagaagcatcagcaacagatggaaaaggcaagttctctcgtgctcattttgtgttgctcagcttgctctgaacccacgtgctgcggcactgcggaggagtggaggcagcctatggtgtcaagatgctgtcttcctgggaggagagctaggggaggcctggggcccacttcgtgagagcagccaggggtagtttggagaaggaggtgttgagtcagttgtataaggaggaggttgggggtgactgctgcttattaagatgattcatttcatttccactcgtggttgtgattttcaccttctcaaaactgagtcagcaagagaaaatcttgtcttagaagggccagataacacttcgctgtgagaacaggagggataatggattggagatggctatgtgtaaagcagccctgcctgctgatttaacacactttcaaaatagatgtgtcagtattcatttaaagcaagactctgatgacagaaggaaccttgaaaactacctgatattgaaatggttgtgccctttatagcccttttgcatctccttgactttccagtcatgcctcctaaatcagaagaaaagctgcaaagaaaatgttttgtgtggttctgggcttatttgaataatgttcatgaccacaggctgccatagcacaagtgagaatttcagaccacaagggtttaaggagcagtgctctcttctctcaaagctcagaacggtctctggatccatggtatcgtacacccagtgtggatattaacattctttaatgcaggttatgaataataaataaaacaggtttttgttaataaagttttgttgctgactctatttctgattataaagccaatgtagattcattttagaaaattcggaaaatgcatagtagctgtaaatcttctttcacaaacctggtatataactaataacgcattatttctttaagttaaattaaacatgactttgaggcttcacgccagggtcagccctaggttgttatttagagcacagtattctggaggatctcgccagtttgggcctggaacagatagtatggcattcctgctgtccaggttcacgtaactcttgctcctaggcagcctgtgtgcaagtcatacccaggcttggagccttggtcagtggtcag

SEQ ID NO: 42960 - DNA, 2300 bp, Homo sapien
gtgcctttggtgcattatggctctagaatcgaaggtaaataggagctggaaacctaacaggcttggcaacagaagtctttgtcagagctagctttcctggtattgtgtggtctttagtgctactctgaggagctgtttctgctgcttttgttgatgctttttatttatcatttaagatataatttcgtttacaataatatgcacagtccttaactgttcagtttgatgacttttcatatctcctgggtcattgcttcaaatgtatatttgaaatgtatttttttttttttttgagacagagtttcgctcttattgcccaggctggagtgcaatggtgcgatctcagctcactgcaacctctgcctcctgggttcaagcgattctcctgcctcagtctcctgagtagctgggattacaggcatgcaccaccacgcctggttaatttttgtatttttagtagagatgaggttttaccatgttggccaggctggtctcaaattcctgacctcaggtgatcggcgctcctcagccacccatagtgctgagattacaggtgtgagccaccatgcctggccagaaatgtattttcgattcattttcacatgactcaacattttgaagatcaaagaattttattctgtgtgtagttgttcttgaccactcgtagcctttcccatacttgctcctgatatggtctttgagtgggattagtgggatcttttcttagtggaggccagagggcagctcgtgaactaaaccctccccagaagggacatttcaggccagtgtggtctcaggtcagcccgtggcctgcgtcctttggtgcctttctggtgactgagagaagctgttcgccagactttcaggcctgtatctgaccacaaacgggggagctcctctgtcccccatgctgagtgagctggagcccaggacttaagcagattgtggaaatgccgagactcagcgtaagtcagaggtactcttaacgccagccaggctgtccatcgtctttatttctttaatttttgtgtttgactcaaaattccctctgaagcccagcagagaggaagcaggcaacaaggatgaagagtaggtgggggtgttttaggctctgaggctgtccttacactcagggaaggattgttttagaaatttttcacgctttaagtggctgttgtgggcctttgcttctgtgtgccgcataaatcatgtggtgtaaactccttagaaaggattactgcctgctcttgggcatcacccagccttttgagtcatgattgcatcgtcctgaactaatcgtcctgacctgtgtcgtcctaaagtcactagtggactttaaggttatgaactgcctttcccttagcatgaagcgtaggtgttaagagcttggtccttggagggaggtggacttgggtttgcgtattggcttctccacttacaagctgggtaactttggtcatttactaaacttctccaggcctgagtgtgtcaggcctgcttcccccacagaggccatcgtgagatgaagcatgagaggtgcccagcccagcttctggcacatggtgatgactcagttgatggcaacgaccagtgctgttgtttttgtccttgttacagttccaggatcctcttgggaagtcagctgggaaggaggggataatctgtctccttgctggccttcttagttcctctttcactcagagaggacaggggaccacctagggcaggggcagcacctcctgtgcactgtggggggcgttgctcttctgctgagtcatggagagtattgacttgggcatttgcaggggctgtggtatttcctgcctcagtgggcacttgtcctgttctcatcagtaagaaggacttaccagaatcgagtgtcatggttattttcctcagagtgagttggaggtagaggagcccacaggacaggaggtcagccttacaggacccccaagaccaggtggacatgacaccctccccaacccccgtctcctccttttctctcccctgcagaggtttcagcatcttcatagccgggcctgattccctaagatgggcaggggcaggggcagcctgggcatctatacttaaagctcttccgatgattctgttgctcacccccattaagaaccattgctataaaggaattctcctccacatgaggaggtcgatgcctggagacagaggcagcaggccaagggcaggcacacccagctgagatggggcagggctggaaggcaggcctcctggatcctgcctggggccttgtctctctccccacactcattctttcaccg

SEQ ID NO: 42961 - DNA, 2300 bp, Homo sapien
tccattccagtggaagtggctctaccaggtacgctgctcacagggcagaatgccagagaatttatgcctgaggataaagtcttgaagtgtaacttaacagttgttactaatttatctgggaatgaccactaagaccttccatctcttcttttttttaactaaaaattttttttttagtttttgagacagggtctcactctgtcacccaggctggagtgcagtggcgcaatctcagctcactgcaacctccacctcccgggttcaagcgattctcctgcctcagcctcctgagtagctgggattatagggatgcaccaccatgcccagttaatttttgtttttttagtagagatggggctttgcagtgttggccaggctggtctcaaacacctgatctcaagtgatccgcccaccttggcctcccagtgttctgggattacaggtgtgagccaccacacttggcctccttccatctcttctggcctataattgagatgatctgtttgtccagaaatgctgctggattctatgaggaatctgaaaataattgcattcttgattttagttttcagtcttaaaagtcaagagaaaagcttcaggtagagaaagatttgccctgaatcattagaacttagatgagatgtggtcctttcctttagttacagggctgagtagttagaattcaggctgcccttcttctttgcccattttattatttcgataataagtatctttgcgacaaactagaactagcttaactactagaggaagccaccaaatgacttttttcttgaataactcactgggtgctgtaggcactgtgggaggaagtgggtatgtggtgagctcttaaaagctacccatgaagactggtgaaagcacagcagagcacagcctcggaaatgtcagccctgggcaggacactcctcgtttaggcctcggcaagtctaaggaaaatgccctgtagcaggaagtggcatctgagtaaagaaccatcgagtggtgggttgtggggaaatatgtcagtttgttgaattccactgctttctgaagaacagtgttgctaatctctttattttggggtggtttttaaacttgcagctcctggatgaaacggccacactggtcttctttgttctaacggggtataaattccgtccggcttcagataacccctacctacaactttctcaggaagaagaagacttggaaatggagtccgtgtaagaaatctttcttccctcttccttagccctgacccctttgcctaacacaaagcagcacagtgtgaatcgggtcggctgctctcagcatttcgtggctgcaggggtggttcctctatttttagcagaaggaagcggacactggagccccaggctgtctgatctggtttgaagtacagtatctgccaaacctagctgggtcttgtcagggaagatggaacttgccgttccactaagcatcattggagcctgctttcaagaactcagtggcaagaacttaggaatatacgtggccagttcacgagggagaacagggggccgactttctgtcaggcccgccatcaggcgcttacgtctgaaaatggaatcttctgagtcatctctaagtctgctaatgatcctcagacatcctctatcgtcagataactgcgtggcttttcacagcacaatgactttgacctatatctgagcactaataggggcttttctgagtcacacagtgaatgactctagggtcctattttctgggaaagggccatcattgtctagaaaaatgagtagtgattaagcatatttgcttgttaactgaaatttgataagccaggtcaatgctgtgtttgatgattagcctaaggcagagttttcccttcttggttcactggtatcaagtgttctgcccccagccctggcagcctttgaattcttcccaattcagaggctgagactcggcccatgctaagctctgcttggctgtcagcgggtcaggcagcatgggacagctctctctgctcagctccacggcaacagtaaaggaaggcaggtcctgccagcgggcgccaaacagcatctccccatgcagaggaagaaacacctccttctaaacagtggagaggagtgcaggaggcccatcagctgtgcctttcccagaagtggcaggatctgagcaagtgtctgttggttgaagaggcacacatgtcaggctggcaaccagcagcatcaggaaataacctaagacgcggtgtgtttatcattcccctgctgggagcctttggcttggtccgtccgcataacacgggg

SEQ ID NO: 42962 - DNA, 2300 bp, Homo sapien
ggctcatgcctgtaaatcccagcactttgggaggctgaggcaggtggatcacctgaggtcaggatttcgagaccagcctggccaacatggtgaaaccccatctctactaaaaatacaaaaattagctgggtgtggtggcgggcgcctgtagtcccagctactcagggggctgaggcaggagaatcacttgaaccagggagtcagaggttgcagtcagccaagactgtgccactgcactccagcctggcgacagagcgagactccatctcaaaaaaacaaaaacatttgaggccaggagtttgagaccagcccaggctggtctcaataaaaaaaaaaaaaaaaaaaaagatctgtgtgtggtggcacaagcctgtagtcctggctactcaggaaacaggaggatgacttgagcccaggagtttgaggctgcaatgagctatgatcatgcctgtgaatagccactgcactccagcctgggcaactctttcatactctcagttctgttttattgatctacatagctatacgtctgccagtactacactctcttgattactgtagctttgcagtaaattttaaaactgagaagtggccaggcatggtggctcacacctgtaatcccagcactttgggtgggcagataacctgaggtcaggagttcaagaccagcctgagcaacacggtgaaaccttgtctctactaaaaatacaaaaattagcatgcctgtaatcccagctactcgggagactgaggcaggaatcacttgaagctaggaggcagaggttgcagtgtaccaagattgtgccactgcactctagcctaagcaacagagcaagactccgtctcaaaacaaacaaacaaacaaaaaaacccactgagaagtgagttcattaactctgtcctttttttcccaacattgtttttgctattcttgattccttatatttgcatatgagcttcagcttgtgaatttgtgcaaagaagccatctgggattttgctagaaattacactgaatttgtagatcaatttggggagtattgtcatcttaacaatattgtcttccaatccacgaatatgggatgtctttccatttatttaggttttaatttctttcaacattttatagttttcacagtataagttttgtagctgttacatttattactaagtatttcattttgttgatggtattgtaaatgaagttcttttctttatttttgaactgtttattttgtatagaaatacaattgttttttatcttgatcttgtaccctcctggctcacttctgtaatctctatacttaacacagagggcaagcactttcgaagagtcaccctggctaacacatggcaaataggctggaagcggggcaagactagaagcctggctgccagctggcaggtggctggtgctgtcatctagatgagggtggctggcctgggcagtagcagtggggaccgaagtgggtggactttaaccacaggacggggtgggggtggggagagggaagcatccaggataagggccaggtgggtttttgttttgttttgttttgttttaaccaggatcagggaggagcgtggtcatttcattttgaaagtatggcttttgatgtctctttaaaacagcccaggaaggcgtggtggttcacacctgtaatcccagcgccccgaggcaggtggatcacttgaggtcagagttcgagaccagcttggccaacatggtgaaaccgtgtctctactaaaaatacaaaaaattagctgggtgtggtggcgggtgcctgtaatcccagctactcgggaggctgaggcaggagaatcgcttgaacccaggaggtgggggttgcagtgagccaagatcgtgccactgcactccagcctgggtgacaaagcgagactccgtctcaaaaaaaaaaaaaaaaaaaaaaaaaggaccagcccaggaggcagcagaatgagccatgaggatctcaggacagcgttaggctgaaataaactcctgggtgtcagccagggagtgggagagactgggcagggctagagctgggacagagcccaggacccgacactaaagggtagacacgagctgaccgtggccacacagctgaaggacctggaaaaccacaggaagttgaatttggtcgacggagcatatgaggagtggtggcgggcatctcaagaggggaagactctcccactgtgttataagctgctaaagtcaaggaagacaatagtcaagcccccagaggttgcgagtcactctagccagaccgtggcagggtggaaaccagcccacag

SEQ ID NO: 42963 - DNA, 2300 bp, Homo sapien
gaatgcagtggcacaatgacggctcactgcagcctcgccctgctgggttcaagtgatccttccacttcagccacccgagtaacggggagttaggcatgtgtcaccaagcccagctaacttttaaaaatttttgtagagatgaggtctcccctgtcaggctggtcttgaactcctaagctcaagtaatccttccacctcagcctctcaaagtgctgggattaccagcatgagccactgcacccagcctgagcacctgggtttctaaagggctttaactactactgctgtcatccagccaggccctggttcccgtgctggctctccctcctcccaggcaggatgctcagcacagtctggtcaactgttagccccccactgtgggcccctcactgctgtccactctgagttggtcctcaaggttgggacattctgctcccaggtctacaccagatccctccaactgggcccacctcctctgcagaatgagctccccaagccagcaagtccatccccatctgaagacttcctggggcctggggctcagcctgggcaggggcttcaggggaaagcaggagtggatggagtatgcttagaggcaggagagatatttgggagctggaaggcactcggccctgctcagggttcctctgagctttctggaccctccgaggttagaacactgtggaaagaagggagaaagagaccccactcctgcctcatccctgctagccccggggagggctgcctcatcctccccgctctctcccctaccccagggccccagcaccgggtgtcattctttcctccgtccttcgctcattcacagagatttgctgggtaacacctcaggcggccttctgggttatggagatgcctctgccctctgggagggtgttctcccatggaagagacaaacaggatgcagaaaacataggtgacgtttgtgatggatgtgaaggagagaaactaaagccgaaaaggataggagagttctcaagatatgatgatatgttggatgaggtggaccgggaaggccatgctggacctaccacctgaaccacacccccctacgcgaatccactggcctctgtccattcaggtggagcctgtcaccccagcctcggctcagagaaacagctctgagcagctctgacctgtcactccagcagctctgacccatcactctctgctgaagtcctttcatgggcgctggtgggcaggggcccagctcctcggcgaggggcctctcctggcctgccccgtgggccctgcccttctcccaggtcccctgtgcctgcagccgtgcgcaagcccgcaagccggggaactctccctcgggcatgcaggcctccccgcctctccaggttgcctgggccagaacgcttctccatccacctcccttcctgaccctgggtttggaggtctcctgcccccaggccgagagtaggtgctcccaccgctacctgccgcatcccgcacagccccctgcccgccctgcgagggctggggcactcctgtcccgtgggccgccgtgtccccggcaccccatgaatccgtgtcgaatgaatgaatgtctccgggccgggacctggcctcattcacatccgatcttccgggccctccccgccgcggcgggggccggagcgccagggctggattcggggagggggtggcgggggtggctgccccgccctggggccgcgttgagccgaggggacgcccctccggctggctggcgaggccggggtccagctggcggaggccgcggccaggcgggtgcggggcgggaggtggcgccgggcgctgagtggcggctccgggtccacccctggcgcgcgggtgcgggcgggaggggggaggcgggaggcggggagcgcaggggcggcggcaggcgggaggcagcagcgagcatgtgccgcggagcccagtaaccagggacgaccgcggccacaccgcgccggcgccggcgcccagcccaggcagccccgcgccgcggcgcccggaccgcccgggcctgcccagcggccgccccacgccccgggcgccccggcgccgacagccgcgcagcgcagcgcgggcgccgcagacaaaggcgcggccccggcccggcccgcccggcccagccgctcctgctgggcgccccaaccgggtccggcccgggggggcgggggccgcggccgccgaggatggggaaatccaacagcaagttgaagcccgaagttgtggaggagctgaccaggaagacctactgtgagtgctcccagcccccagcccgcgccccgcggtcacccccacaccca

SEQ ID NO: 42964 - DNA, 2300 bp, Homo sapien
tatcctgccgggtcctaggcgaggccccctacaacctgacgtgggtccgggactggcgagtcctgccggcctcgacgggccgagttgcccagctggctgacctgtccctggagatcagtggcatcatccccacagacggcgggaggtaccagtgtgtggccagcaatgccaatggggtcacaagggcatccgtctggctcctggtgcgaggtgaggctcatcctgctgctgctgttcccctaattcaacacgtgacctggtgtttaccccagaagccgcgagtccttccctctgctcagacattgtctctggcaggcaatagcagccttttcagtgttttttgaactttcagggagagagaatactgtagcctcctagccaaagtctaatggctctcactgctgggaagttcctcctaatatctaacttaaatttctactgctgtacgccaagccaatttcaattgtgtcttgtcctttttccgtgccatcgagcccctccattgttccccactccccactgcaccctgcccaataggtagggcagggactgaatactggaaccttggggaagctcagaggtcagatgtatttggcagagatcgggcagcactgactagatgggggtggaggaggcagtgccaagagcacccatctgggagttttaagaacccagaatctggacagagcctcctccccaagtgtaaaaacaagcatgttgaacaagcattctctcttgtgccagcggctcttgagtggctgccagagtgtgttgggcaggattctgaggctatgtctaggctctgcaggaaggagggaatccaccagctgtgtctgcctccagtgtgggagggctgtggttgctgtttctggatgcgcgggcctgtgagctcttttgagtctgaccagcctgttgttcttagtttccaaatggccaggttagaacctaagcttggggccaatagtagggcaggccttggggtcaacctcaaggtcactggagacaggagccgtccccagccctggtagctgcctgacatctccctaaggctccctagagcgctcagcctggagtggacgttctaggagcacagggctccgggttgggattgttggaaaatcagcctccatgttgcctggggatgtgctcaggggccgcctggtctacccaattcccagagaagccacacccgggagattgaagccctctggggtctttgctttctctgtcttgcccatctgtgactatgggaggggaagagcccggggcggggtgcctgggatggcacggctgctctgatgggctcatcctcgcctatccactttttgggtcacagaggccccacaggtcagcatccacaccagctcccagcacttctcccaaggtgtggaggtgaaggtcagctgctcagcctctggataccccacaccccacatctcctggagccgtgagagccaagccctacaagaggacagcaggtgaggggcccaggacacaaatctcagggactcacagcaggtggacaggactcccaggggacctctctgggccttggccttcctatctgtaaatggggaagagaatttgccttccttgctcctgggatcatttgagactccagagtgagatcactttggaaacataagaatgccacagtgtgggctcagcgctcaggagctcaggctgtatggacctgcgcccaaatcccgcccccaccattcaggctgtgtggacctgtgcctgagtcccgtccccaccattcaggctgtgccgacctacgcccaaatcccgcccccaaatcccaccccccaccattcaggctgtgtgaccttgggcaagtcatcttacctctctgagcctcgagaattaaatttacataaagtgcttagcacaggcctagagcaagccatcagtacagaatggtcgtcgctagtggcattgttagtgaatttgttattaatgatgattgtggatcaaccccttttgtgacccgatgtgtttctatggcatgattctagaatccatgtggacgcacagggaaccctgattattcagggggtagccccagaggatgctgggaattacagctgccaggcgactaatgaggttggcactgaccaggagacggtcaccctctactacacaggtacccaggccacaagcatcaccttacaggagaagggcctccttccctccctcctccctccctcccatccatcagtatttatggagcatttacctgtcacgcaccggggacacggcagtgaacacatggtccctgtctgggtggagcttatatt

SEQ ID NO: 42965 - DNA, 2300 bp, Homo sapien
cccttcccagggggcactgccttggggcttccagtatcctgggctctgggtcctgcaatcagagttcagggatcccagctggccccagccacatcccgagacagagagcatttggggggccctgatcactactgggccaaccccaggtggttttaagcaactttggagatggccaggcattaccaccaccattactgagcacttactgtgtacctgacacgaggctgagcactttccctgggctgactccttccagcagagctaggttagcccacccagctttgcagctgtgggaggagactcagggaggtcgccctcagagaggagtgggattgggggggtctcactgtcccggagcctgcactcctaacctctgcaactcatgacgtacaccgcactgcagtggctgtgagttctgtctccagatggtcttggagatggaggaagatagtgttgagccctcaaggtcatgggctcaaacctgaattgatatcttagctctgccactgaccagctgtgtggccttggaacagtgactctccctctctgatcccctacccagtgtccttctgtgtaagagagtcatggcaaatggaggtttctgaattatttgaagttgtgccgaggtgaagccccaggagctgggtgaggctcagggtttctcttgggctctgtgctcccctgctggtgtgattctcatgcctttctctaccgtggtggctgtggggatagtcccgccacgaatcgcaggcctggacttggagcaggtcactgccatcctcaacagcagcgtctccctcccttgcgacgtccacgctcacccaaaccccgaggtcacgtggtacaaggacagccaggccctctccctgggtgaagaggtcttcctcctgcctggtgggtaaactgaggtgtccggcccagctctaaggttacatggggagagagttgctcccccgacctgggacagggccgtcagtcgtgcagggatttaggactgggggctgggctggaatgctggtgtgaggggctggcttcccccggcaggcacccacacgctgcagctggggagagcacggctgtcggactccgggatgtacacatgcgaagccctcaatgctgccggccgagaccagaagctggtgcagctcagtgttctgggtatgtccatgtctgtccccaacttgtactgtccccactccttcagtcacccctcagcccatactcccccagagaacatagacaggagagggccaggaggcacagggggaggctgggacgcccgcacagatcagctctgaggagggggagcagtgggacgggccccaggagcctggctggggaaggggcctccccaagccttgtgtggtgggggaagcctgtttcacagtggagcctgtttcaaggctcgtggtcttcagaatcctcttggggaaaagctggcccaaggtgtctttagcaaggactcgctggaaggttctttctagccccggggctggtccattcacttgcacgaacaccagccagacactgcgctaggcctgtgggctcacagccatggggaaggagggcttctacattggttcactggagccacaggggctgaacgggcctcgacagagagctgtaacccagctggggcctgcccctgtaggaaaaagcctgggtgggggcgggcgacagcatctcccccatctaggaggctgaggctcagagaggcaggaggctgtccctggtcactcagtgggtccttggcgtgctggcctggttctcttcctccacctcccctgggtctgcgccagcccccggggctgggtctgctgtgtgaccctggtgggtttccactggcattttccctgtggctgagtggggagggcgcagggacagctgcagcacctcactctgctatctcctgcccccagttcccccggccttcaggcaggctcccagaggtccccaggatgcggtcctggtgagggtcggggacaaagctgtcctgagctgcgagacagatgcgctccctgagccaactgtgacctggtacaaggatgggcagcccctggtcctggcacagcggacccaggctctgcggggtgggcagaggctggagatccaggaagcccaggtgagcaaccctgggggcacgggcagccatgagcgctgcaggaaagtcgcctcccagccctggcgagctgcggggaggaaggtgggcaggatgtgagttgctgcctccttggcctgtcagaccccaaaccgagtggattagcagcttccagggtggaagacatgggcagagctcaggg

SEQ ID NO: 42966 - DNA, 2300 bp, Homo sapien
gagatctgatggttttaaagcttctctcagcttctctctgtgtaggcttcatctctttctctctcttaccttcttccttggtgaacatgggagaaacacaccccctgacaaccccgtggcccccagccccaggtttacagctcctcagctcactagcaagttgtctgtgaatcccaactctaaattcccagggcacagaatgccattggcccagcctgagtgatgtgtccatcccccatccaatcaactgtggccaggggcgggattgcacagtacagacatggcccttggaaagggcatttttcagatctaggggctgctctcaggaagagcagggtgctgcgccttctgcgtctcaggagaggtcaagcccaggagggtgctggagatgcccaaagcagcccttctctccatctttccaatgttggcttgggctgtggggagctgctcatggctctgaccccctgaccttggcctcacagatgcaagactctgacctccaaagttagcatctgtattaggccattttcacgttgctgataaagacatacctgagactgggcaatttacaaaagaaagaggtttattggacttgcagttccacatggctggggaggcctcacaatcatggtggaaggaaaggaggaacaagttacatcttacgtggatggcagcaggcaaagagagagcttatgcagagaaacttacgtttttaaaaccatcagatctcgtgagacccattcactatcacgagatcagcacgggaaagacccgccccccaattcaatcatctcctaccaggtccctcccacaacatgtgggaattatgggagctacaagatgagatttgggtggagacagagccaaaccatatcagcatcctctcactgggaaagtgggggcagagggaagggtcttgctagagacagccttgctccagaccccactggcttgctcatctccagggcaacccccatccattctaggtttgaaattctgcctgagggttccctgagaatccagccagtccttgcccaggacgccggccactacctctgcctggcatccaactctgctggctccgatcgtcaaggccgtgacctacgggtcttgggtaggtggcctggggaaggccttcagtgtccagtccctgtcggggtccagtccttcttagtttctgagtcaccccagctgtaggggccaagagccaatggtcttcaaatgtttttgaccatgaagcccattagtaaaaagttgtgatcatgcacactcaaaggacacagatgtattttagtgcatatattacgtaacagaacagcgattcgattaagtaagaaaccatgtacaaaaggtaaaacaagtctgagaggccgaggcaggaggatcacttgatcccaggagtttgagaccaacctgggcaacatagtgagaccccatctctacaaaaaaaaaaatgtttaaattagccaagcatggtggcacgtgcctgtagtcccagctacttgggaggctgaggtgggaggatcacttgagcccgggagtttcaggctatagtgagccatgatcacgccactgcactccagcctgggtgacagagtaagactccgtctacaaaaaaaaaaaaaaaaaaaaaaaaagtaaaacatgtgaaaggataaaattcaaaatcactagaatcagatgccccagtctcctccccctccaacagatcagcttgtgagaggttgctgtggtgggccctggcctcaggtgggggctgatgggagtggaggcctggaggcttcagtcaaggaaaggcactgagggggtgccaggctcagggatggggaaagcccaaaacaccctgctggaagcgctgtctcggggctttctcctgccctctccctctgtgctccctcagggatgggtggaagacagtaggcagtggctttgcccctgggcacagcctcagagagcccccagcccctgtgccccctgcacctgtctcctgaccactgtgctctccccagagcctccagccatcgcccccagcccctccaacctgaccctgaccgcccacaccccagccttgctgccctgcgaggccagcggctcccctaagcccctggtggtctggtggaaggacggacagaagctggacttccgcctgcagcagggcgcctaccggtaacgagctggactttgcggtggcttcctgagacgcacagggcggggaggcactctcttctcacgggggcatggggcagggacggggcggggtgtgctcaggtctcaccggagtcaggaccagaacttgtgtc

SEQ ID NO: 42967 - DNA, 2300 bp, Homo sapien
gggctgcctgactcactggccagccccactgggagcccttcaggacacatttccttgactgggcgtgccctgcagtcatcgcctccaacaggcctgggcaggaaatgggcttgctgactctctggcaccgtcttggctctgcctggctaagctggcagtgggggagctgtgagcctgggctatggccagggcagccttgggagaggacaccctcatgtccttagagtctatcctctttgctttgcagaggagaacgaggtcggctgccccgagggctttgagctggactcccagggagcgttttgtgtgggtgagcgcccccaaccctggcatggatgtgggaggcctctcagcctgggatggatggcttctcccagccagctggcaggagggcctgggagcggagaccaccagaccccttcctgccccagacagggacgagtgctcaggaggccctagcccctgctcccatgcctgccttaatgcacccggccgcttctcctgcacctgccccactggcttcgccctggcctgggatgacaggaactgcagaggtgagggagctgccgggaggagggaggagacgcgctcctcagacctgacccaggtgtgcagaagggtccccagggccaggaccctggctggggacacagacctgcagggatggccaattcttgagggttttgatgtcagcctgggggtcccaatgctatgtccccaccaggctccttcttgctatgggagctgcagatgaatgaggcccaggtatcagggggtgatgggcagccccagagacatatgggcggctacacatgctcaccgcattctgaacctgaacaggcctcggaagctctcccaacactcagcatcatttccaattgactgagactggcaagtgagttgtccccctcagcaatgttgctggatgacaaatctgacctcaggtgatggtgctgacgctgacccccagtctgcatccctgcactcccaccgggagggcctggtgctgccaagtctccgctgggctccaagccgggtgcccaaggggacgttgtctgcagccttgcattggaagctgcaggcccaaggactcgggtcccttggagtgggccctatgttttgggatagggagcaagacaatggaaagagctagcagaaggggtggggaccttcctgccagtggctcctgggcctgcggacgaagcctctgtggataggccgggccagggtcaggtggcgaggcacgcctggggatcatgttcacacagccgtctgccctgatctgcccccagatgtggacgagtgtgcgtgggatgctcacctctgccgagagggacagcgctgtgtgaacctgctcgggtcctaccgctgcctccccgactgtgggcctggcttccgggtggctgatggggccggctgtgaaggtgatgggggcacagcatgcggcctgtccatactcctggaaacccagaggttgccagggatcagctgacagggggctgtgtgtcactgggctctgggcttccaggaagactgggactcttggcagaaggagtacagcaaggctggggacaaagcctgcgccaggctctggaggtctgagccctcccctggctcctggcagctggcaccttctttgacaggggtgttttctttctgcacctcagcatcttgtctgcttgataaagagggagccaggtcagggatggcaaacacatgctccctctgctgccatccgttctgttcccccatatgaatcaaggcccagctagagaccacctctgaatccttcttgacgcagcagcccctgcagccacagtggaacaggttcagtcagcctttgagataaaacttaggtgccacccctggatgggtgacctcaatggtccttcctgctctaacagtctatggctgtaggaccgtgggtccacccggctcctctgagagactgcacggtggagagggaagcatggtggagcctgacccaaggggatcagccatcgcacctctgtggcccccagggcccttggagtgcccgacaactcaccgggctctcctgcctgccgcccttcctgccgcctttcctcctttctcaccactttcttagctcttcccacataccaggctcccctcctcaccacgaccccatgaagaggtcacatctttaccctctttatggatgaggaaactgaggctcagagagggagagttccttgcccaagggctagaatatggagagctcagcggaacccaggactctgcccacaaagggcctttcagccccttcctttctctgggac

SEQ ID NO: 42968 - DNA, 2300 bp, Homo sapien
gttttgggatagggagcaagacaatggaaagagctagcagaaggggtggggaccttcctgccagtggctcctgggcctgcggacgaagcctctgtggataggccgggccagggtcaggtggcgaggcacgcctggggatcatgttcacacagccgtctgccctgatctgcccccagatgtggacgagtgtgcgtgggatgctcacctctgccgagagggacagcgctgtgtgaacctgctcgggtcctaccgctgcctccccgactgtgggcctggcttccgggtggctgatggggccggctgtgaaggtgatgggggcacagcatgcggcctgtccatactcctggaaacccagaggttgccagggatcagctgacagggggctgtgtgtcactgggctctgggcttccaggaagactgggactcttggcagaaggagtacagcaaggctggggacaaagcctgcgccaggctctggaggtctgagccctcccctggctcctggcagctggcaccttctttgacaggggtgttttctttctgcacctcagcatcttgtctgcttgataaagagggagccaggtcagggatggcaaacacatgctccctctgctgccatccgttctgttcccccatatgaatcaaggcccagctagagaccacctctgaatccttcttgacgcagcagcccctgcagccacagtggaacaggttcagtcagcctttgagataaaacttaggtgccacccctggatgggtgacctcaatggtccttcctgctctaacagtctatggctgtaggaccgtgggtccacccggctcctctgagagactgcacggtggagagggaagcatggtggagcctgacccaaggggatcagccatcgcacctctgtggcccccagggcccttggagtgcccgacaactcaccgggctctcctgcctgccgcccttcctgccgcctttcctcctttctcaccactttcttagctcttcccacataccaggctcccctcctcaccacgaccccatgaagaggtcacatctttaccctctttatggatgaggaaactgaggctcagagagggagagttccttgcccaagggctagaatatggagagctcagcggaacccaggactctgcccacaaagggcctttcagccccttcctttctctgggacctggaaccctgttgacctccaacctggtataactgggggaggtgctgtgagggcggccatgcagcctggtggcactgaaactggagaaggggacagggaggaggcccagatatggagggggatggtccgtcccttgggggaggggccctgggctagacctccccaccaccgaccatgcccctgcctcccagatgtggacgaatgcctggaggggttggacgactgtcactacaaccagctctgcgagaacaccccaggcggtcaccgctgcagctgccccaggggttaccggatgcagggccccagcctgccctgcctaggtacggggacacccaccctctggccacaccgctgcagctgccccaggggttaccggatgcagggccccagcctgccctgcctagttacggggacacccaccctctggccagcacctcagctcaggggctgagggtgtctaaggcgccagtgctgttgagttctgagaataaccaaacagcagccgacactttgcactcactgggtgcctgcctgtgcaccaaaacctcagcctgaccctgtggggtcatcttccggggaatttcaggagggggaggactgtggaggcaagtgggtgtatctcagagaggcttaggagagggaatggatctaactggggcactgaagggctgagggggagctggagtctgggacgaggctgagagctggggaggctgggcctctgggagctgtaggtggaatcggagaggaggctggagttggtccgggagagggggatgcagcgtggctcacatgcagcatgggagtggctggattctagggaatgccaacaagagagaaggcagggccaggcaatggctgcaggctgcaggggaacctgggccacctgtgcacacacctgaccccacccgtctgcagatgtcaatgagtgcctgcagctgcccaaggcctgcgcctaccagtgccacaacctccagggcagctaccgctgcctgtgccccccaggccagaccctccttcgcgacggcaaggcctgcacctcactggagcggaatggacaaaatgtgaccaccgtcagccaccgaggccctctattgccctggctgcggccctggg

SEQ ID NO: 42969 - DNA, 2300 bp, Homo sapien
gaaggtgcaaaggctcctggaggacccctgacctaggtgtgggcagggggtaagatgaaagtcaaaggccatggtgccccagtctcaggtgggggaatccctttgggccacgccccactttggccctcagcactgctctgcagggtaagggccagggcagggttgaaggtccccctggccgatggaggggtccaggcagaatggggctcattcagaagctggccagtcctccctcaccttggtctctgcctctgggcaaccactcaccctgctgttggtggcaggacggtgggggtggggggcggggtgctgctggcagtttgggcccctgttttcttctcaggagcgctgtgacctcactgtccctcatgtcactggtgcatgtgagttaggaagggtctgtcccctaggctggaaccatttctgcggcaaggagtaaaggtcccagcagcctgtgaccctgggactgtgacctcagttcagctcaggctggagctaaagcagagggtttgagccagagcttcagacactggattctagctccgctctgccactcacatgctgtgtggccttgggaaagatacaccgtcattctgtgcagcaggtttctgcccataccattgagataacaatcacaggtacttcatacagggtagtcgtgaaggtgaaaacagaatgcttgctctttccagggcgaccctaccaatgagaaaacaggctgcagtggggagtgaccgccccaaggacacacaactgctgcaagggtgtcattgtgtaggtgttcctcacttgcctcctgctagtgtgggaggcccagagactccacgagacccccagctgctcctgtgagagggctgaggggggccagctgtgataccgcctcccatctagaaggggcctcaagccacccatgtacacccagccccacgtggctcaccaggggcccctttgccatcaagggccacatcccaggtttaagtgtcagagaactaaggggcttaagagagaatcgagctgtggctttgtttgtgaattggtttgatccttttttccttctagaaggactcacagctactgttgcttgccatgggcttgagggggtggtgggggctgactggcagaggggctgagagtggatggtgattaaaaggagcactgactccagggtagcggctgggcaaggcttggggctcccacctcccccaggttcagagccggctgaggaccgggagtcctcccttctggggtcagtgctcactatggagcaactgccttggatggggtcccaggacttgctcttttactggggctgtggttgcagtgatcagggctttggagccggcagaccaagctgggaaactcctgaggtagagaagctgttgaaggcgggcctggggtcacaactcccagctgctttttacaagcaagagacttctctctgaacctcaaccttccctcctgtctagtgggttcgcagccagacagtcttttactcactgcttactgggtgccctctggagtctgggcaggtgccaggctctgagaagacaggccagcaatcagccctggcctaagggatgaaagccgggccttcccgcgccggctcacctcggttttctcatccttactcggctaccagaggctatggttggggagggagggggctctgggggctgcagaaggcccaggctgccggcaccggatagaagtgagcacgaagctccctgcgccagtggaacttttatcccggctcccaccgcgaagcgtttaaattgcttccccagggccaggaggcaagtctctcgaaggacggctgcggccaccctccgcccctgagttacatgggtcgcagccactgccgccctccttggcgcctccagcccgcgggccagggccaggaaccgcgagccgcctgcgcccccgccggcgcgcccctgggagggtgagccggcgccgggcccaggcccggacctggtgggaggcggggggaggtggggacgaggcctggggaggcgggccccgcccatctgcaggtggctgtgaacgctgagcggctccaggcgggggccgggcccgggggcggggtctgtggcgcgcgtccccgccacgtgtccccggtcaccggccctgcccccgggccctgtgcttataacctgggatgggcacccctgccagtcctgctctgccgcctgccaccgctgcccgagcccggtaaggagccctcggcccctctcgctgcccactccctagccgagagcacccgcttcccgggcccagaggaggaggcgtagaagacgccc

SEQ ID NO: 42970 - DNA, 2300 bp, Homo sapien
aggctgagggaggggggtgccccacccgctgctgggagggcaggagcaacgctgctgtctgattgcatcattttcccaagcccatctgcccagctcatttctctgcatgcatacactggccccaacacccacacacgtgtgcatgcacacaggcacacatgtgcaagcccaaacacatcacacacatgcatgcacacacattgtgtactctcaggtacgcacccctgggtgcacacaggtgtgtgcgcgcgcacacacacacacacacacacactgtctcaggtacacacgccaggtccatgcattgcttcacactgcccagccccagaggctgaaggcctcagagcccacacctgcccagctacaacctggcaggcaggaggggctcactggtttcttttggtttatttaagacagagtttcactctgtcacccaggctggagtgtggtggcacgatcttggctcactgcaacctttacctcccaggttcaagcgattctcgtgcctcagcctcccaagtagctgggactacaggtgtgtgccgccacactcagctaatttttgtatttttagtagagacggggttttgccacgttggccaggctggtctggaactcctgacctcaagtgatccacccacctcggccgtccaaagtgctgggattacaggcatgaaccactgtgctcggccatgagagcatgtgtaggactccacagcttcagggcaccccagccctctttttgcggtgaggagctgacctccagagagtggaactagtagcattgttctaagtgcctgccacaggcatctgggagatggtccctgtttccatggagctcatagtgggggagagggcagttagaatacagcatgatggccggatgtagtggcccatgcctggaatcccagcactttgagaggctgaggcaggcagatcgcttaagtccaggagttcgagtccagcctgggcaatgtagtgaaaccccatctctacaaaaaatacaaaaattaggcaggtgtggtggcatgtgcctgtagtcccagctacttgggggtggtggcactgagctgggatgggaggatcccttgagcccaagaggtggaggctgtggtgagctgagattgcatcactgcactccagcctaggtgacagaatgagaccctgtctgaaaaaaaaaaaaaaaaaaaaaggatacagctctgatgggcaggaggcatggcgggtcactgaggcgatgcaggtgatccagctgtttctgtggagctgcccctccgtgtttctgtggagctgcctctcttggctccaggtgcctctgggaggaggcaggagcaggggtgactctcagagctgggtgaatcttgggccagcatcatcagatcacacttgcccaggacttcccttccttgagtctccagtggtggtcttgtacctatgagcagggggttaaggagccgagctgatctgagttggagtcctggctctgctgcctaccagtcaaacgagatgcagggcaagttcctcagcccaagcctcagttttcctgactctaaaatgaagagaaccccagatggaagggcttagcctaagacggacatgtctattcccttgattgtggtgttgatgtcacgggcgcatccgcacgccgaaacttgctaaattggacacaaaaaaatatgcgattatttttgtagttgatgaatgtgctgattgggtattctcgtgtgtgtgtgaggtgccaccctcaaactttgttatgatgttggcacattacccatctgatatttaaaaaatgcaatttatgatatgtcaagtagacctcaatagagctgttttaaaacatacaacagaatttcccgcaacccaaccacaccacccgcgccatcacacgcaaacaggggtaggcttccacatatttcctgaatgccttctggagcagggggcaggaggcaggaggcaggacaggtggctctggggctcctggacctcctctgctcagtgaggctgctcacaggagattgggcggctggaaagtaaggtttagggcctctgggatggcccaggctacctgcaggcagctgagtagctctgcttttgcagagtggttcactgcactgtgaaaacagattccagacgccgggaactcacgcctccaatcccaggtactgcccaccttaagtcctccctgcctgccttcctccctccttccctccatcctgcatggccaattgcctggctgcagttgccatggataccacctgctggctccagggttagggctggctgagtcaccagcaact

SEQ ID NO: 42971 - DNA, 2300 bp, Homo sapien
gcaggaggcaggacaggtggctctggggctcctggacctcctctgctcagtgaggctgctcacaggagattgggcggctggaaagtaaggtttagggcctctgggatggcccaggctacctgcaggcagctgagtagctctgcttttgcagagtggttcactgcactgtgaaaacagattccagacgccgggaactcacgcctccaatcccaggtactgcccaccttaagtcctccctgcctgccttcctccctccttccctccatcctgcatggccaattgcctggctgcagttgccatggataccacctgctggctccagggttagggctggctgagtcaccagcaactcaggggcagggggttgaatgcccagtagggacgttgtgggcaccgaccagaaccatcttctctgccccagctgcatggtccatgaggtgtttccccttctaagtccaaagggcagcacaggcctgtgagccccggctgactggcaggtgggaccgtgcagcatgcacgggactgaattctcatgtgacggagctccaaagtccacctggctacacggccaggctctgcagcagaggacgggaggcctgggaaaggcacttcctctccccgagcttccaggcacacagagagtgctcaggatagcgatgcctgcatcactgcaatggtgatggccgggtgacccttctgggctccacttccccagtagtgtctaataaagaccctgggtgactctgaccttgtgacgttggtcagactccagtggaaacgttcccaggcagaacaaacatgccctgtacatttgggaaatgcgggatgctggggccaggtgtccacggaggctggaaccaggaggcctgggcccacatctgcccctgctgcttgttgatccgatgaccctgggcaggtgacctcgtctccctaaccctggtttcctgttcagcaaattggacacagtgaagacgcccaagcccagggccacaggaggcatgtgggggaggggggtgcagggcgagcccaagggcagcccaggattcagggagagccctcggggaagaagcatggctgcaaagatcaggagacaggaggccttggcgccttcgggaggcttcattgtgacggagggtggggcaggatgggagaccgcaggcacttcccggctgcagagggcctggctgcagagagccctcgtgcccatctgtccccccgggaagggccgctggttgcagaggtcttaggcctctgcctgtctatcgccttccctccctgggcctcagtttctctacctccacactgggggaagttggtctctgagcccctccaaactgggcattggcagagttgaattcagaggcgctcacatttggagacacgatgtctaaaattccagccagtgaaggttccatggggttgcaggtaggagagggactggggctgggcccctgccccacagcatccttctccacctgcaggtgggcggcggcactgcgtgctggggaagcacagattcttgtgccctctgtgaccttgagcctgccactgacctctctgagccctgctggctgcctccccaataggaatgacaactcctacttcatgaggttgtagtgggggctcaggggcacagggagatcccgctgaggctcccagggccctgcctggtgcttggcaaggagcagttctgatgggggatgtgtcagctgccagaggctcagagccaaggcccctcccacatctcctgcctgcgtgcattcctcacatcctggccttgggccaaactgctcagcctcagccgccttccctcgatgctggaggatcaggtccaagagatgcctctccccgaccagcctaggactgcagtcagcattcccaggccccagtgtggtctgtggggctgtgtgcagagtgtgcgaggtcagggttcccgggggtggcaggcactgaaggtgaacatcctgttcccgaccttcagtggcagcttgcccaggagacaaggctgtccaaggccaaggtcggggctgggctgtctgcaggggctggcggggggcactggctgtctcagggtcactcaggttgttcctcgactcccgccagacgctatgtccagcaaaggctccgtggttctggcctacagtggcggcctggacacctcgtgcatcctcgtgtggctgaaggaacaaggctatgacgtcattgcctatctggtgagggagcgacctgggtgtctgtcttcctgcgtgtcctgcaacctgtcctgtctgccccctgccagcctctgtctgggttgtcag

SEQ ID NO: 42972 - DNA, 2300 bp, Homo sapien
atctttcttcgcattagctgcctcattgcccttcaatcagccctcacggaggcagaaaatggctcagccatctgccttcaagccctcccttccgcaggtctcctggcttcttttggagagggggaggggcacgggttccccaggctctgttcccctgagctcatcccgagggggacagggctgccaggtccagggatgcaagggtgcgtcctgacgttgagccccaccctcagcacaaagcccttggggagtctgcatggctggggcaaacttctttccagagtgactggactctgggtgcctgggtgggactctgggtgcctgggtgggactctgggtgccccgggcctctcagcaggaacgatgtttcccctgactcacacccagcttagcccagcccagcctttcttgagaggggtccctgagaggaccttggacccttcctcccatgaagaggtagcatgggacccccagctgcatgactgagggcttgccctgagacaggccaagcgctttagatgccctaggagggaggtgctgtgttttcccactttgggcaaggagtactggaggctcagagaggttgggtaacttgctcgaggttgcacagcaataagaagaaaagttgggatttagactcgggtttcctgtctctgggacccaagtgtgggtgaggtagcaggatccttaatccagattctctttagtactgacttctccacccaatgccctcatgagacaggaggcctgggagggcgcaggacctgcccaccgtagctcagtaacctgctccaggccccggatgccctcctgcacggtccgagggggtgatttccctctggccttgctctgctttctcaatcctgaggtcctctattctgggggggcctcctctctgcccccataggctgcttgcagaggccataggctgcttggagaatggccgggagtggttgcccagcatgcttggggcccacgggcctgagaggatgccctgcctggaagccaccctgcaggctcggcctccctgcctcccttggagctgactgactggctaattagggtggctggcctgagtgttgtggggtcagcagagcatgaactagaaaaacctgtgaccagcaggcagcagccacacacaggggccatcagcccccagggggcaagggtggcagctctcctgagtgacaggtttggacagggaggggccgtgggcagtaggggagccacagagctggagggcaccagccccagggcccgttccctcgccctgagcagccggtgcccgggcctcagtttcctcaaccataaagtgaggatgctcccagccagtgtcctaggaactgagccaggacaatgccacccccggcccgctccccagacatggtggctgccatgtgatattacagccaacaccgaccagggggcggcacgcgggcgtgagagtgacagacgcccgggccctgggggatcctgggcggggctctggcgctccccaatttcaccaaacctccccgggcaccctcccctccagctggtcttcttgattcccccaggcccagctgcatcccctcaaaaagcacacttttcccgcctccaaaccagcctccccggggtgtggggctgggcccgggaactaagacacattccctcagggacaaagagatttttctcttcccatgatagatttggccctgcctcccccacctcccacagtgggcaggggtagacacaaagaagccccctacccccgggagagaaacccgaaacttcaaacagagctgagggcccagtccagcccgcccgggaagcttgggaccggatcagggtggccggtggtggcgggtgtgcaacacggatccagacaaatggggcctagggctctcagccatgcctccccccaccccccacaaccaaaactccagcagcacagcctgggagctggtgggcacaggctgggccctcccccaagtgtctcatctgcctaattacttctttattgtctcacaatcacactctctctctatgctgccctgagatatttccttcccctgttcatcccagaggcaattagaagaggaagggcggggggaggtcttcaaatgcagcgaggagacggtgggcagaggggggccagtgcgggggtcggggaacacaggcagggctcggccccagccccacggctggcccccgtgaaatttcaaattaggctataaatacatcagacagcatcggcatggagctgctaccaccaaaggtggccagctgggaggagatggggtttgggggattaccttggg

SEQ ID NO: 42973 - DNA, 2300 bp, Homo sapien
caggggaggtaaaaaaaaaaaaagaaaaaaatcattgtaaactctttttccacctccccgctcacttcaaaccacaattttaaaaagaggttttttagttcctgagaaacccctcttggaactcccagcagcctcgtgggacaagtttgtccctggatgtgggccctctttgcaggggctgccagggcagctgggaagttcccaccttggggaacgggatggggagagtttgttgtgacttgtgagagatggaggtgaagggacagatggacacagaggtggggggattctgtgtcctacgttctccctgggctgagtataggggccagtggggctgaggctcggtttctaaaacaaggtctgttgaagggatctgaggaggttggtggtctagtttggtctagctcttcctaagcactgactgcacagaaaggggtggccagcaaaagtctggtatctcctcctcttccagggaatgcaagctcctagtggcttcagtgcctgagccctggaggggccgtggaggtgtggaggagggaggaagggacatcaaggaggtacaggagcatgggagtgactctgcagagagttccacgcacccaccggcttcaaggcctggtgaaggtcagggcccgggtcctgaacaaatcactggggccaggcagatgcagagacctcatttgttcttgtaaaaagtccactgtctacaaagaaccagtcagagggccagcctcagggtctcaaagcagcagatcctcctgcctcccaacaccgacccccgctacccctacctcgagaaccttgagtcagctttgtcccaaggctggaattctgcagacaagggtctgattcagagcaggacatgacaagggaccccatcctctcagaggctcagaggctggccttgtggagtaggaggcatctgagtccacgtgccctaagtgcttagcacaaccataattaatgaaggcaatgggtgattgattgcttcggtctggcccctccctgtggacaccactcttgctcttccttccttggcacctggcccagcatctggcaggcagcaagggcttaataaatgcctgaacaaatgaatgagtgaatgaatactgttagtactagtgggtgctcaccatgtgccaggcaccagctacattatttcatgtggggccaaatgtgacactgagagctaaccaccatcacgcatttcacaagtgcaaggctgaggctccgagtgcaggaatactggcctgggctctctggtggcgggtggcggaaacaggacgcaaaccccagtcagctggctggagtgactgccatggttaggaaggttgggaggagcagctaagggtggagagccccaaagcagaaggctggtgagtctgagaggtggaaactgtagagaggtaaaatctgctctgctgagtacagcagcagtcaacccagcattttccatgacacactggcagtgggtgcccaggtttcaggatggattaggtaaggtctaactggttggacacatgaggggaaaggtgacttggtgggcccatctcgctgtgaatgctggaggcctccctgcagcttgcgaaatgcccttgtgctattgcaattcacaccccaaggcctcctgagccttcaggtcactgcatgccatccacacagtcccaagggcacagctggcttggacgagttacccatttacagacagagtgctctggttggtggaattcatagggctagttctggggtggctgctcctagcctcctgccacattgtgtagcagggaagaggctgctgtgtgctccactagggctctccaacctttgggtgggtgcctggcccagaacagggttccctgagttgtacagaaattcaatggaaagccgacgtgcagggagggtttggacccacacaggggaaatgccctggcatctgggaggtggggctgcttctggccccagcagtcctcccttcaagcagaggccagggccaggctgagctgacaagcttctactctccttgcagcatgaacgtgcagggtgattatgagccaactgatgccaccgggttcatcaacatcaattccctcaggtgagaagctcagggccctgacgggccttcagagcctccaggtgtaaagggtaggctttgagagcccccaggtgtaaagggtaggctttgatgcgaccttgactgctgccctgccctgccctgccctgccctagacaaaccccactttcctgtccatctgcccatagcatcctcagaagcatgctttgatagccgacagtaacagagg

SEQ ID NO: 42974 - DNA, 2300 bp, Homo sapien
aggtgatccgcctgtgagccactgcacccggcttttttttttttttttttcgagacaaggttttgctcttcttgcccaggctggagtgcaatggcacattctcagctcactgcaacctccgcctcctgggttcaagcgattctcctgtctcagcctcccaagtagctgggattacaggtgccctccacacgccttgctactttttgtatttttagtagagatggggtttcaccatgttggtcaggctggtcttgaactcctgacatcgggtaatctgcccgcctcggcctcccaaagtgctgggattacaggtgtgagccaccacacccggccgaatttttcttttttaacctctaagaatctttccctgtcttctttggacaagatcatctcattcattcatttcacaaatactgagagccaaccaaatgccaggcattggtgctaggtggtagggagagcaattaacaagacaaacatagaccttatgtcagcagaggctttattctagtggaaaaggcagacaataaacatataactgcatgatgatttaaaagcaactgtgataagtgctataacaagatgatgaagtctagggtgttagtagaacaattaacagtgaacatgacaagctcagggtcatcttcatcttctgtgcccccaaatataagtgacctgctcaaagttaaccagtaaaagaggggaaaacaaaactgtcttcctacttagggattctctggtctttggaccaaaccttggaatacaacttacatttgggccaatagccttgttttccctatttatactcatagggaaagccagctggaatatgcatgaatcaacattctaacctcagagatatatttctaaaattcaaaacagaagttatcactgatacttggttcagctgaacgactgtgttcatgaaagttgataccattgccattccttgatttttacaagcatagcaaacttaaaacgctcaacacacccagaatgggcaataaatggatgtgttggcatggtcctcctcgtgctggcacttcaacaacacagcaagctatgtacttttgaacaggggttggaacattttttctgaaagcaatcttcaatcttgcaattttgccaaattcttttattttgccataatctatgaattattctacttggcattattgaatgcaaaataagtttactaagcacctactatgtgccacaccctagggatacagggaaaaataagtctctgctctaaagtaactcacagtctaggaaagaagtcattaacaaataaataactatactttggttattggtcaagtattcctcatacttctttagaatgcccaaagctctcttggcataatgacacagtgaggggtgagggtggggtcatcaaggaaagttatatgggacttttttccccaagaaagggtcttgctctgtcacccacgctgtactgcagtggcgtgatcatagctcactgcagccttgacctccagggctcaggtgatcctcccactccagcctcccaagtagctgggactacaggtgtttgccaccacgcccagctaattatattttttgtagagacggggtctcactatgctgcctaggctggtcttgaatttctgggctcaagagttctgcctgccttggcctcccaaactgctaagattacaggcgtgagctaccgcacccggcccgtattggattttatttatttccttttcttggtgctcatcctccttcacaacttcaagatgggcataagatgtttgacaacatggttcttcattaagtccaactccttatcataatagggcttgggaaatattaaacacgagggcaatcgtgctaacacaaaaatgggcgccccctaaaccttgttacttgtttgctcacttataagaagagccaactcaaaggctcaactgaattctagcactaagattccttccttgctgtagaagatctgtacctggtcacttccattaaagttacataggcgttccaagaagcctcctgcaatacagttgtgactcagccggtatgggagtaatgacggtcctgtggtatttcctgcacccccagagtcccagagtttgttaaggaccgtgtaagaggacaccacgctggcttttcagtgggcgcgtctctcctgggggcatcaccagacaaccccaggcggaagtggcggtggcccatcctcatgcaaactgcagtgtaagaactggggcccgggactcctcgcaaatgtgggacactgacattctgtgatgctgtcccaatgccctttc

SEQ ID NO: 42975 - DNA, 2300 bp, Homo sapien
aatataagtgacctgctcaaagttaaccagtaaaagaggggaaaacaaaactgtcttcctacttagggattctctggtctttggaccaaaccttggaatacaacttacatttgggccaatagccttgttttccctatttatactcatagggaaagccagctggaatatgcatgaatcaacattctaacctcagagatatatttctaaaattcaaaacagaagttatcactgatacttggttcagctgaacgactgtgttcatgaaagttgataccattgccattccttgatttttacaagcatagcaaacttaaaacgctcaacacacccagaatgggcaataaatggatgtgttggcatggtcctcctcgtgctggcacttcaacaacacagcaagctatgtacttttgaacaggggttggaacattttttctgaaagcaatcttcaatcttgcaattttgccaaattcttttattttgccataatctatgaattattctacttggcattattgaatgcaaaataagtttactaagcacctactatgtgccacaccctagggatacagggaaaaataagtctctgctctaaagtaactcacagtctaggaaagaagtcattaacaaataaataactatactttggttattggtcaagtattcctcatacttctttagaatgcccaaagctctcttggcataatgacacagtgaggggtgagggtggggtcatcaaggaaagttatatgggacttttttccccaagaaagggtcttgctctgtcacccacgctgtactgcagtggcgtgatcatagctcactgcagccttgacctccagggctcaggtgatcctcccactccagcctcccaagtagctgggactacaggtgtttgccaccacgcccagctaattatattttttgtagagacggggtctcactatgctgcctaggctggtcttgaatttctgggctcaagagttctgcctgccttggcctcccaaactgctaagattacaggcgtgagctaccgcacccggcccgtattggattttatttatttccttttcttggtgctcatcctccttcacaacttcaagatgggcataagatgtttgacaacatggttcttcattaagtccaactccttatcataatagggcttgggaaatattaaacacgagggcaatcgtgctaacacaaaaatgggcgccccctaaaccttgttacttgtttgctcacttataagaagagccaactcaaaggctcaactgaattctagcactaagattccttccttgctgtagaagatctgtacctggtcacttccattaaagttacataggcgttccaagaagcctcctgcaatacagttgtgactcagccggtatgggagtaatgacggtcctgtggtatttcctgcacccccagagtcccagagtttgttaaggaccgtgtaagaggacaccacgctggcttttcagtgggcgcgtctctcctgggggcatcaccagacaaccccaggcggaagtggcggtggcccatcctcatgcaaactgcagtgtaagaactggggcccgggactcctcgcaaatgtgggacactgacattctgtgatgctgtcccaatgccctttcaaagcgctcagcccccaaattcccaaccaacagccatttcagggaggggctacccaggaccaggcttttgatgaaccacgactgttcggggtgccgtcttgggagagccacgtcagtccctctgagattccaaacggccgacagcggacacctcgggaccacatccaagcctcggggacctgtcaagacgccatcgacggtcctggaccaaatcccgcccgggaagggaagggtcgcgaccggaccctggagacccacggctgcctggcgatctgagcccaccccggcgctgccgtcccgcccccacttccgatcggtcgaaggtcacgtgccctgaccccgccccgcagacgcgactcctccagctgcgagcgtcccggctttcccttccgccggaagtagggcgactttccttttccggctacgggtccccaagcggagcgggaggccggaccggggagccgagcggcggcgtcggcggcgtcggcggcggcggcgacggcggcgggggcggtaatggcggagctggtgcaggggcagagcgctcctgtggggatgaaggccgagggcttcgtggatgccctgcaccgggtccggcaggtacgggcgcagccggctggcaggagcacgagatcccgaggcggggcctggcgggcggggaag

SEQ ID NO: 42976 - DNA, 2300 bp, Homo sapien
tgagatacaggctctgcttggcgtttacttgctcgttctcttctgggcttattttgcaagcccttcagctaaggttggaggtgagcacagggtgagcaccagagccacccaagtgcctgggcaccctcagagcaagtgtcctgcgccccgagctgccaggcgggacagccccgctggctggaagcagtaagggacttggttttctatcccctggggtggtcctgtccttccaactcttgctagtagcaggaattcaagtgggcggagggtgtagggtttttgtctgtcctcagtgaaacacagatctacttttttctgccacctgcagcctgtcttgccattgccacattcagagtagctccggggtgatgctccttggtgagccaggccaccatcaagaatgggtcttctctgggaagaatgggtcttctctgggagcattgggttttgatcagtgaaagtatccagtccctggcaaaatattgcccccagttctgaaccctgtccttcagctaagctggtcaaggtacacctgtaaaataacagctttagaacaggagtgagggcagtggtgggtatggttctgcctggggactccagtcagtgatacggttgttcacttccatcgggccagagtccccatgcgctgcctcctccagagctcccagccttctctcagtgcgaacagttgggcatttaaggaaccagattgcctctcgcctttccccaccctgctcagcgtccggccgtgggctccagtactgtgatggtgttggatccaggcctgtgggcggccacagagtgcctgcctcttggctgccctccctcagaggccttctttttctatcacagcctttgatggtgtcttttgtagggaaaaaccccaagcaaagaatatatcattaatgtcccataaatttgcaggaaaataattttaacttaacgggttttagtgatttttaaattttaaaactgtatatttcattttttttttttttttcatttaggagatggagcctgctgtacttagggcacctatgtatctcttcaacctgcctaacattttgctgtatgtgtgtgcatgtgtgtgtgtttctttaccattgaagtggcagatgttatgacactacccctaaatccttaagcatgtgtctcctaagaataaccaggcctaagaaaactgtacttctgaaacattatctggtatccagtacatgtccagatttctgcaaatgtcctaaggttgtcctaagatttaaattgctgacgggtttgttttgtttcttcctagacacagttctcacattcccttgagttgtaaggtacagtaggtctttagcgcagattcctgtgtggctggtactggcatgggttggccaacatgcagtgatagacttgccaagtgtgtgttttggggagaagaacacttgaatctgcctgggatatagtgacgtccacaaggaagtctcaccagtaggttatagaaataagataggcttgcccttttgttgttgttgttgttgtttgtttaaagcaatgtgtttggctttcagccttttctttttaacttactggagtgcctctgtgttgtaaagccttggcaaagttctctgtctcatggacctgccctcagtgggcgctcttagacaccccttcctgctagaaagaaatggcatcaagaaacacctaggccagtccactttattgatcagaaagaaaaagatttaaaaatgtaaaaacacctaggggtgataggaatccatttctgaccacacgcagatgtgctcacccaactgaggctttttatagaaggtggacccttccccgtgtggacatttgggcagtggaaagaacacatcacttaagatacgatacacacatccccctacatgtcccataagccataagtgaattgtcctacagctgagcgcctttaaacccaagttaagagggtttgatcttgaaatttcacctggtgatgtatcttttttcaggaattttttctcataatgctttttgtttgtgtttatgcagcaagcaagagaaatggtactagagattatccgagaaaaagaccaagctgactttcggggtgtacgcggcgatttcaactctcgaatgggaggaggcagtatagaggtatgcttaaattacaggttagtaggcaaatgagatgaggactaaagttgtaggtcacacttttgttagctctttaaccctgagcaagttagttaagttttgtctcaaaaccttaagaattctctggctccttagggtgggtgtgagggtggactggaaca

SEQ ID NO: 42977 - DNA, 2300 bp, Homo sapien
gcaagcccttcagctaaggttggaggtgagcacagggtgagcaccagagccacccaagtgcctgggcaccctcagagcaagtgtcctgcgccccgagctgccaggcgggacagccccgctggctggaagcagtaagggacttggttttctatcccctggggtggtcctgtccttccaactcttgctagtagcaggaattcaagtgggcggagggtgtagggtttttgtctgtcctcagtgaaacacagatctacttttttctgccacctgcagcctgtcttgccattgccacattcagagtagctccggggtgatgctccttggtgagccaggccaccatcaagaatgggtcttctctgggaagaatgggtcttctctgggagcattgggttttgatcagtgaaagtatccagtccctggcaaaatattgcccccagttctgaaccctgtccttcagctaagctggtcaaggtacacctgtaaaataacagctttagaacaggagtgagggcagtggtgggtatggttctgcctggggactccagtcagtgatacggttgttcacttccatcgggccagagtccccatgcgctgcctcctccagagctcccagccttctctcagtgcgaacagttgggcatttaaggaaccagattgcctctcgcctttccccaccctgctcagcgtccggccgtgggctccagtactgtgatggtgttggatccaggcctgtgggcggccacagagtgcctgcctcttggctgccctccctcagaggccttctttttctatcacagcctttgatggtgtcttttgtagggaaaaaccccaagcaaagaatatatcattaatgtcccataaatttgcaggaaaataattttaacttaacgggttttagtgatttttaaattttaaaactgtatatttcattttttttttttttttcatttaggagatggagcctgctgtacttagggcacctatgtatctcttcaacctgcctaacattttgctgtatgtgtgtgcatgtgtgtgtgtttctttaccattgaagtggcagatgttatgacactacccctaaatccttaagcatgtgtctcctaagaataaccaggcctaagaaaactgtacttctgaaacattatctggtatccagtacatgtccagatttctgcaaatgtcctaaggttgtcctaagatttaaattgctgacgggtttgttttgtttcttcctagacacagttctcacattcccttgagttgtaaggtacagtaggtctttagcgcagattcctgtgtggctggtactggcatgggttggccaacatgcagtgatagacttgccaagtgtgtgttttggggagaagaacacttgaatctgcctgggatatagtgacgtccacaaggaagtctcaccagtaggttatagaaataagataggcttgcccttttgttgttgttgttgttgtttgtttaaagcaatgtgtttggctttcagccttttctttttaacttactggagtgcctctgtgttgtaaagccttggcaaagttctctgtctcatggacctgccctcagtgggcgctcttagacaccccttcctgctagaaagaaatggcatcaagaaacacctaggccagtccactttattgatcagaaagaaaaagatttaaaaatgtaaaaacacctaggggtgataggaatccatttctgaccacacgcagatgtgctcacccaactgaggctttttatagaaggtggacccttccccgtgtggacatttgggcagtggaaagaacacatcacttaagatacgatacacacatccccctacatgtcccataagccataagtgaattgtcctacagctgagcgcctttaaacccaagttaagagggtttgatcttgaaatttcacctggtgatgtatcttttttcaggaattttttctcataatgctttttgtttgtgtttatgcagcaagcaagagaaatggtactagagattatccgagaaaaagaccaagctgactttcggggtgtacgcggcgatttcaactctcgaatgggaggaggcagtatagaggtatgcttaaattacaggttagtaggcaaatgagatgaggactaaagttgtaggtcacacttttgttagctctttaaccctgagcaagttagttaagttttgtctcaaaaccttaagaattctctggctccttagggtgggtgtgagggtggactggaacagcagcagcctgcagtgagggagctggctacacttcagggcgtggggccatttccc

SEQ ID NO: 42978 - DNA, 2300 bp, Homo sapien
gcagcgctgccctctgctggcgccctgcccaacggtcctgccttctgccaggtgtgcccttccttgggctccagcctcgggcggacccggacgcagggtctgaaggccagctaccgccgccttcctccctttgcgtcccaacggggacgggggatgccggagactactggcaggaactggggaccaggggtctggagtctggacgccaggtgtgagaccctcttagccaaggcgcgtccgggtggtggaggggcgtctatgccaacaggcgtttggacagggtctcgctcatgggaggtcagctcgctgttcttccacccaagtcctccgcgctgaggagaaggtctagggagtccacacagtccagcggagactaatccgtgagcctgacccacgccgagagggtccaggcacctctgttagcggcatctgaaattgtaggctggtgatgggagccagaagtgcggcaggtggggtgagctccctcacccagcatgtcagggcctggggtccgaggcttgaggctgacactggggagccgcgaagcctgcaggaagcggggccttccgctgggctcagcagctacctgcttcgggagaggggatcgctgggctccgaggtgcctcgaaaccgccgcaaagcaagtctgctcctgggatgatgggcaggaggaatagaggagaggaagggaaagaagagagaggcagaggagaaagaaagaactaggaggcaagaaggaaggggcgccgcaacgccaccggcttcccgaggttgcagctcagcaaggagccggaaagccgggccgcaagccgaacccgcactgaggcctctcgcggagctgcctgcagtttctgagggacttcgctctcaggcacgcctgctcccacctaggaagggtctcgggacccctttcaatccccctatatcccgtaggaaattcttttcccagagacaggctgccagggcgattcctgtccgcccatctcgacccccgacctggccccgcaagggccgggagcctggccttccatgaagctgtctcaggccgggaccagccccagccccgacggccgctgcggccccgcctcggcagccccgtgagcccgcggaggagtttcgcacccgaccgtgcacagcgaccgagttggcgcggcccgtatgaagcgaagcgccggcttcagcagcgcagtctgagcaggggatccgcgtggcaactagggctgcgcgcgagctcggggcgactgtggcggcccggggagtgcagggccggagagggaagaggacgcgggctctggccggggagggagagcggtgcagggctgggccggccagccggggcagcaaagtaaaggtgaacgccgggctgggccaggccggtgaacatagatcaggcctgaggggagcgcggggcccgaagccaggcgtcccctcttgtctagcctggtccctggagtcctagagagcctcgccgcaccccctccccttctccgtcccctcctctcctcagagccggctgagcctccctccctgccctgcgcttcccacggggagagaaggaaaaacaggaggggggaggaaggaccaggaaggggagagaggagtggaggggtactgtttggagcggtccgcgcgcccccgcccctcgcgctctcgcgacgaaggctcctcgagcccagccgggtacaacaagtctgtcctccgacgtcagggggtcattaataaccaattaggagggtcactgcggctcctataaaggcgctgagattttgccaaggggaagacggccccggccgagtgtgcgagaggctagcgcgcgcctgagccccttgctgccgcttccctgcaaccacccgcctctcacccaccctgcaccccccgcacccgcctccgcctccacccgcgtctctccaccctccgcgccgcctttgccatctctacagatttcaccatctctcttcccctctccccctcgttcgctttcctcccagtcgccccctcacctcccgctccctcctgcgtcctcctcctctccgtcctccccctgctctggttccttctccatcgcagcgctctcctctcgccccttgggctcccctctcgcccgcccacctcccccgtcggcccggccgtcccccggcgccggggagctccgggccgcccatgatgggctccgtgctcccggctgaggccctggtgctcaagaccgggctgaaggcgccgggactggcgctggccgaggttatcacctccgacatcctgcacagcttcctgtacggccgctggcgcaacgtgctcgggga

SEQ ID NO: 42979 - DNA, 2300 bp, Homo sapien
gggtacccacttgtctactggtcgtaaaggggtaagtgtggccgggcttggtggctcatgcctgtaatcccagcactttgggaggccaaggtgggcggatcacttgagtttaggagttcgagatcaggttgggcaacacggtgaaaccctgtcttcacaagacaaatacaaaaaattagccgagcctggtggcatgtgcctgtagtccaagctattcaagaggctgaggtggtaggattacctgagcccaggaggacgaggctgcagtaagccataatcgtgtcattgtactccagcctgggtgacaaagactctgtctcgaaaaaaataaaaataaaaaaaggtgcgtgtgatgatgcagaaagaggagcactggggatgggagagggggagtccctgtcgttttggattctagtcccagttacgggtctgtttggggggctcggtggccccaagtgatcatcagggatagcaatgcctatctcgaagatgggctgaaagtgaggaatacataacatagtatttgtaaagcactcagcaaaggaccagccgaagcactcgggctatttctggtaaagggtgcaggctctggggtaaatcgcgtgcagttggaacacacatcggctttgcagccatctgctaatgtgaattccattccttttggggcctcgatttcctcctccataaactggtatccacaatgccaaccttgtgaacgctgtgagaatgcgcggggtaaaggcgacgtctctccctcccgggaagaacttggatggtgtcaggcctacactctcgctccgcctagggccgctcgctgggcctggctccccggctgccgggctacgcgagctcagaggacaccatcgccctcttatggccgcggcaggactggaccgaggggctgggctctagtgccttcctccaggcacggcagagggcgagggtctggcagcccgcttacccagggcctcggggcactagcattcatgtcatcgactgcctggcagggctggctttcttaagtgtggtcgtgagacttgcttaagtggaagaaatgctgtcgctttggagatttataaaacaattggctcgatggatctttcttcaggaggcggacttggtttaccggctttactgaccacagctgatgccaatgatttcatttaatcgtctttagagtccctgtgcatggggagttaccatccccaattagtttcttgtgaatgcagggcaaggagagggagagggtagtgggggacggggagaaggggcgaggggtaccctcctattaaaacggagccgcagaaaaacccacagagacatccgtctgttccccgctgagtccttagaacagcgcctggcacacagagagcgctcaactcgctgtgtaactaaatgcaagccaagatcttcgcattgtgtgtgctcttcccttccctaccaaatatacctggcttgcaaggtttgacctgttttcttagacgatttttaacttgtttccaaaagaaatattggagtaaattagcttgttcaaaggagtccttatgaaaggacagaaccaagtgagaagtatctggagcccggtttggggttatagatgatgatgttgagccagcacccacggggcggccgcaatgtagaatcctggcgctactgggaaccgtgtggaaaggggctcttctttctgttcaaatagtgttttctgtagatcccatctctccatcctcctgagctctctcttacaaaatatcggatttcagcagcttagaattggacagaaactcagaggtccgtttctcaattatctctaaccctggtaaacaataaatgggatgatgagtacaagacagttttggtaaaaagtcacacgccacacaacgtgagattttattattccacgggtgcttccttgccaatagtagacatggcagctcggctcccttcccttcgggttcgccttattgttgccaattgtaaacatggcctctaggccgtgagttctcattggcagctgctctgagtccccgcccttccccgcccctccgaacgcggcctggagttgtggagtcggatatcgcagctcccgactgagctgcgcctgcgcaactcattggcgccaagatggcgatggagatgaggcttccagtggctcgcaagcctcttagcgagagactgggccgcgacactaagaaacatctagtggtgccgggggatacaatcactacggacacaggattcatgcggtacgtggggacttgggggagtcgaggcttcagagagcggcttcagggctctctgca

SEQ ID NO: 42980 - DNA, 2300 bp, Homo sapien
agagaggcttactgtgccaagctctgtgccgagtgccaagcacgattgagttccccagcaggggatataagataactgacctagtccctggcagtagaagaataaataagctgtggttatacaaaaggaaatttcagtgagagaagcttgtaggaaagacaggcattggagttgatcctggaaggatggagagactttgaatgactagttcagggaatctgagataaagggaaatgtatgagcagagatatatccaagcaggagttagtctggtcctgctggaccacagagggctgtcatggaagatgactatggaaatgttggctaggtgagattgggaggggtctgaatgttcctcagagaagggagggaaagaggaagaggagctgtggaaaagtcttttgagatggaaagtcgtgattatcactgattcccctcaagtggcttgggttacctactcttgctatagttctcagtgcttgaatattgtggttggcctcaaacatctcaaaaggaagtgaaagagaagtgatggagacctttctgaggatctggcttaagtaatgtcatttctttgtgtatttcagaggagaagatctgcagaagatgagcttgcaatgagaggtttcttacaggaaggggaccttatcagtgtatcctgcgctttgcactccagcctcttgatgcttttctgtgggactgggaaatgggccttccattgtatgtctctgacggaagaaccatgtcatccttgcagggatccgagtcttagaccaagtgtcgggctctgctgcatcctttctcagtctccttaattcaggctgactccccagctcttgttgggacctgctgctaagtcatttctttgggtcttgtaacttacggtggcctgtgctttagactaggcttttgttaatggtgttaacttttagcgcagggagtggagaaggtgttgttcacgtcaagatattaatgacaggccgagtgtggtgactcatgcctgtaatcccagcgctttggaaggccaaggagggaggactgcttgagcctaagagttcaagaccagcctgggcaacatagcaagacccccctctctacaaaaaaattaaaaaagaattagccgggcgtggtggcacatgcctgtagtcctagctactcaggaggctggggccagagggttgcttgagcccaggagctcaaggctacagtaagctatgatcacaccactgcattccagcttgggtgacagaacaagactctgtctctattttatgttattttttaaatttttctttttttttaatgacggagtcttgctctgttgcccagactggagtgcagtggcgcgatctcggctcactgcaacgtccgcctcttggattcaagcaattctgccttagcctcccaaatagctaggattaccggcgtgcgtcatgcctggctaatttttgtatttttagtagagacaggtttcaccatattggccaggctggtctcaaactcctgacctcaggtgatctgcccacctcggcctcccaaagtgctgggattacgggcatgagccaccatgcctggcctctgtctttattttatttatttatttatttatttatttatttatttatttatttttttgagacggagtttcactcttgttgcccaggctggagtgcaatggtgggatctcggctcactgcaacctctgcctcccgggttcaagcgattctcctgcctcagcctcctgagtagctgggattacaggcatgcgccactatgcccgactaattttgtacttttagtagagacggggtttctccatgttggtcaggctggtctagaactcctgacctcaggtgatcgacctgcctcagcctcccaaagtgctgggattacaggtgtgagccaccgcacctggccttctgtctgtatttttaaaaaaaagatattcatgacaaccaaggggagaggtaaggtcacagtgatgtgctctgggtcaaagattgttgagcctggaccattggagaggggaggaaaagatggaggtgtggggtcaaggggagaggctgcagaggacaggacagtgtgtggccaaggctgctgtttgttccttcatcaccctggccaggctgaggtccaggcagtgttctctgacggagctgtctctttgcacacgaggagcctgaaatatggaaaagtaagtcgggctcttgatgttcctgtttgctgactgagactacaaggctatttttgaatccccatagctctctggaattctggcctaaagaaccccagtagctaag

SEQ ID NO: 42981 - DNA, 2300 bp, Homo sapien
tggctttggcacatctaggtcattggttctgccgacttgctaaacccaaccatctgggcattttctcggctaatatagaggatgttttcatgtgaacacgtgtccacctgtgaaatgtttataatgttaaaggttcgttctggggcaaacatctgatagcgcctggcaaacccaacaaatgccttttctgtaatgagtaagcctcctaatgcccaaagaaacagttgaattcgttagcaacatgtcggatgttttccctatgtctgtatatttcttcgctagtttttttttttttttctttttgagacggagtttcgctcttgttgcccaggctagagtgcaatggtgccatctcgcctcaccgcaacctctacctcccgggttcaagcgagtctcctgcctcaacgtcctgagtagctgggattacaggcatgtgccaccacgcttggctaattttgtatttttagtagagacggggtttctccatgttggtcaggctggtctcgaactcccgacctcaggtgatccgcccgtctcggcctcccaaagtgctgggattaccggcgtgagccaccgcgcccggcccgctagttctaatatttatgctttttggagggtgaagggcttgaaaggcatcaaaaaccttggtttctaggagcgagccaaattttctcccttagagactgaaggaggttatccgactccgcttccaggaaaatccaatccgcaatttttccctcgctttggctcttccaggtctcactactcgcgccggggagacgcggtccggcctacgctaggccggcaagaatctaccaggtcccaggagggcggggccgagccccagaagtcggggcccgggccaggagtcttggtgcaggcggactcgggcgcgtgccatgggaccacaactcccggcacgcaccgcggactgcgccgaacacggttggctgggagatccaaccctactgctcccaccggccaatgggacggaggaaagaggcctgacccggattctcggaggccaatggcaatacagaggaggcgggtgcttccttaccactcaccttgcgctcagagaagccacatttaaaaggtcgtgccgggccgggctttcgcaggcagtgggaccagagccgggaggggcggcggtgtcccgggaaagcggctcttggggcatccgggtcccctcgaggcgggctccggacgtcgccgtgggcggggccgagggcggggcctggcctcgttgtggagcggctcgtaatccatcatggcggccgcggggtttggtgtctgtgcctgagcagcgctggagccggagccggttcccgggtcctgcggctgaggagcccctccgctgtccacggcccctaccggcggggggcggctgggtccctcggcggagctcgggagatgtgactgcctgagggcggtggtggtgtcagcgtccggggccgggggagggggtgtctcgggcagagacccccgggcttggggcagctgaggcggccgggcctcctctacacggggcccgccttccgctgtctgggccgcgagagtccttcgtcccttacagccccgccccggctttgggacactgcgggtggtctgtttcccccagcttgggacaccccgttttctgaggcgtggaagagcgtcgccccggagtaagctgcccgtgccgcgccccgacagcttccctcagccccaagccgccccttattccggatcccggccccaactttggccacggagcctcccattcaaatccctcccttgctgtcaaggggtctccccttcccccaaggtggctcccgcgagcctctaatgccctgacttcttccaatgtcacctacggcccccttagtctcagctcagccaaaaactttaatgcaaaggaaaagtctggattggttccacaggccttttaaaaagcggacttaaaagttgctggcaatgcattccttttcgtcagagtcgagggcaaactcgctgaaatctgggtgacccgtgtccttttccggagagcaaagcagagaagcgagagcggccactagttcggcaggaaatttgttggaagatgaagaagctaagatagggggttggtgacttccacaggaaaagttctggaggagtagccaaagaccatcagcgtttcctttatgtgtgagaattgaaatgactagcattattgacccttttcagcatcccctgtgaatatttctgtttaggtttttcttcttgaaaagaaattgttattcagcccgtttaaaacaaatcaagaaacttttgggtaacat

SEQ ID NO: 42982 - DNA, 2300 bp, Homo sapien
ttgatgtatggttttataactaaaattaaaaagatttgggtacagtttataagcattattcattttaagaggatttaagaggataagatcattttagactcaagagcagaatattagtaataataattagcttaaaaaaataaacatataccaatataaagaacagcacaaggcaagcaaatatctgggcctatattaacagacggtattcaaggatatggctagaatttccaaaatgcctaataatgtgtaattcttggcattaagccgccaatttgaatatggccctttaatatgaaatgctatataatgacagactttattatagtctgatccaaggcccctgaactttccaaaagggcaacaaaacagacagatactgtattttttcactagttggtactggtggcacccttttgagtgttatttttggcattacgtgtagaggttgacagattcaagacaacactaaacatgttagcagtcaccacacgcaggctgtccagcagaatgacagcgcttcccagatcctagaaagcatccagagtcactgcacccatcccctgggggccctgtagtcctgcatctccagatgatgggagctgcaaacttccctgatggtgccctcttggatgctcatgaggcctgatctggtaccacgactctagcagtaggtccattcaatggcagtaaaaatacatgttgtatgttgatcagaatttggcaggacacatgtggaaagttaatgacatcctggccgagaacccctgtgatatacactggttacatcctgtccaactggagtttttatgtgctgtttttggcagagccaagtgaagatcttgttacttagccattcctgaggtactgaagatacccgggtttttgtcattacaggataggctagaaagtagccagggtctcataaccaaggctttctctgaaacatataatgacaatgctagttatttgaccaaagatatccaatgctttaatccacttggaatttattcttgatgtgaagggtcagcatcatccactggtcgggagcctgatccttggagccaggcagacctgggttgagtccatctccgcctgtttccagctgtgggcaaggtgtctgacttctctgagcatctgtggggtttgtttgtttttaaacctgaagaattgggataatctgtttcctcacagaatcattacgcagatgcaatacagttaatgaaggtaacatggcacataggaagagcacaatacacgtcagctcttactcttcatggctagaagatgtggactaaacttccccctttacagttttgtgattaacaccatttatgaaagaaataaatgaaataaattccttttcctgtcatgaggggaacttacctgattttattgaattatttggtgccattgagttccttattgtttccctctgacctagatttctgggtgtgcgccagtaacacgactgtgattgttgctgctttataacattgtctgtggtcagtccaaacaagagtttaaaataattgaatgaaatggattttaaacaatggtccccccaccctcaccccgtggcactcggccaaaggaagaggaaaagttctctgttaaagaaaatgaatcagagaagaggcccagaccgtgcctccgaaaattctcattgtagggactaagtcctctcactctgaactcacacccgtctgttcgcagcctgacctcatatcctggtctggatgtgcggcctcaccggggtgtcgtgcgcacgtgtggttgtcctgtgggtgccagctctgacttcctccccagacacccactgcctcagccttaatcacaggacgcgcgttgagtagaaatgagaccagttagtattggtaactgcagaggaatatgcattttcaccagcgttctcgggtcagagggtttgcctggcaccgcgtactgggaaactcgccaaaagcggtgcaggttggagacgccccaggccgcggtggagttgcgcgcggcttctaaagtggagtggagcaggcctgcaccctccccgccggggctgggacggcgcttccaggcggagaaagacctccgcgggccgcgcgcggccttccccctgcgaggatcgccattggcccgggttggctttggaaagcggcggtggctttgggccgggctcggcctcgggaacgccaggggcccctgggtgcggacgggcgcggccaggagggggttaaggcgcaggcggcggcggggcgggggcgggcctggcgggcgccctctccgggccctttgttaacaggcgc

SEQ ID NO: 42983 - DNA, 2300 bp, Homo sapien
gagtgaagcaatctttctagacaagttttgcgtttctcagaattttattttagtgatattgttaccaaaagattgtaaccccaaaatgtgtgcctttggcttgcctgttttaggaattcacttgtgttatctccccaagcaaaacaaaagaaagagaaaccttcctgttgacgaatcctttttaccttcttgagagttgtcaatgggactaacttgtatatttctttgctaccttcttttaaaaacatttttcttatttactattacagacgtatagtaatggtgcctgacataacccacagccaaaggccttggccttgctgtgtgtatttcaggctttttcttcccttttctttttttttaagtaataagatattacagttatagctgaagcctgatcctgttcccttttctccctctcgtcccaagcatcaccactgtcccaaatctgctccttcttcccacatctttgcagtttgggcaagtcttctgaatgcctagtcatgattttaagtcttctttccaccttcagtgatggttggctaccctgagcaagccagtagattcagttatgtgcctggagtccagatgttttatgtggatttttcatgtggaattgtttttggtaaggaagtattcccttgccacaccaatgaaaagagaagaaaacaggtagctggcacccactgcattgttgctttctgccagcctgctccttctccttcctctccagctctgttgtgtccagatgcaaactctacatgcagggtttgaccctaggtcctcacctgctgtagctctcacacggggaccgaatgctcttgtgtcgtaaatccttccttttgcttcctcgtgttggatgtgtttagtggttttcatcttctggtcactatttcattctaggtttatcccctttaaattataaattaaatgaattcttcgcttttcctaccagcaactacccaccaagttctaccatgtgttaatttaatcaacagttatttattgagtacttattacatgttgatttcctgttctcaacattggaatgaagacagcttagggttctgctttcatgaagcttgcatgctcttaggtggagacagacagtaattaagcagataaacaggaaattatgagctagtagtgggtccattgctgagaagtaagacaggtggtaggatgacccgtgccgtgtgatgactttagattgggtggttggggaagacttcacggaccttaaaactggccttggaacgggaagcgagaactgggcacggaagatgagggagtgggagatttcaggcagagggagcagcagcaggtacagaggccctgaggccttttattgtgtctttttgcttgagcgagtaacttagagcacacgtagagaaagacagcagaagtgatcttctaaacactctgtcctgtgtggagagctccttatgtgagattttgctgtgtagtgaattaaggctcagccaaactggctcacgtgagctctttgagcttgcctgtctctgtgggctgaaggctgttccctgtttccttcagctctacgtctcctccgagagccgcttcaacaccctggccgagttggttcatcatcattcaacggtggccgacgggctcatcaccacgctccattatccagccccaaagcgcaacaagcccactgtctatggtgtgtcccccaactacgacaagtgggagatggaacgcacggacatcaccatgaagcacaagctgggcgggggccagtacggggaggtgtacgagggcgtgtggaagaaatacagcctgacggtggccgtgaagaccttgaaggtaggctgggactgccgggggtgcccagggtacgtggggcaaggcgtctgctggcattaggcgatgcatctgcctggaagtctacctcctgcctgctgtccgagggcttcattggcgccacggaattgacttttccgtcttatatcattcctgtgtctttgtaggagtggaatcattctcatagtccgagtgtgtttccacatatggtgagagctgacaagcatggaggggttttggtgtaaaaagattagtcatttggagaggttttctcattttatggcaaggttcttttaaagccgtggatttccatgctgttcgtgcggcatggagatcacttcctaccgagagttaaggaggaaaaaaagatctctgagttttgaaagaagatttaaccaaaatgcatttgactcttctgtggatttttgttggctgatttggaaggcaggtgccctgggcatccccagtgggttcca

SEQ ID NO: 42984 - DNA, 2300 bp, Homo sapien
ttgtttttatcaacgcggtcagcactgcccctcttcaacaacagcgtccccaatggaatcccagggtcaggaatgcgcagcaggcagtcggcagagcagcaagcgcaccgcgggccatataaagcagggagagcccaggggccatgcctcctggacgaggacccagagcagctctgcccagcccagccccggagcccagcgatccaccagccagccttcctgggagcagtcccagccacacggtgagcatagctgccctgtccccagcaggaaccccagctcaggccctgcccaggcaggagccaggcatgggcagtcagagggcacacagaagcacagggagggagtgcccggagaggggacaccagtgcctcccctgccaacagcccagagcagcacagattggtcacggctgccctgccagggctgggacccagcctcacccgtgcttttcctgtcccttcctggctgtggggcctgaagccctgactcgcgctggggccgcctgtcccgtgatgagcatccccactttctaccagattcttgaaggggtgcatgaacccctaaaaggggtgaagggccactccagggcctgctctgtcaggctgtctcctttctagacacccagaggccactcccgggtggatttatccaccaggatgcaacggtccctggtccacatcgcagtcagcaaagtgcttcctatggggaggagggaatgggctgggccgctgcagaaagtcacctcgtggaagcccccactctgcctgcgccctgatggaaaggttttcctggcagcatgagggaggtcactccatccctgggggacgaaagcttagaagaactggatttgggtagaaagtggggttgcatgtattatttttttaaaagcttcctggctgagctcgcttctttgaaatgtgttcgagggagccatttctggaaagggctctggggactcctgtactgtcttctccagggccggtgctctctagtctagcctcagtttgactctgcggaggacaagccagctccagctcccccgcggtcattgtcaaaaaggttttctttgccagacaagggagcaagtgttaccaaggcaggttcattacaggaggctgggtttcagatcccccgagtgccatgtggagtacagaggagggagttagggcacgccttcctgagtcaagcccagttagacctgggattgaactctagctctggcactgataaggccatgagatctggggcaagtcacctcagctgtttgagaccgacaccacccctgtgaaataggagggttgggagtacctagcagatatgtatgcttcttgaagaagccgtctggccattagaatcatgaatccagagcctccactttctggctgtgtggcctgggcacaatctcagtttttctgacagttttgttgcctgaaaaagtgggactggccggacctaccaagcaggagtactatgaagatgaagtacaatcacatgtgtgagctcttggctcagagcctggcagacctacggtgcccaggccccagtggtgtccacacactccttcccaggtgggtgtccgaattaggccaggaccatccaatctgtttctggctttcaggagcaactcgttcccacgtgaaagagacattagcaggatgtcccagctaaacagcatagctagacccatttattatccagttgaacactaagggagattgatgcttttaactttccaccccatggctctgcaatgatatggccattttataataagagaaaaatgagcatacatttgctgactctcccggggccgcctgggcactgctctgccagccagcagcggtggatttacggtgctaagctgcccaggcacgcagatcgtggggactgcaggagaagaaccggcctaactggcacaatcacctcctgatcctgctaataaaacagtggcctagtcccagcactgctcggaagccgggctcagctgagccccctgctcacatctacgctgccagcctgtcccggggaaacattttggtgagttgcgcttggccacgtgtgcagcctgtcactctgcctctctttcctctgggtcagatggtaaggccttaccccctgatctacttcctcttcctgccgctgggcgcctgcttccctctactggacagaagagagcccacagacgccatgggtggcctcggagctggagaacgctgggccgacctggccatggggccccgaccccactccgtgtggggttcctctcggtggctgagagcttcacagccacaggccct

SEQ ID NO: 42985 - DNA, 2300 bp, Homo sapien
aacgtgaaaaaaagagaacatgcgtcccagcattgacgacacacagaaataacactttgggtggaaaaaaatgtcctccagatgctgtgtgcacattgatcatgggataatgaaagccactaatatttactgtgccagcacaacgtgccaggcacggctccaagtgctttaatatacgaagtcatttcaagacaagtctcaaattcggaaagttgaaaaggtggggaaaatgtgtctgagagttgaggaaattcaatcataggaggggcctggcccagagaggaaggcaggaggctcggggcctaatcccagttctgcttttatttgcagtgtgattctgggagagccccttgccctctctgggcctcagttttcccttgtgtgtaatgctcaggggccatgagcgagtctgcccagtgaatctgggcctccgagagcgtgtgcggccacgctctggcacctccgctcaccacaagctgttccttggtcctggcttctggccaacacagttttttatcgcgcctgcccttcgtttccgtttttgttttttgttttttgttttttgtttttttgagacggagtctagctctgtctccaggctagagttcagtgtcatggtcttggctcactgtaacctccacctcccaagttcaaggaattctcgtgcctcagcctcccgagtagctgggatttacaggcatgtgccaccatgcccagctaatttttgtatttttagtagagatggggtttcaccttgttggccaggatggtctcgatctcctgaccttgtgatctgcccgcctcggcctcccaagtgctgggcttacaggcgtgagctacctcgccgggtcccgttcctggttttgagatatggcttgttctggagtgacagccacctgttgcctcagcccccctcctccttggagggcagcaggcctcttctccagggtggccttagggctacctggcccagcgggttggcatttgctctgccaggggcctgctctgtgaagagatagaggaaggagagaggatggggtggggtgcggggaggaggtgcctaggagcccccatgtgccctggggactggagaacagcaggacagaacacgggatgtggctgctgcagttggaagggaccttccgtgatgggtgcccgctaccccagggcactcgttcccagagacagcacgagaccatctatagcatcgctgctgttgcatcacagctctctctgaccagtgtatagagaggtgggtgtctctatattgctctgttttacaggcgaggaaactgaggctcagagaggtgaggcccctggcccaaggtcacactgtgggaaatgcagcttagaggcctgagccctgtcccgtctggctgcagaggtgggatctccacctccagcccttactgggtggtgtgggctccacgggggccacacggccacacacacaggtgaccgtgggtccctgggctgtcactgtgcagggcatggggggaggtgggtggcaggggcagcgagagggaaggcttggcattctgcttgtgtctttgtgtctttctgcctcagtttctatttcccatcctgtccgtctccatctccctgcatctccccgcgtctccctgcgtctccccgcatctccccatgtctccccgtgtctccccgcgtctccccgcatctccccatgtctccccgcatctccctgcgtctccctgtgtctccctgcatctccctgcgtctccccgcgtctccccgtctctccctatgtctccacctcccctctggggctctgtctctctccactttctccctgaggcgctcactgtgtccctctcactgcatctgtggctgtccctgtctctctgtctccccttggactgtctctcagtgcctgtctcatctcagtctctgtgccacgcccttgcccagccccccaagaagggggtcctctgaccccaggtatgcctctaatgctggccccttctctctcccgtctgtctgtctgtgtctgtgcgtcccgggcgggcctgcagcggccgagctgcggctacgtgctgtgcaccgtgctgctggccctggctgtgctgctggctgtagctgtcaccggtgccgtgctcttcctgaaccacgcccacgcgccgggcacggcgcccccacctgtcgtcagcactggggctgccagcgccaacagcgccctggtcactgtggaaagggcggacagctcgcacctcagcatcctcattgacccgcgctgccccgacctcaccgacagcttcgcacgcctggagagcgcccaggcc

SEQ ID NO: 42986 - DNA, 2300 bp, Homo sapien
cagccccccacccccgctccaccccccagggtgatctttcatctgtgcacaaatgcgtctggagtttacatcctctcgccaaactgtggagtcagagccttgcatttccgccacctgcccgctttgtgcctgtaactgcacaagggcctgcaaacctcgccactccccaccaataggcaagtccttgtttacgaggaaactgaggcttggggatgacgtggaatctgcccaaggtcacagcaggaacatctgagccttgccctgctcaggtgctgtgatgcactgtggcagagcccttctgaagcgtgtgcagtcaaccctttggcttacatggggaaactgaggctcggagaggtatgttgcttgccctcagccacacagccagggccctgtgccctccaccacatccttcttcccaagtctgagggccctctagatcacctgctgaccctcttaattcataggaaaggccgaggggccagaaagggccagaggccagaattggaacctgggtctcctgactcccagccattgctgtgggatcctctccaactcccgggcagcctcagtccgggaagccgggatcgggccgtaggtgaggccagcggttgtcctggaaggaaaaggcggctggggacaaacagccggtggtttgtgaacccagcgcctggcgggtggcagtctcctcggatggcaccgggccacagggtcccccgctccggggtccagggagtgccccagcccaggctggacgcggcccccacccccaaccagtctgccccgccagtgccggacgcgtagagggatcgggagagggacgaagatggggcgacagactggcagccagtgggggagagacggagacggtgccagggaacagcgcggcggccaaggcgccccgggagccggaaaacagctttggggagaagcgggggcggggaacgggggtctgtctggagctgggggagcagaaaaagatggggacgcagaaaggggcggaggaggggcggccggcgggctcggcggggcggcgggaggggagcgcggcgtcgggcagtgtgggcgcctcccggtcagaagccacaatagcagctcgttcgccgcgcagattaaggactttgtcaattacctccgaaggccgctccgggcggattaaatgcttttaaaagtgctgctggtgggaaggggcaactaagaagccccctcctggcacaaatcccctcccggcggaggagaaggcgggggctgggaccacgcggggcgcgccggggagcgcgggcgatcggccgggagcgcggccgagcgcggagcggctggtactcgcgaccacagcgccggcggctgtggcagtggtggggacccccatttcgcccacgggccgcccgggcaagggggcgtcgtgtgggctttccgaccgcgggcgcgagggcacgggtctgcggacgcggactgggacgcccaccggccaggctcacgcgtcggggtccggcgcagggaggtccccgggggctggagaccccacagctgggcgcacttgccccgggacctggacccagacctcgggggcccgcagggggcgcaccccaccgaaactgcccccggcgcagcctgggtcttggggcgagccctgcgtcctgagccgggagggagccggaaggagcgccgcgccactccccggagacgccgaaccggccggcgggggcgccctcggggcccgccccgcgcatggtgacttgtgtgagtccggtccgggaggaagtttgtgcagaggcgccgccggggggctctcaggcccctccgggagccagcaggagccgggccgcccgcggctgtttgctgccctccggccggccgcgttatctgggggccagttcggcctcctttccctaggtcttttcggaggcggagtttagtatccaagtccgcgggtgtgagcgcgcgcgtgtgtgtgagtgtgtcgggggaggccgaggggagcaataaaaagcaaagagagtccgagaccagaaaagatgcggagattgagaaggagggaggagggacgagggaggagagagaggagcgcgccggggaggcgccggagccgggagcggggacggcgcgcagcgcgagcggcgggcgttgggctggcggctttcgcgctcccgctcctgctcccgcccgcacacagcggcgcgctcatcctcacacgcccgcccgctcccgggccgccccggcgcggggcacagaggcggggacccggcggacagagcgcgccccgcgcccgcgcccgcgcccaccccgtctcctttgcgctccgc

SEQ ID NO: 42987 - DNA, 2300 bp, Homo sapien
tgctggtctcttcaggttttctgtctctcagtagcattttataatttgattcatttatatcttgcacatttcataccagatttattattaggtgttctaccatttcctacatcattgctggcatcagttttttgtttgttttgttttgtttttgttttgttttttaaaaaacagggtcttgctctattgcataggctggagtgcatttgcgtgacctcggctcactgcaacctctgtctcctgaattcaagcgattcttgtgcctcagccttccaagtagctgggattacaggtgtgccacaatgcctggctaatttttgtatttttagtggagatggggtttcaccatattgcccaggctggtctcgaactcatgacctcaggtgatctgcctgcctcagcctcccaaagtgctgggattacaggcgtgagccaccgcacccagccagaaaatgcctattgctggcattggttttcgtactctatcctgtagtcagccatcttacggagctcttattaattttaatagtcttagtagaatcttttagattttctagatgtatgttcaggtaagtagaagatataaatatttatatcttttaagttttttgtcttattgtattagctagaacttccaaaataaccttaggtaccagtggtgatatcatatactaactctacttagatatagttctgaaatctctaacttattccatgggtctattctgtagtcctttccacaaccgtattgttttaatcatgtgtaaataactggtagtgaatcagcccactacagttcatcttgcttccaaaaattttctttctttcttttctttcttttttttttttttgatggagtttctctcttgttgcccaggctggagtgcaatggcatgatctcagttcactgcaacttctgccccccgggttcaaacaattctcctgcctcagcctcctgagtagctgggattacaggcacgcaccgccacacccagctaatttttgtgtttttagtagagacggggtttcactatgttggccaggctggtctcgaactcctgacctcaggtgatctgccttcctcaacttcccaaaatgctgggattataggcgagagccaccgcgccaggccaggaaatttatttctattttccttagagttcgtctgggaatggctgcctttttttttttttttttttcgagacagggtctgactctgttggccaggctggagtgcaatggcatgatcacagcccactgcagcctaacctcccgggctcaagggatccttccacctcagcctcccaggtagctgggactacaggcttgtgccatgacgccgggctaatttttgtatttttttgtagagatagggtctcactattttgcccaggttggtctcgaactcctggcctcaagttatccttccgcctccacctcccaaagtgctaggattacaggcgtgagccaccgcgcacgacctggctgctaaattttatcgaatgacttctctccctcgatttgctaatgttaataaatggggagtaaagggggcatttatgggggttggggcagaagacaaggaagccctctctgaggtgacatttgtgataagaccaggtacccttgtcacaaatgtcaggttagaatctctttgctgtggggacagagcgcagccggcagcaggagtgcttttcagggttaagggcgacaggagctatgcggagccatctcacaaccctgtccagggcacactttattgctaggaggagatgcgcaaacggtagcgatcagttagagatagatcctcttgtccccttttatctcaggactccaaggcactgctgaacagtttctgtttaatgagcagccattgaagcctcccaatggcgagaatgagcctgcatctttaccgaccccactccacagacgaggaaactgaggctcaaagaggcccgggtcgcctctggggcagactcccgagccgcgcactgccgggcacgtccagcaggtgggagtgggcgcccggggacggcgcggtccctggtatttttagtggggtggggccgccgccgcccgcccctccctccagcctccccgccccgcaggggaaggcgggtcctggcggccagcgcgcggtccgcgcccaccctagccgagcggggccggcagagcgcgcggcgtcggtgcccttgaccatggcggcggctgcgcttctgctggggctggcgctgctggcaccgcgggcggccggcgcgggcatgggcgcgtgctatgacggcgcagggcgcccgcagcgc

SEQ ID NO: 42988 - DNA, 2300 bp, Homo sapien
atcaaggctacggtgggggattgacatgattaaactgagctaggagtgacttggtccctagatgtctgggcagaggtggagaggccgaagatgggggagctgctgctgcacagtgagtttggtgattggcgtctggtgtaagtgatgtcgagaatatggagttcttccaagacctctgggatagggtctgatgtccccctcccgcctccctccagtttctcagccgatggcacacagtcgtcctggtgcctgctcttggcactcagcctttatccactcaagccgtgggatccagctcagctcagtcccagcatccccgacgggtggagaactcgggcctgacatgttgtgactcacgcagtctgatcatgcctggtgcatgtgctgatctattctctggccccagaggtggggccgctgccgggtggaatgcggcagctgttgaacatctggctagcaatgcagtccagcagctgagcagaaggtggggtggcccctgccctgtaggatggctgactggagccaaccagcccaaccggccagggcaataggctgttggagcctggagagggaagtgcattatgagggctctgtcctaagtcagctcccatccaccaagggtggtaacgctaagcttttactctctgcttaaaccatccagcaagtcatcaaagttacaaaagcccctgcttagtgcgttctgggttacttcattgtgaagatcaggggactgaagctcagccagatcaagtgcctcgcctaaggtcatgcagcttggccaaatccaaacccttgggtgagtggacagaggagcgtcagctaggagaggtgggcgctggtcttactggggaggaggggcctgccccctggactgctgccctgacctcagccccatcccattctgcctagccccttgctgggcacttccctccccagggacagccacagaaaaatgatgatctcggctgggcgtggtggctcacgcctgtaatcccagcactttgggaggccgaggcaggtggatcaccttaggtcaggagttcgagacaaaccttgccaacatgatgaaaccccgtctctactaaaaatacaaacattagctgggcgtggtggtgtgtgcctgtagtcccggctacttgggaggctgaggcaggagaatcacttgaacccggaggcgaaggttgcagtgagccgagatcaagccgctgcactccagctctgggcaacagagcaagactctgcctcgaaaaaaataaataaataagaaagatgatctcagggtccctaccctaggagtcagatgcacggtggggccattcctagcgctgcctgccctggacagcgcctgtctatgcctgtggcccagcatcattatgaggagtgctcccttgactctggctgtcctgatttggacactagacttcatggtcaccctggccacaggtaccctatcctgcatcctgagctccgctcttcctggagtcatgggctggtctttcctcctggtggccttgcgccccagctccagcttcctgacttttctcttctggaaatgggaatgccaagtcctatttcatggagttttgagaatgaaatgactggtgtacggtgcaaagtgcctgtgagtgcccaagaaatctcttttattaacaagacacgaattcattccaattgatttgacgggccactgttgtcacagcagccgcactgccccaaaggcagcagtgatgtttgagcgccgactccccgacggcacttggtcctcacaaccaccccatggagttcatgctaagatcctcgcatttcatttgtgtggcagggacttgctgaggtccggggaggggcagagaggaggggtgcggccgccccgcgctttgcactttccgcgtcctccagcagaggggtcggccggcgggctcagcgtcccgcataatagccgctttgaagcccgcggagcgggtggcgggaggggaggggagaggcgggaggggaggggagaggcgggaggggaggggcgaggcgggagggagggagggaggggccggcagcggagggaggggtgtgtcggccgcccgcgccgttcctccgcccctcggtcccgcggccacacgcagctagccggagcccggaccaggcgcctgtgcctcctcctcgtccctcgccgcgtccgcgaagcctggagccggcgggagccccgcgctcgccatgtcgggcgagctcagcaacaggttccaaggtaggcgccgccgtccccgagcagccacctgtgcgcgccgggcggaccgcggggtccaccgcgc

SEQ ID NO: 42989 - DNA, 2300 bp, Homo sapien
acgaggtcaggagatggagaccatcctggctaacacggtgaaaccccgtctctactaaaaatacaaaaaattagccgggcgtggtggcggccgcctgtagtcccagctacttgggaagctgaggcaggagaatgctgtgaacccgggaggcagagcttgcagtgagccgagatcgcgccactgcactccagcatgagtgacagagtgagactccgtctcaaaaaaaaaaaagaacctctgtcctagagcatttataattcactacagaaatgtattctatgaaggactttaataccatcagtcagccttatccagacgatctcaattctaatcctgtcaccaccactttctgactgagggctattggagaattttctcaacttctctgtgcctcccttacctcatcaattattattatgtatgtgtatgtgtgtgtgtgtatatatatatatatgtgtgtgtgtgtatatatatatgtgtgtgtgtgtgtgtatatatatatatatatatatatttttttttttttttttttttttttctgagacagagtctcactctgtcacccaggctggagtgcagtggcacaatcttagctcactgcaacctccaccttttgtgttcatgcgattctcctgcctcagcctcctgtatagctgggaacacaggcgtccgccaccacacccggctaattgttgtatttttagcagagacggggtttcaccatgttggccaggctggtctcgagctcctgacctcaggtgttccacccacctcggcctcccaaagtactgtggttacaggcgtgagccactgctcccagcctatttttatttactttttttttttttttttttttgagacggagtctcgctctttcgcccaggccagactgcagtggcgctgtctctgctcactgcaacctccgcctcccgggttcacgccattctcctgcctcagcctcccgagtagctgggactacaggtgcccgccaccgcgcccggctaattttttgtatttttagtagagtcggggtttcaccgtgttagccaggatggtctccatctcctgacctcgtgatccgcccgcctcggcctcgcaaagtgctgggattacaggcgtgagccaccgcgcccggccttttatttactttttgagacagggcctggctctgtcacccaggctggagtgcaatggtgcaatcacagctccctgtagcctcaacctcctgggctcaggcaattctcccacctcagcctcccgagtagctgagactacatacgcatgccatcactgctggctaatttttgtggttttgttttgttttttatagagacggggtctcgccatgttgccgaggctggtctcaaactcctggtctcaagcaatcctcctgtctccgcctcccaagtgctgggattataggcatgagccacccgcgtctcatcaattaaataaataacccctaggacgactaagatgtcttcaagattacatgagatcccacatctgaaggtttttgcaaaggacttggcacaaactcgtgcgactagacatggatatggctcttgctctggaaaggatcaccttgataggagcaaacaaagctggtcttcggtgccctttaatctcccctcccagccttccaccttccacactttaagagtcgtccctgccgaccccccgaccccgtttttctgaacctcccttcctccccttgcatagtccaaagcctctctctaaagcagccccccgaaaacatctgtcaagttccaaacttatctgaatcggaagctaccaatagccaacctacatctaaggggaactgtaagatttcagaagaacaagaagcataggtcgcttaggcgtgggccacccaagaagagagacttaacactaggtaagcccgcgctggctgcgaaggcgggagcggcaccaggaccatccagggcgcaggcgcagggacctcacggccacgccactactcagcccgagctggccaatggggagcggcggccggaagaacgcgcggcttcgctaggttccgcggcttcctctgaccaagcttgacgtcaccaaagcgcgccggaaatgcgaggtcaactgcgcgccgctggcgctgaggggaggaagtttgctgtcgagcggcctgggttccgtgggcaaggccgtgggaggcagcgttggctgcttcgacacactgagggcggcgcgatgggagacgagatggatgccatgattcccgagcgggagatgaaggtcagagactaaccggggcctccctcccttctttagtcctggcg

SEQ ID NO: 42990 - DNA, 2300 bp, Homo sapien
atatatatatatatgtgtgtgtgtgtatatatatatgtgtgtgtgtgtgtgtatatatatatatatatatatatttttttttttttttttttttttttctgagacagagtctcactctgtcacccaggctggagtgcagtggcacaatcttagctcactgcaacctccaccttttgtgttcatgcgattctcctgcctcagcctcctgtatagctgggaacacaggcgtccgccaccacacccggctaattgttgtatttttagcagagacggggtttcaccatgttggccaggctggtctcgagctcctgacctcaggtgttccacccacctcggcctcccaaagtactgtggttacaggcgtgagccactgctcccagcctatttttatttactttttttttttttttttttttgagacggagtctcgctctttcgcccaggccagactgcagtggcgctgtctctgctcactgcaacctccgcctcccgggttcacgccattctcctgcctcagcctcccgagtagctgggactacaggtgcccgccaccgcgcccggctaattttttgtatttttagtagagtcggggtttcaccgtgttagccaggatggtctccatctcctgacctcgtgatccgcccgcctcggcctcgcaaagtgctgggattacaggcgtgagccaccgcgcccggccttttatttactttttgagacagggcctggctctgtcacccaggctggagtgcaatggtgcaatcacagctccctgtagcctcaacctcctgggctcaggcaattctcccacctcagcctcccgagtagctgagactacatacgcatgccatcactgctggctaatttttgtggttttgttttgttttttatagagacggggtctcgccatgttgccgaggctggtctcaaactcctggtctcaagcaatcctcctgtctccgcctcccaagtgctgggattataggcatgagccacccgcgtctcatcaattaaataaataacccctaggacgactaagatgtcttcaagattacatgagatcccacatctgaaggtttttgcaaaggacttggcacaaactcgtgcgactagacatggatatggctcttgctctggaaaggatcaccttgataggagcaaacaaagctggtcttcggtgccctttaatctcccctcccagccttccaccttccacactttaagagtcgtccctgccgaccccccgaccccgtttttctgaacctcccttcctccccttgcatagtccaaagcctctctctaaagcagccccccgaaaacatctgtcaagttccaaacttatctgaatcggaagctaccaatagccaacctacatctaaggggaactgtaagatttcagaagaacaagaagcataggtcgcttaggcgtgggccacccaagaagagagacttaacactaggtaagcccgcgctggctgcgaaggcgggagcggcaccaggaccatccagggcgcaggcgcagggacctcacggccacgccactactcagcccgagctggccaatggggagcggcggccggaagaacgcgcggcttcgctaggttccgcggcttcctctgaccaagcttgacgtcaccaaagcgcgccggaaatgcgaggtcaactgcgcgccgctggcgctgaggggaggaagtttgctgtcgagcggcctgggttccgtgggcaaggccgtgggaggcagcgttggctgcttcgacacactgagggcggcgcgatgggagacgagatggatgccatgattcccgagcgggagatgaaggtcagagactaaccggggcctccctcccttctttagtcctggcgttgccttggagcccagctgaaaggcgaagcgcggtgctggctgtcccgcctcctgcttgaacagtttaccgcgttcacagctctcaccagcgcgtctgccgcgccgctggcgtgatagccccaccgaatgcagtttcccagtcccatcctggtctcgtgcacggctgttgagttaccctagctacttcctggggcggtcacaatagtggcaataactgctgtttattgagtgttgactgtgtgccaggcactgtggtagtcatcgcggcagccctacgaagtagtcgttaacgtagaggagtaagttgaggctcggaaagtaatttccctaaagtcacatttgacgcggggctgaaagccagcatcatttaagacctttgctctcccagtacttctgtaaggtgatacgggcttgcctaacgtagagtcagggaaggtca

SEQ ID NO: 42991 - DNA, 2300 bp, Homo sapien
aatttatgccagtcttgacatggctgttaatcagggtaggtcagtcaggacctgatactgtcttcataggccatttaaacattctgcacctagtaatttggggtcataattctaataccatacatttttatatgaagtattttgctttgcagtttactttcacattatctcagttaacccatacaacagccgtgtacagtgggaggataggtgtttagatatgtctcactggtgaggcagcctaggcttgagtgaccaacgcaaactctcacgattagtaaatggtggaaccagagctgggacccaaggcttctgacttcctcctgtccattgctcgtttcactacacagttgagtatcaatgtctggggtataggttatctggttttctcctgcaatccctgtttgtcagagtttgcatatttttagtgatgttatgtctagcttgtctagcttcaggcttttgcctgataaacattgtcccttagaaaaataggtgatattgcaaacagttaaacaatccagaaaaaagtgataggggatggttggaaggtcagtcaggctagtgctgaaactcttcctaagaagttctggtttctctcactactcttacatctgtctctgagatgagtagtttgtgttagagatcagaatttgagactggatatcaggacttgcctatttaagttctcaaacttgcctctgttccttagtttaccataacttaaaatggcatttaagcatttagcattcgatctttcttctggaggtatttgtgttcaccatggaaaacacatgataaggcataagtcatggcgagtgaaggaacattgactggagatggataagtcagttttgcttttaaccttattgtacatgctttgagagctagaaccattttattaatttactccttcattaattcatctacctaatagtcaagtgcttttgatgtgctaagcactgtgctaggcactgggaagatagccatgaactaggccagtgtgactgccttcttggagcttgcagagtatttctattttcatcctttaatatgatcttacatatggttaacttaaattgagaccttttttttgtttcctttttctttttggtaatttatctaaaagtatttgtccttgcttattttaaattatatttttgtgtttacattttacatatttctttgttacaaagaatggttagtggtttaacataaacattttgcttgcattctgttataggggtctctaataaattcccttaagccatctgggcctacaccagcatccggtcagttatcatctggtgacaaagcttcaggtcagtttgcatttttgttttcttgaaaagtgaaagaagcactccacaataggggttattgttctggatcactgagacagttgccataggaaacaggagtcacatttgatgagatcgggagcattcagggtagtatgaccatagacaagagatcatatttgaaagccgtcagctaatgaagaatttctagaaaattagtatgcccttcaatggctatgtagacttctgaaatttttaggttagtttgaaaatgatagagcaataggagaaaaacctccctttaaattcttttcctaaaatggagcaatagtattatctttttcttccttgctggatgatcacagttgagaggaatggatcagaatgctaaacgctatttcttccactaaaaggaattaaaaattctgttggtccacagtgacagttcaaaagcctataaggtagagaaagtgaaacagatttgtaagatctcagagtatataatgagtcgatattatgagattttatggcttcacgtaacttctcctacactcactcaagcataattattcttaatttagttttcacagtaaccatgagtgttttgaccagacactttgtccaagtgtcattgcccaaaccaactttatgcagaatgtgggtcttcctcagtgtccccttttgttggctcctttattatagcctacctaatttggcgtgtattacttcctgctgcaagggtcttgtgctgtctgcaatactgaatttttacaacactgttgattctggcatttgtttcaatcatgctcttaagtgggccttcaagcaaattctgttagaaattgaacttcatacattagcagcctgcgtctcataatcttaatcatacagtcattctgactttctctgtaatcccaaactttctgattggatactggatttatctttagtagctattccttgcagaaggaagccattattgcataagccagagttgta

SEQ ID NO: 42992 - DNA, 2300 bp, Homo sapien
ctctctgtgtatatttaaccgccacccctcccctgtccagtttattttctgtatcatcatgacttcccatttttcactcaccttccaccaagaagtctaagcaatattgatacaaggtactagatagcgccctgcatgtctaggaagaaagtgtaactagatctgtgatcagtcttaaataattcaactgtaagggttttttagcacttttttttttccagtctgttatatttataacccaacagtctccattatcatggcttggaatttcactcagtgttttaacatgcggaatgttaacccaaacacgagccttagcaaaaaagtatcttctcagttgtgcagcctaccactgttaatggcaaataggcacatgagtgaatcacaaaataacagttaactgagggattcagctgacaacttttcatacccaggatttgatctttcctgattcagatggcagaagcttgtgttgtgattacataaacaataagaagtctggatttcatccctctaacaacagattgactttctgaaaggggagaaaaggcttgtcgctaggccaccattactcccgctagcacgcagttcataggccaacactcaccttaagaagtactccctttagagggtgctcccagttagagcacatttcttatgccattctattccattcattcaagaagacactcactgagtgtctattctaatactttagaatgatttcagcagtatcttggaagtttgggaacccgcatcaggaatagctcaggagaggatgttttgtcttcctgcctgacaggcatcaccagcaatcagagtagggtgccctgtgcgtgacctgacccttgtctgtgtggccacctgtgtggtgctgccctctggcagcctgagcccactgggcagcagtgttggcaacgttgcagaaggcatctgaactctagggctgtcctcactgttgacttattattttattagatttatgcagcagcctgcctccaaagaagaaatttggtgtgttttttcattgggaagtaattccagactgcaggaaaaaagcatttaaaaaaaaaaaaacaaacctccactgagcgagagaaagggagactctgatgagagacgtaggagccatcaggctgtaaataaataaaaagcacctggctgggcgccagcatacacgtctctgtctctgctatgacccaattcagggattctccctgagaggaggttttgagcctctgattttataatttgggtttctatgaagctggatgtcttgcctgtgtactgataagtaatatagtctgtcatcttttgtcagctaggtagggattggagtttttgagaatggtttttcactccaaacagctcagaggacctgggaggggtggaaggtgcaccgagtgggctcttggaggtctgctcacacggcttcacagtgacttcacagggtctgcaggagctctcctgagtggaccccagagccctctgctaggaatggaggggagtggtttggtttgagggcttttgttttgttgttttcattactattttcttgatagaagggcgggggggagggggggtgttgccctttactctagttcttgcatttgaattgctaacatcctcttttcccttttttcttcctattttgatttggtttctcattgctcaatgtcttctcttcctgtctcctcctttctttctccctatttctgtttgtttgcctctgttttgctcaggtggcttcggtgctgctccagtgtttggcagccctcctacttttgggggatcccctgggtttggaggggtgccagcattcggttcagccccagcctttacaagccctctgggctcgacgggaggcaaagtgttcggagagggcactgcagctgccagcgcaggaggattcgggtaagccccctggggagggcccttgggaacccacacgccagccaaaaagcactaggggcctgtactcttgctctgaaaagaaatttgaccatgaggtgaaggcccctcccttgaaatttgtgaacaactccctcaaggattcctgtacctctccagggtaagactcatttcgttcaagccaggctttgttgaattcatggtggacctcagctgtgttgctgttccctggtatgagaaatgctggtcatcagagcccctgttctcctgctggggctaaaggaaggcaccagccctgccttaactactgctttgtagccaagaggtgccccggtgtggagcttctgttaggaagtcctcaatgaatggttttcaccagattctttcct

SEQ ID NO: 42993 - DNA, 2300 bp, Homo sapien
cagcactttgggaggccgaggcgggcagtcacctgaggtcaggggtttgagaccagcctggccaacatggtgaaactccgtctctactaaaaaaatataaaaattaggccgggcatggtggctcacgcctgtaatcccagcactgtgagaggctgaggtgggtgggttacctgaggtcaggagttcgagaccaacctgaataacacggtgaaaccccatctctactaaataattagtccggcatggtggcacatgcctgtaatcccagctacttgggaagctgaggcaggagaatcgcttgaacccaggaggcagaggttgcagtgagctgagatcatgccattgcactccggcctggccaggaagagtgaaactctgtctcaaaaaaaaggagaaaggtggttaagatattgcttaactttagacttttaagttaaaaataatcggaaaatttcaaggacaactactaagagaacagaattagaatgtttaaatccccaataagtaccaagaagaaacagaagaaaaataccaataaaatctgtaatcaaaagaatggtggacaaaaagcactaaaaaactcaatagaaatttaatagagaagagaaacaagttcatataaaaataattcggctggggacggtggctcacgcctgtaatcccagacacttcgggaggccaaggcaggcagatcacctgaggtcaggagtttgagaccagcctggccaacatggtgaaaccccgtctctactaaaagtacaaaattagctgggcgtggtggtgggtgcctgtggtcctacctactcaggaggctgaggcagaagaatcacttgaacctgggaggccgaggctgcagtgagcagagatcccgccactgcactccagcctgagtgacagagtgagactctgtctcaaaaaaaaaaaaaaaggtcagaaaaggcttcaggtcaaattagggctttgggtcaaatcagggctacctggtctgggagaggcacacttctaactgctgatgccaccctcaaagggtctccagaagcttccactgactgctgttggctgcaccaggcagtgagtatcagtacatttaatcatcacaaaaaccgggcaggcagatgttggcggattgtctgtgggctgctgaagagctggtagagctcagcgcgtctgtgactggaccacagtgcgagtagctggggctgacagtggaccctgggctgctgcacccgctgcaacccccaggtggagggatccacgcagcctggtgacgatttggccctggccctgagccatgccccgcgtgacgcagtgctgtctgccagcctgggaggctcctcacctgtctttgcctgagccagggcctgggagtttcaggactgggaaaggaaagaaaaccccaaggctggggtcaggaagaggagggctattttgctgctcagtcctgctcccccaaaccagaccttcagctctttgcaaacgaaagagggggcaaggccaaagcggggttccttatgcaagtttgcttcctgccctgaaaaaccaaaaaaacggaaaacttttccaagcaagtgtaagcactgtgtgaggacagagtgggcgtttccttctgaaataggagactaggcccccagtgggcaaagagaccctgacccgcttctccatctgtgcgggggaatgaatgagcaggctcaccctgttgtcatcctgcctgctgctgtggggcccccctagatcttaggaattgctgggtacttccggacagtgaggttgtctgagctgcctgcaggttccctgagtctgggtactcaggggctgggcaggagatgcccattaagcaggtgttactctaatgagtgagcttttcaatgagatgaacaggaaaattagcaaaatcatgttcctaatcattcctcctgcggcggccccaattttgctaactgttaacattatatgatgcataagtaggggaatgcatttttaaaattatggtaaagcctatgtaacattttataaaattgaccattttattttattattaatttttttttttttaagacagggtctggctctgtcacccaggctggagtgcaatggtatgatctcggctcactgcaacctctgcctcccaggttcaagcgattctcctgcctcagcctcccgagtagctgggattacaggtgcctgccactacgcccagctaatttttgtatttttagtagagacgggatttcagcatgttggccagcctggtctcgaactcctgacctcaagtgatctaccgtgcccagccaaaatagacc

SEQ ID NO: 42994 - DNA, 2300 bp, Homo sapien
aagctgggccaggtgctgtgatacatcccagatatgtggtgatgggcgaggcaggcctggccctgccctcacggcctcgtggtctgtctagggtagagactggcagcagatgagtgcatcagtatttaatcaccctcatgaacaggccacggggcagtgggatgagatccagtggcgttgaatagcaggaggcacctggcccatgtggagggtccaggcaggcttctttggggtggtggctgcagagctgagtgatgagcagctatgagagaggagaggaggaggaagtgggggggaggaggaggaaagaggagtggaggaggaggaggatgaggatgaggacgaggatgacgctgctcccggtagaaggccctgagagggaggagcatggcccactgcagcagctgagaatggctggggccctggagcccagggagggcgtgtgtgtacatgcacgtgtgtgtgcttgtgctgtgcacgtgtgcacacacgcagggctctaggcttcaattgcgtcggttttaagggcataggggagtcatggccggtttaacagggttggagccatgccatcggatttgtgtttttagaagatccttcgggctgcttctgggaggggaacagattgcaggaggctgggagaccagggaggggtaaggccatggtggaggcagaggaggagaaggggcacagcctggaggggcgagggagagtccaggatggcgctgtgtcccggagacacaggcctccccgttgccagccaggccagtggctctgtccacccatgtcagggcttcgtgagacatggaaagcaggtgccctgcagatgtttgttgggtgggtgatgatgggactcaggacagggacgctgcgggaggctgaggaagccacttcagcccgggaagcattctgacgcctgggttccagcctggacttgcctgctgtcctttggggtccctaggaggatgggagtgtgacaggtggctctgcctgcctctgcccacagccatggaggtgaacggcctgctgggctcctagactggacagctgtccggggcctgcactcagaagggccctgagcgtggttcaaggctctgccgtctcagcattgaaaatctcaggttgtttacagccaggtgcggtggctcacgcctgtaatcccagcactttgggaggccgaggcgggcagtcacctgaggtcaggggtttgagaccagcctggccaacatggtgaaactccgtctctactaaaaaaatataaaaattaggccgggcatggtggctcacgcctgtaatcccagcactgtgagaggctgaggtgggtgggttacctgaggtcaggagttcgagaccaacctgaataacacggtgaaaccccatctctactaaataattagtccggcatggtggcacatgcctgtaatcccagctacttgggaagctgaggcaggagaatcgcttgaacccaggaggcagaggttgcagtgagctgagatcatgccattgcactccggcctggccaggaagagtgaaactctgtctcaaaaaaaaggagaaaggtggttaagatattgcttaactttagacttttaagttaaaaataatcggaaaatttcaaggacaactactaagagaacagaattagaatgtttaaatccccaataagtaccaagaagaaacagaagaaaaataccaataaaatctgtaatcaaaagaatggtggacaaaaagcactaaaaaactcaatagaaatttaatagagaagagaaacaagttcatataaaaataattcggctggggacggtggctcacgcctgtaatcccagacacttcgggaggccaaggcaggcagatcacctgaggtcaggagtttgagaccagcctggccaacatggtgaaaccccgtctctactaaaagtacaaaattagctgggcgtggtggtgggtgcctgtggtcctacctactcaggaggctgaggcagaagaatcacttgaacctgggaggccgaggctgcagtgagcagagatcccgccactgcactccagcctgagtgacagagtgagactctgtctcaaaaaaaaaaaaaaaggtcagaaaaggcttcaggtcaaattagggctttgggtcaaatcagggctacctggtctgggagaggcacacttctaactgctgatgccaccctcaaagggtctccagaagcttccactgactgctgttggctgcaccaggcagtgagtatcagtacatttaatcatcacaaaaaccgggcaggcagatgttggcggattgtctgtgggct

SEQ ID NO: 42995 - DNA, 2300 bp, Homo sapien
caagtttttaagccttgtggcatgaaaaggaaagggaacagtggttggggtgaccagaaaccccaaccagcccagaattgttcctctgctctgcctggcccagggtcaggtaattctgtctgtgctggtggggggtgtcctgtgcatggtagggggctgggcagcatccctggcctctacccactccatgccaggagcacatccccgcaagctgtgacagtcaataatgtccccagggagggcctgatgtccccaggaggggctatgaaatcacacctagtggagaaccactggacttgacccagacaattcacatccttaaaatgaaacccaggccctgtgctttagtggcccggggaagggacagctaggtagcgagagctaggttagggctttcattctttacaaatgggcttgtatccaaaatgttaattccaaatacttaaccaaaatccataatacccccaaacgttatccctgcttaaaattaatccctaagccaagaggataactttttagaatgacattctgggtttgaaatatttgaaatggaacaattaaaaaaaaaaaccaccatctcaataataccctgacttttgcagacagagctggaaaagagtgagtttctctgtgccagcatgagaggattctatatggctttgggtccaacccacattgctttaaaagccaaccccccccatccaaattgttggagacacctgcctccacagcccggcccccgcaattcctcaactgccacctgtcagctggcacagagtcttctaagtgacaagtcacaatttctcgcctgtgtgggagaagttccacgttgtccctggtttgcccttctctggagccccctgggaacctggcccacagccacgcccatggccaaggccaaggtcaggggcagtttatggctcaggattctgccaaagggcagactgggcggggaggagggggagcagctcagatagaaagggtttctttgggtggatggggacactaccccatgcccatgtatggcagggtgtgaactccagctcccaacccttgggccagcctcttaacctttccaagcctcactgttcccatctatgacatgggaatatgagtcttctctcataggcttgtgatgataagaccttagcccagcacctcacgaataccaggcactcaatatatggtagccgtcaataccatagctatgaatcgtaatactaataatgtcttatgcattatgcgatgcctgtcggagtcaccggaaaggtggctgcctcgttgctgttgttacattatcccttctcctgggtttcagatacctgtctatagcatgagtgctgtcactgtgttatgaacggccagtggtcagcctggactacacagtgaaaccttgtccctacaaaaaatacaaaaaaattagccaggcatggtggcatgtgcctgtagtcccagttacttgggaggctgaggtgggaggatcacctgagtctggggaggtcaaggctgcaagtgagctgtgattgcaccactgcactccagctggggcaacagagtgagaccacatctcaaaaaaaaaaaaaaaaaaaaaagactggtgggaaaggacagggcaggggtggagggaccgctgggtgccaccctgtcctgctgggatgacgctgagaatggctgcctcgggcgccttcccacctgccgtctcccagcgtcctccccaggagctcaggaaggcctcattttatgatgtggtcacagcttctaagacctgaagctggttgccagagcagtgttgctcagcgccagcagatctggggacaggccatggaggaatgtccctgttgaccacgtggcctcttcctgaagccggggtctgagcgtcagttgtgcaaagaacaattgaggaggaggcttcctctctgtaaccggaaggcggcctcccccatctgctgggccctggcggaggcaagggcggggtgggtgggagagggaagtccttgtttcaaggctttggggtgggaggaagtaggggggatgacccagcctaaagagagctcccccaggaccagccctggccaagggattgctgcagccctcatccaccttccaagcactggaaacaaacattggagaccaagtgaggcgtcactcaacagccgtagtaatcagggaaatgacaagttacatactgatatcctttgttttgctgattggagttgggtgcattgaaaaagatcagtcgtgcccagtgtttgggggaaggaagcgtcttcacctgttgtttgtgggaggacagttgaggc

SEQ ID NO: 42996 - DNA, 2300 bp, Homo sapien
ggggaaggaccttgggcaaatcccctagcctctcagctctgggtgcctgctctgtgaagtgcacatcatcagtctccctccacagggaggccgatggtggctgaaatgatgctctgtacagcgctcatcacacagccggggtccaacaggcagccagcagacctgctcgaggggacccacctctccccaaactgctctcccctccccgcgaccttcccagccttggagcctacaaagcccccgcgctgtctccaccaagccactgtctccctgcggtcaggaaccccagggcaagggagcccttctgcgggtgctccgaaccccagaaagcctctggtccatagagttcaaagggcactgggagcagcccacctggccccgagacagcagcggaactacactacccagaattcccggggctggccaaaaaggaaatgtcgtttgttcaaggagaggctcagctccccgagcagctgcagagacagggagcgagggggagcgagggattaccagggggagggcgggctgtgtgcggggagcgagggtggagagccaggcgggcggggaggaggaggcggcgcccgcccgccgccgccgccgccgcctgcggacctgcatccccgcggggccggcgagcgggcggcggtccctgcgtgcgccggctgcgctcggccggcggcggcggcgagcggacgcgggggccgggccggcgcaggggccgagtttctgcaaagtttgacccggttgcctttccgatgctgcagcagagcgaggcagcgcggggcgcgccaggcggcagcggcgcggcggcggggctgagcggcgacagcgcgctcacaatgatcataaaataaaggaggcgcgcggggtgggggcgagagagccccgagcctcagccctccgcccccggccgcccccccgaagccccaagccgggaggagggtgggggccgggggcgcccacgccggccccagactccagtagagccaagggacagtgcccggggaagggggtgggggcgccccaagaacgtgcccgcggccgggtcaggggcgtccggagagcggctgcccgggccagcggagtggcccccggggcaggtgagtcggcggcgccgcccgagtgggggcgtgcgcgccaaagttccccggcagcggcgagcgcgcccgacgcgtggggacccggggctgctcgcggctggagaggggcgacagaggcgcttgacgcggcggagcgggggcactatgccctccgagggccgagggaccccagccgggaaaggggtgcccgccggatccgacggcactggtgggtggccctgcgcccagggagccggagggaccggggtggggaaggggcacctggcgctggcggcgcggcggtggggacagagcagggcaagtgctcgccgccccctgcagcggcagccgctcgccccccaccccgcccgtccgggacggtatcagcggagatgtcacgggcggctattattcgctggtgcgcgcggtcgtgcggccgccactgacggggcgggcgcggggggcgggggccaccgcctccggggagaccgcccagagctgcgccgtcagctccgcagcccgcgcccagcgcacacgcgtcgccgcccccgcgcgccccccgcagcaaagttcggcttaactttgaggctggccttgacgcgctgtcccttccacctcccaccaggtcctcggcggccgcggcgaagcaggcggcggcggccggagcgcagccccgggaccctgcacggcggccggcagcgacagcggcgaagggacgcggcgcccctgcgtggggacgtccggcccgcgcccgcgagtgggcgccgacggggacccgcgccgcgctcccccgtcaccggcgagcggccggagccctgagctcgcctcctggaagccgcgggtcggcgctcgccccgagggcgccgggacctcggccgggtgaacacaaactgctctgcaattgattcgaccgcgccgggcgggtgcgggtgcggggcccggagggagcgcgtgcggaaggccggagggcaggaagtcaggcttctgccgcgagggtggcgcggccgcgcggggacagagccttccttatttatgagtctgccggcgctcgcctgcttcctccgaagacttcagggagagtctgcgagctgccgtccccgcgtgtgaggcacagaagggctggatgtcagaaccgcataattattcattaaactacaaactttttttaacccaaagaatatcggtgatttttgtccactgcgaggagaagaagagagagcc

SEQ ID NO: 42997 - DNA, 2300 bp, Homo sapien
cctcctgaggccacccagggagaatggggtgagtgcttggtggggagatgagcagatcagttccctgtggtccagggatctgagtccagcggccctcgtgccaccccccatagggaccacttaggagccggaccccttctcttttcagcttcctggctcgaggccttcacccactcagcctcagcttccacgtctgtaaatggggatatcacagctgcgttacaggactgtcattagactttgtcgataagctgaacacatagagagctcagcacacaaagagcttatacacgctcaatatccgtgcctggcgtgcacacttccatgtgcgccaggttccagccgtctagtgtccgggatgaagcagcacatgtcatcattgctgcacccaagatggcaggacgtctcgcggccacgacatcccctctatggccgcacagtctgagtggagcacgctggagaggaagagtggggaatgaggcaggtctagcctgctccagcccagctggacccagccagggcgtctgcagggaaccccagactgaaggctcctggactctggcctcatccctgccaggaaaggggtggaggccagaccacagggttgggcccttctgaagcgggcactcaaaaggaagagacggctgtgcctcgtttgtcaaatgaaatcaattactaacccacagggctgaaattgattcctaactcactctgcagcagggactcagctcagcgtttcacaaacactgtctcacccggactcacgagagccctaagaggtggacactgtcattcccatgcgacaggtggaaacaccaaggcccagggaggccaagtgagttgctcaaggtctcccagctggttgatggcggggcagagccccgtctgtctgactccagagcctgggtgcccatcccccatggccagggaacacccactccctcccagggcagcttcctgttcttgggaggctctaggtgggcctgaggcaccgtgggctggctccatggttggaagagaagttgcagccccctgccttcatctgggcgagcagacaggccttggccactgagaatcaggagacggaggagctcacttctgactcttctggtcagcttaaattggcagcttcccccatcgagcccaggcccaatcagccctaaaagggctgtggagacttcgggttcccacaggtggtccagatgggagcagggatacctccctcacatccggaatcctcagctgggccctctgggtctgcgttctgggtttgcagcctctcgtccccttgggccccatgcagccacacgggcctcctgggcctcctgcaaggcaggctgtccccgaatgggactccccctttgttcttccttcctgggggcagccgtccctgattcccagaccagacccagagcccccagagccccgcttctaggatcctgccacacatttgcacacctgtgaccacttacacgtgtccttctttccatccccactgagctgtgagcttttcgcagtgcgcccagcactgacacactgccaggcgctcggaaactatttacgggttgcctgaagctgctgtcacactcccgtcctttgcgaagttccaggtagtggaggcaacctccaagaggcaatccattaccaaccaactcatgacccctccctccggtggaaatcagagctcacggagtgtcgtttgattggactgtgatgcactgaagctgaattcaagactgatttaaaaaaagacctgccagctgaatgaatgctgtcacagagggaggagctggacctggccccagggacccaagatgatgctgtcagtgacgtcgttcactccatctggtgcccaaagaggcctcggcccaagcaacaccgtccagtttacaggaccaggtccaagctgcccggcagctggggcaggcaggcctgacttgcaggggtctggacggctcagagggaagctggtaaaagcagggtaagcccaggtcccacctctgccccttcagaggccaaggccactgcagagtccagagcagccggaggactacatttcccagagtcccccaagcccagggatgagccattggccgatttaaatagcccaggcccgaggcagccaggccgcagctgtggactcctcacctcccggaggctctgctggtgcaggccccgcattggagggctcgattggctgcccggctggcactgacgtccccttggagctgggtggcagaggagataaacagccatgtgcaactctccacactatatttaacagctgcggcggagaaggc

SEQ ID NO: 42998 - DNA, 2300 bp, Homo sapien
acccgggctggattgcagtggccggatctcagctcactgcaacctccgcctccccggttcaagtgattctcctgcctcagccttctgagtaactgggattacagccgcacaccaccatgcctgggtaattttgtatttttagtagagacggggtttcaccatgttggtcaggctgatctcgaactcctgacctcaagtgatccactcacctaggcctcccaaagtgctggaattataggcatgagccacgtcacccaggctcccatgtattttcttctaaaaattttatagttttttgcctcttaagttttggtgttcaatccattttgagtaaatttctgtatgtggtgtaagacaaggatccaacttcattcttccgcatgtggataccctgtttacctaacaccacttattgaagaggcttctttctcccattaaatggtcttggcaactttgttgaaaagcacttgaccatagaggtatgggcttatttctgggttctcatttttattccattgtctatgtgtctagccttatgtcactatcacctgctttgattactgtagctttgtagtacgttttgaaatctggaagtctaaatcatccacctttattattctttttcaagatcatttttggctcttctaggttcctttaaattgcatatgaatttaggatggattccatatgaatttaggatagatttagcgatctgcccgcctcagcctctcaaagtgctgggcttataggcatgagccactgtgcctggccaggttgactctactttttaatatgttcaaaatcgacataatggagagttagtaagaagaaagttggtcaggtgcggtggctcacacctataatcctaacactttgggaggctgaggtggatagatcacttgaggccaggcattcgagaatagcctggccaacatggtgacaccccatctctactaaaaatacagaaattacctgtagtcccagctacctgggaggctgaggcaggagaatcacttgaacctgggaggcggaggttgcagcgagccaagatcgtgccattgcactccgtctcaaaaacaaacaaacaaaaccaggctgggggtggtggctcatgcctgttatcccagaactttgggaggctgagacaggtggatcacgaggtcaggagttcaagatcaacctggccaacatggtgaaaccccatctctactaaaaatacaaaaattagctgggcgtggtggtgggcgcctgtaatcccagctactcgggaggctgaggcaggagaattgcttgaacttgggaggcagaggctgcagtgagcgaagatcgcgccactgcactccagcctggatgactccatctcaaaaaaaaaggccaagtgtggtggctcacacctgtaatcccggcactttgggaggccgaggtgggtggatcacctgaagtcaggagtttgagaccagcctgaccaacatagtgaaacctcatctctactaaaaatacaaaattagctgggtgtggtggcacatgcctgtagttccagctacttgggaggctgaggcaggagaatgacttgaacctgggaggtggaagttgcagtgagcaaaagtcacaccattgcactccagcctgggcaataagagagaaactccatctcaaaaaaaaaaaaaaaaaaaaaaaagaagagctcatgtcatccgcaaatagagacagttttacttccttcccaatgtggatgccttttacttccctttcttgcctaattgttctggcgagaacgtccagtgcactgctgatagaagtgaccagagcaggcatccttgggttgtttctgcagaggctgaacttttaaccgcatgatggactttttctgctgagtcgtcctgattcttggtttgtggggaaaagcaagagagatcagattgttactgtgtctgtgtagaaagaagtagacataggagactccattttgttatgtactaagaaaaattcttctgccttgagattctgtgaccttacccccaaccccgtgctctctgaaacatgtgctgtgtcaactcagagttgaatggattaagggcggtgcaagatgtgctttgttaaacagatgcttgaaggcagcatgctccttaagagtcatcaccactccctaatctcaagtacccagggacacaaaaactgcggaaggccgcagggacctctgcctaggaaagccaggtattgtccaaggtttctccccatgtgatagtctgaaatatggcctcgtgggaagggaaagacctgaccgtcccccagcccgacac

SEQ ID NO: 42999 - DNA, 2300 bp, Homo sapien
ttttgagatggagtctcactctgtcacccaggctggagtgcagtggcatgatctcggctcagtgcaacctccgccacccgggtttgagcaattcttctgcctcagcctcccaagtagctgggattacaggcgactgccaccatgcctggctaatttttgtatttttagtagagatggggtttcaccatattggtcaggctggtcttgaactcctgaccgcatgatccacctgcctcgacctaccaaagtggtgggattacaggtgttagccactgcgccagccttacagatgaagaacctgaggctcagtttatttatttaatttattttttatttgtttatttgccttctatcatttttattagttgctgggttttgagcactgggccaattctatggccttcctgaagatggtcaaggaacaaaatcgaaaacaaaaattagggttacatcctccctgttttgtagagatagcgaaatattgaagacattggcaggggaataatgcagatttgatgatgtaaaacagagtggccggcactgtaatcccaacactttgggaggccaaggtaggtggatcactttagcgcaggagttccagaccaacttggccaacatggtgaaatcccatctctaccaaaaatacaaaaattagctgggcatggtggcagatgtctgtaatcccagctactcaggaggctggggcaggagaatcgcttgaatctaggagttggaggttgcagtgagcagagattgcggattgtgccactgcactccagcctgggggacagagcgagactgtctcaaaaaaaaaaaaaaagaaaaaagaaaaaaaggataacactgaaaatgaccatggataaaatgtaggaaaattcagagaattataaataaggctataaaagtatccagaattctactccccaaaaactaagctttgttcaccagcctcagttctggagttaggctgaagtgggttaattttccttctgggtccagcagtgtggcctggggcacattctctcaaagcctcctttgtctcacctgtgaattagaacaataatatctgcccctgggttaggattaagtgagacaaaccacgtgctttagcatagggcatggcccgcagctggtgcttagagcaaccgtgactggaagagggtgggatgatttgggtgccaggccctaacattttttttttgtatttgctttttgaaattgcttttatagttggttaggtgtctaaaaaagtaagaaccctcctccgctctcccaacctcaaaccacggaggtaaccaagacaggagtgcagtctcccggaccttttgttttgcaatcacacaaacacacaacactcaagaggaggggcttattagttttcattttgtaaaaatgggacaaagtacccatattgtgcaacaaccttgcttttgaaatgaaaaaagtattatttctgcttcctttccgttcatataccgtatacatattttaacaaaatccgggcttagtctgttctgaggcgctgcagttttgaagggggagggggcggagatccgggctcgctcccccgtcactgccccctccatcccttccccctctttccgggcgcccttcccccgggcccaggccgggcccatgcccttcccaggccccttctcttggctcctggcccctcctccgggtctcctccccgatccccgctctgccccgttctctcccgcctctcccgccgtccccgggcccctccccactcccagccccctcccagccccctcccgccgctccccgcccctcccccctggccccagccctcgcccggcccccgggccgatcccaaggccgccgctcccgggaggcgcggcagggggcgctgcgcgggcccaggttgcgggcggcggcgggaggaggaggacgaggaggcgggggcggcggcaggcggggggcggggagccgagcgcgagggagcgagcggcgagacaggcgccgaggctccaccgcgcagcgacgagcgagcccgggaggagggagggagcgagcgagcgagcagcccgcgccgccgcctcgcaatccgccgccatcccgccgcccccgtgcccgaccgccgcccgactgccatcgcccggcccggccgcgcccgcggaaccagaccaggtgggtcggggccggggccggggccggggcgtgggggcggcggcgctaagatggaggcggcgcggcccggccgggctttgtctcccgcggccgccgccgggggcccgggggccctgcggccctgcccgacctttgtccgcgagcgcggc

SEQ ID NO: 43000 - DNA, 2300 bp, Homo sapien
gtggccagggcctgggtggaaggggccatcgtctcatcatcttcctcaattcctgggacagtagaagctagagagtgtggtcattccagtctgtgtgtctccacctctctgcttttttatcaaggattcagaacaaggctctggacagagcaaggagcacagaccaggacccatcggcaacgagcgttctctgaaaaacagaaagggctcggagggggccgagcggctgcaaggggctgtcgtcccgcctgttaacggggtggagattcacgtggactccgtgctgcctgtgccacccattgaatttggagtcagtccaaaagtgaggctttgatttgttttcttgcttgctttttttactttttattttggtacttggagaggctgggggctcagatgggattgtctcctagaaggaatagaaggatgggagccaagcagtcttccagcggctagagtgttggtgtggagtcctgcacatggccagtgctctgttgagttgctttaaagattgcttcactgacaccagacaggccagtgatcttccctgtttctgtcaggccacccaagggacagggagaaagaagtgaggctggcgtcctgtctcctgtgccgtggggaaaatctggccatctcgctcatatgtggctccagtgaatgctgctcagtggagtttttgagtcggggaaactgcatcacgttaatgtatgcctctggggaatgtagggccaggaggatctcagtgggctgtgtggccttttttattttttcaggactccgatttcagcttgccacctggttctgcctctggtcctactgggagtccagttgttaaacttcaggatgccttggccagtaatgtaagtccacacttccacttttggctccactcactgcttggggctggcaggccctgggtgaaggagacagcacatgtatttcaggctgacctgggctggcacgtgactcagttgctagcagctccatgtccttaaaaggtgcttaaatgttcctgcccaggttttgtgaccttccagtggggatcatacagttcctaagggctggtttatttggctctctttggttccattgtctcctctgtgccaggtgcgagcccagactcaggctgccttttctgtggccaggggtaaggggcacagattgagtaggagagccctcctcaggaggccccatctcaccatccaagggtccctgccgcctgcaatctaactgttgtgatccagaagacctgctggcgctctaccatgggctcaggagctggcagttgcatctgttgtggccactcggggctgcagctgaggctgtcgcagtgacatctggttcactgctctgtcctcaccacctgcaggggtgggtgctagtgcatatgctgaatgaacgagtatcatttgggcagcgtttcccagaggattccaaggaatgtgagtgctgtacaatattcataggtgttgaatgaaaacaatgttttggaagtgctgggctctacgaggttctttactcgagagtctgcggtctctgtcacatgcagatggacaccggggatctgcaggaagcgggggcactgttgcatttccagcctctgttaccagagccctctttttcagtttgctgaggggcacagccttccctgtctggcccagggcatctccaggccaggtggcaggtgccttctgaaccagatgtttgtgtgcgggctgccagtccatatttatactgccgggacatggctctccctgtctggagggcactatggagtgtggatatgggggtggctctctgcagacttgtgtggaggaaactgatggaggcagccatctccaggagatcagtcatggtcctggctgccatcagtttcatctgggtggtcttgggtacatgtggccaatactgaagatgcatttggacaattcatagacacggagctgtaggtgcttttgggaaaagccatggatgggtttgggcaagtcatagatacatttggacgagccttgagtgtgttcaggagagccatggatgggtttgggcaaagccatctctgcacctgtttgtgttccatggtttccttttcctcctctccaggcagggttaacacagagtatccccatcctgcggcgggaccatcacatccagagggccatcggtctctccccaatgtccttccccaccgccgaccttactctgaaggtaacaccagccctgagctgggtgagggcccacccagtaccttagcttacaaagaggcagaagggaggagtccccgaacccctaaagcttagatt

SEQ ID NO: 43001 - DNA, 2300 bp, Homo sapien
gtagggtgtggaatgggttaagagtcctctttgtgtagttgttgatgcttctagactcctcttcttccttcctccctgaaacgccagctttgaagcccacaccatagactgtgcctgacaagcccttcactctgctatggtgccatcaccacatccagtgtctgctgagaaatcttcctctccgtcaacctgtgggcagtatttggcacctttgaaggtcaccctccttgtctggtctggcttgcagtctgtctccactctcctgttccagttcctagtggttttgatgtctgcagagatgaccccgggtctctgtgccatggaccctgtccatgcagtttgtgccctcctcgccactggtgcccttgttcacatgggcccctgctctgtgcactcctgtctaggcttggctgctcccagtagctgtggctctcgcataatctcaactctcagtgtccctctcagttgtcacctctggctttttcaattcactccctctagtgacccaactccaaaattcttttttttttttttttttgagatggagtttcgctctgttgcccaggctggagtgcagtggcgcaatctcggctcactgcaacctctctgtctcctgggttcaagcaattatcgtgcctcagcctcccgagtagctgggattacaggcgcccaccacccaccggctaatttttgtatttttagtagagatgggggtttcaccatgtcaggctgatctcgaactgctgacctcagtgagccacccaccttggcctcccaaagtgctgggattacaggtgttagccaccacacccagtctctgccacccatgtttttgtcatcctcccccttggcctggcttcttcctccccatcagcagatctgccgagccacatggcctttgcatttcatccaagctgtggctcccagtcaacccccaccctcctagcagcttttcagacttgcatcttgcccctcgctgcctcccacccatgacctccctttctgtgtcacccaggaaacaggagcagtgacagtctccaagcccctgtggccacatccctgcctaggtgctgcctgtgcccctggggggccctgccccagcacatctccctctctttcatgcatcagatatcccttcccgtcagtacacagacgagctgcagtgctgaccccgtaatcccgccccccacacccctcgaaccactttcttcacccagtttccaggccgtcgctcctggctttcctgctgcctcaggcctcctcctcagtctcctttgctgtcccctctccttcccagtctgtaatggtcagcatgcccgtgggccctgctttgggtgtgtttcaagagtcatggctctaaattccttcatcttctcctcactcccaaatggacatctttagctcagatctgtccctggaattgaatctcaaatccaatggactttccagcatgtctgctatggtgtcttatggcatctcaagactcatcatattcaaaactcgattttcctcccggtccttctgcttgtccagtccacatcctccttggctccctgctccccctcacctcacccccttacccttcagcaggcctgtcagctctggctttaaaaggattcagaatccagctgtgtctcatcccctccacacccctgcatgctgtccagctcctgtagggactcctacctggcctccctgcaagtcagatcataccccaagtcagcactctataaatggcagcatcttcccatcattttcatcctgcaccattttggtgctccaaggaggagcatggtgttttgcggctctggccaccacaagtctcagtgatgtaattccaatagatccttctgaccctccactgtggactcaatagcagggagatgaagaggacagtgactgagagaccaaaagtggcccagcccccctaccccatcctgttcccctgtccttacagtctctgggcccacatccccacctcgcatatcttgttctagttagttaggccctgcagctaccctgttctcctgtcagcatgcttcaaaggacccccacagtctggaatccagcccagtcttgtttttaccaccacttgatgcaaaacagtaagagtcttgaacgtgtgtgctgtacaaaggaatgcagagatatacgtccgatgcagctttcatcttttgggacttggcttcgccattacttctgactttcctcactcgtcctctccttgcccaccccgccccgtgtgcacccataaatctggtgtgcacccacagatcctatgccgctctgcatcccgagtg

SEQ ID NO: 43002 - DNA, 2300 bp, Homo sapien
gagatgggggtttcaccatgtcaggctgatctcgaactgctgacctcagtgagccacccaccttggcctcccaaagtgctgggattacaggtgttagccaccacacccagtctctgccacccatgtttttgtcatcctcccccttggcctggcttcttcctccccatcagcagatctgccgagccacatggcctttgcatttcatccaagctgtggctcccagtcaacccccaccctcctagcagcttttcagacttgcatcttgcccctcgctgcctcccacccatgacctccctttctgtgtcacccaggaaacaggagcagtgacagtctccaagcccctgtggccacatccctgcctaggtgctgcctgtgcccctggggggccctgccccagcacatctccctctctttcatgcatcagatatcccttcccgtcagtacacagacgagctgcagtgctgaccccgtaatcccgccccccacacccctcgaaccactttcttcacccagtttccaggccgtcgctcctggctttcctgctgcctcaggcctcctcctcagtctcctttgctgtcccctctccttcccagtctgtaatggtcagcatgcccgtgggccctgctttgggtgtgtttcaagagtcatggctctaaattccttcatcttctcctcactcccaaatggacatctttagctcagatctgtccctggaattgaatctcaaatccaatggactttccagcatgtctgctatggtgtcttatggcatctcaagactcatcatattcaaaactcgattttcctcccggtccttctgcttgtccagtccacatcctccttggctccctgctccccctcacctcacccccttacccttcagcaggcctgtcagctctggctttaaaaggattcagaatccagctgtgtctcatcccctccacacccctgcatgctgtccagctcctgtagggactcctacctggcctccctgcaagtcagatcataccccaagtcagcactctataaatggcagcatcttcccatcattttcatcctgcaccattttggtgctccaaggaggagcatggtgttttgcggctctggccaccacaagtctcagtgatgtaattccaatagatccttctgaccctccactgtggactcaatagcagggagatgaagaggacagtgactgagagaccaaaagtggcccagcccccctaccccatcctgttcccctgtccttacagtctctgggcccacatccccacctcgcatatcttgttctagttagttaggccctgcagctaccctgttctcctgtcagcatgcttcaaaggacccccacagtctggaatccagcccagtcttgtttttaccaccacttgatgcaaaacagtaagagtcttgaacgtgtgtgctgtacaaaggaatgcagagatatacgtccgatgcagctttcatcttttgggacttggcttcgccattacttctgactttcctcactcgtcctctccttgcccaccccgccccgtgtgcacccataaatctggtgtgcacccacagatcctatgccgctctgcatcccgagtgtcctgcagctgtgtccagtgtgtgacacactatcctggcagtgtgcaggcccatgttggacagggccctgccgcttccttggcaccttgtatgctttcagtaagcacttgctggacaaaggcagaaagggctgaagatagacgcagcccttagcagagatgtggatgagacacacttaacgctgttagttcccatgcctgcagccagcttagtcttgcccgttttctcaccacctactctattccagcaagaagacgtgcctctgccatcgaaggtgtgaaatcctgggcgatctctcctgtgctgcagtagaaattagagcatgtcctgctttatgcaggctttgctttagttcttctgaagtgtatgaatctgaagtgcatgtgcggtcgctctttggtgcgtttggggtttctccatagcatcattccccctcctgactgtcattgtcgcccagcagctgaccatgccactgcctcggtacggctccgggcagcagccactgatcctgccccagtctattcagctgccacctgggcagagcctctccgttggggccccccgaaggattcctccgcccgggtcccagccgccagtcctgaacaccagcagagaggtaaggggaccccatctgcctctgaccctagggagggggccttgtgtcaccaactttttctagcaagctaagtacccctgtgtggtag

SEQ ID NO: 43003 - DNA, 2300 bp, Homo sapien
ggggtctcgctctgtcgcccaggctggagtacagtggcaggaccacggcttgctgcagcctcgacctctctgcccgaagcgatcctccctcctcggcctccagagcagctgagaccacaggcacgtgcccccacgcccgcgggcgctcctagtttccttgccgaaaaacatcgatgccacgatcctgcttgcacatacatctagcggtgaagtggctgagggtaagggcatttaaaacggacctagggccgggggcggtggctcacgcctgtaaccccagcactttgggtggccgaggtgggaggatccgtgagcccgcttgagtccaggagagcctgggcaacacagcgagaccccgtctctacaaaaaaatacaaaaattagcggggccccttggcgtctgcctgcagtcccagctacaagggaggctgaggcaggagatcacttggggcagagaggtcgaggctgcagtgagccttggtctcaccactgcactccagcctggactacaaagtgagaccgtctcaaaacaaaaaacaaaaccaaaaaaacctggacatcagtgggggctgcatgaccatcagaggctccagtgggggcatctcccctaaactccgtggcagaagactggaggcttcttcctccattcccagggctcctcctcatccatcagcctctccagccccctctgctgagggtcaagagccttcccaaaggcctgctttggagcagacatggtacttttggttgggtcaatgcaccccttcccatgttttccctgaacagtcggcacccagagcagggtaactgacagcaacgcaaccaggctgatggatcactcttctcagcctcgctccttcttgatctcctggtctatttgtatgttaatctatacagaccaaaagggcacactgcaggtttaataaccttcattatggttcttggctgcctgcaagactttttttccatgttgggcaacatagcattagatgacaccagttagaatttcgtggttacttctttatggcttacccttgaggggttatgtgactcacccaagatcccacagagaggcaaggagctggggctcacctgggtttgtggccagagcctgcaggcaactgtatttacagtgggcagggagggttccctgggccccaggagggagtggggctgggctgttaagctttggttcatgccatgctaacagtggtggtgcctcaggacttacagcctccatcttgcaagcccccaaccttaggactagcctctttcagggctggtctccgtttgagattttgtgagccacctgtccctagggagcagtaaatcagggcagtgagtgtggctagttaaagctgagatgcccatggccaggtccccaactctcttccatagtcaaaaggcttagaaggaagttgagggactggggttcctcatggaaacagcgttttatttcttgggggtaatttataagttttcttagctggttctaggcactaagctaaaagctactggtgactttgaatccacactacgccatgaggtcgataccattacaatctgtgttttatgattaaggagactgactcaggtggtgaaacgtctttccccaggtcagtgaggcaatggcaaaaccgagaactgctgcctcagcccattcttaccttttacccttcgctaccccaggcctggcttgctccctccccaccccaaagcacagcataatcctcctccacttcctgcaaaagcaccgctagaagtgacaacacaacacgccacatcaaatgcttacctcctctgaccagctcgtttctcacggcaagtgacggggccacaggcaggcactgtgcacaaccagatgccatccgtgggaagagggtggagtgcttgatgctgccgcatttggaagatgcttcttagccacgggtttcaatcccttctctacccacacagcttctgttaaggcatttcagccgtgccactcctaatttccgtgtgaactctgtaaaattagaattctttgatctgtaggtctctctggtcaaatgaccaagaaacgagggatgtacaacctgagaaagcacgttcagctttatctttttaaactttttttatttaaataaggagaattctttcatatggaaagagctagtacaatcacatatttgaaaggagaaacaataggtactgaaccggagggaaagggcgagggtgagtgtgccagcaccggcctggtgaatccacgattcgatttcccatccaaggtaagtttcccaaaataccgtataaacaagctg

SEQ ID NO: 43004 - DNA, 2300 bp, Homo sapien
ataaattacccccaagaaataaaacgctgtttccatgaggaaccccagtccctcaacttccttctaagccttttgactatggaagagagttggggacctggccatgggcatctcagctttaactagccacactcactgccctgatttactgctccctagggacaggtggctcacaaaatctcaaacggagaccagccctgaaagaggctagtcctaaggttgggggcttgcaagatggaggctgtaagtcctgaggcaccaccactgttagcatggcatgaaccaaagcttaacagcccagccccactccctcctggggcccagggaaccctccctgcccactgtaaatacagttgcctgcaggctctggccacaaacccaggtgagccccagctccttgcctctctgtgggatcttgggtgagtcacataacccctcaagggtaagccataaagaagtaaccacgaaattctaactggtgtcatctaatgctatgttgcccaacatggaaaaaaagtcttgcaggcagccaagaaccataatgaaggttattaaacctgcagtgtgcccttttggtctgtatagattaacatacaaatagaccaggagatcaagaaggagcgaggctgagaagagtgatccatcagcctggttgcgttgctgtcagttaccctgctctgggtgccgactgttcagggaaaacatgggaaggggtgcattgacccaaccaaaagtaccatgtctgctccaaagcaggcctttgggaaggctcttgaccctcagcagagggggctggagaggctgatggatgaggaggagccctgggaatggaggaagaagcctccagtcttctgccacggagtttaggggagatgcccccactggagcctctgatggtcatgcagcccccactgatgtccaggtttttttggttttgttttttgttttgagacggtctcactttgtagtccaggctggagtgcagtggtgagaccaaggctcactgcagcctcgacctctctgccccaagtgatctcctgcctcagcctcccttgtagctgggactgcaggcagacgccaaggggccccgctaatttttgtatttttttgtagagacggggtctcgctgtgttgcccaggctctcctggactcaagcgggctcacggatcctcccacctcggccacccaaagtgctggggttacaggcgtgagccaccgcccccggccctaggtccgttttaaatgcccttaccctcagccacttcaccgctagatgtatgtgcaagcaggatcgtggcatcgatgtttttcggcaaggaaactaggagcgcccgcgggcgtgggggcacgtgcctgtggtctcagctgctctggaggccgaggagggaggatcgcttcgggcagagaggtcgaggctgcagcaagccgtggtcctgccactgtactccagcctgggcgacagagcgagaccccgtgtcttaaaaaaaaaattaaggtcggacgcagtggctcacgcctgtaatcccagcactttgggaggccgaggtgggcggatcacttcaggtcaggagttcgagaccagcctggccaacatggtgaaaccctgtctctactacaaatacaaaaattaaccgggcgtggtggcgtgcgccttcaatctcagctactcgggaggctgaggcaggagaatcgcttgaacccgggaagcggaggttgcggtgagccgagatcgcgccattgcactccagcctgggcaacaagagcgaaactccgtctcaaaaaaaaagaaaagaaaagaaaagaaaaaaactaggagcaaactggcgcgcccggcagaacgccgttgtgcagacgcagaattaagatcttcacgccagatggagtgaaaaagcaaggagcagaagatgggtgggagcccactgcgctttttaaaatctgcacgtctgcttagagtacacagaaatcctggcacacaaaacagtagcacccgagagaggggaggtcgccgcgtttcacacctgcctctcctccgggaccggcgccctcgcccgctgcgcacgcgcgtcaccctctcccagtgcgcacgcgcgctgctgcccgtctggccccgcaggctcggtgaatcgaacgttgagcagggcggtgggtggtgcggagtgccgagcggcctcacccccaaccgtcggcccagtcggacggttccgaggcgttgccgggagccgggcgcggctctgtgtggactcggagaaacgcgggtacatttggggacaccggggacgagagcccagcccggacttgg

SEQ ID NO: 43005 - DNA, 2300 bp, Homo sapien
caaggctccaggaacttcggtctttctcagcagcccggctgtgctgtggttctcctcgtgtgtccgggagccgggtggctggggatcccttctgtagcctctcgtgagccctcatggaccacggctcctcccttcttttctagggcgtctgcctgagcccgcttttctacaagatgtggggatttttgaagcgccctgtagtggtgacggctgacatcaacttgagccttgtggccctgactgggatggggttactgagccggctgtggcgactcacctacccgcgggctgtggtgtaagctaaatgactccattcccagggtgaatctagaattgtactttgtgacaggaggcgcccttactgaatagcataaatgggagagtgaaatcctggcttcttggtgataggtgtttttggcagtgagaggagagaccagtctgtccccaggacagccccagcagagtacaccttttaggtcttgccttctgagtctgtaacaggtgaaatttggcccattaaaggggtgcagtagaggaaaatctggttgccagccttaagtaacagttttaaagtctggacggcagaggattaatggatttggaagtaagtcttcactgttgagagcactttttagaatgtgtttttgtcataatgggaagtgattgctgttattattgaagggctctttattaactgattaatgtgtgtatgtgtgtgtgtgtgtgtgtgtgtgtgtgtgtgtgtgtttttgagacggagtcttgctgtgtcgcccaggttggagtgcagtggtgccatctcggctcactgcaacctctgcctcctgggttcaagcaattctctgcctcagcctcccgagtagctgagattacaggtgcccgccaccacacccagctaatttttgtatttttagtagagacgggatttcaccatcttggccaggctggtattgaactcctgacctcatgatccacccacctgggtctcccaaagtgttaggattacaggcgtgagccactccgccctgctgcatgttcttttttgtttaactttttattatggaaaacgtcaaacatatacaaaagcagggagacaagtataatgaatgacccccccacacacaccagtattttcattacccagcttcaccttatcagttcacagccaggcccctccctgcagtggtttttactttgcagcaaatcctagtattcatagataattcagcggtatatctgtaaaagatgaggattttttttttttttttggagacatagttttactctgtcgcccaggctgtagtgcaatggtgcgatcgtgattctcctacttcagcctcccgagtacctgggattacaggcacctgccaccacgcctggctcatttttgtatttttagtagagaaggggtttcaccatgttggccaagctgatcttgaactcctgaccttgtgatccacctaccttggcctcccaaagtgctgggattacaggcgtgagccaccgtgcctggctgaggattcttaaaaacaaaaatcacataaccacagttgcattatcatgcctgagaaattgacagcagtttcttggttatcttcacctctccctgattgaaaacatgttattgcagttgattcccacgttttcctttcatacttgcagccgtttcattgggtcatcgctagccacagacatgtgctgctggtgggggcgggggtgggggggttgggtaggtgggtaagcaggattagccttgcgtcccaggaggtctttcagcaggttggctcatagtatccacctaaatcaaacacaagggagagacagaatctgtatgggcaggcatgctgagtgccagctgtgcttggtgaattccccatgtctctgtgggtgggtgatgctgtatgcatcttaatatttggggatgggaaacaattggggcaaaagatccagcctttgctgatcactcactcaaagtcatttggaaacacatacacatttatcctcacagtttttgtttacagttaagattctaattgaatataatatgggttgttgtttttttttctagttttgacgaagtatattatgggcagtacatctctttttacatgaaacaaatcttcttcttggatgacagtgggccgccatttggccacatggtgctggccttgggaggtaggagtcatcaggagagtagcccctacccttcaggacctcaaatacatttaaaacttatcagtgcatttcttacaggcagaaaccaggtcttattattgatgcatcttgtttattgcttgcca

SEQ ID NO: 43006 - DNA, 2300 bp, Homo sapien
acccaccttttgtcccagctactcaggaggctgaggcaggagaatcgcttgaacccgggaggcggaggttgcagtgagccgagattgtaccactgcactccagcctggtgacagaacaagactctgtctcaaaaaaataaataaataaaattagccaggtgtggtggcatgcgcctatagtcccagctactcaggagcctgaggcaggaggatcccttgagccctggtggtcaaagctgcagtgagccatgatggtgccactgcactccagcctgggcgacagagcaagaccctgactcaaagaaaagaaagagacagtagaaaatcaaaagagatgtgtattgggtgatgactgtatgaggccttgtgtctatagaatgttttaacattcacaacagccccacacagttgtatcgcttctgaagtaatgccttttttcatgagtgtttttcatcctcatacgttttcccttgctaccttaaaattgacatgtgtttcctctttgaaacagagaatgctctcatcactcagtcaaggctaatgcttttggaatcagtgttaatatttttcaatctattggccgtgttgtcctacctgaagttcttcaactgccaaaagcacaggtatggaaaatggagtgtcttcctagttaacgagaacagagattctgggtggtttgttgatctgagatggtccagtacctttttttgtttcgttttgtgagacagtaccttttcattttgaggagttgcttgctaaatatctttttttttgagacggagtccctgtcacccaggctggagtgtaatggcgcaatctcggctcactgcaacctccgcttcccaggttcaagcaattctccagcctcagtctcccgagtagctgagattacaggcacacagcaccatgtctggctaattttagtatttttagtggagacggggtttcaccatattggccaggctggtctcaaactcctgacctcaggtgatctacccgtcttggcctcccaaagtgtggggattacaggtgtgagcctctgcgcctagtgctagatatcttttggtcctctaatattttgggggttggcccttggcttgtgacttcataaatacatcttcatttttctataatttaaactaacaggacaacattttctgggcaaaaagaaaaattctgctgggatggatactttgggagatgggaattctttcttactgcccctgtggctcagcatggccagccgacccagaaagatttctctgaagaatgtggagcttcactagccttttggaaatgtgtctgaactatttctgtctccatctgctttgtttttattccagccctttttctctgagctggtggttctggctaacactgacaggggtcgcttgttcctgtgcagtggggtgagtttgagcctctggtcttgggcagtgtcctcctccatctccttatgttttcctgtctcatgttaactccatttctgtcatgtctttgcagcatcaagtacatgggtgtgttcacgtacgtgctcgtgctgggtgttgcagctgtccatgcctggcacctgcttggagaccagactttgtccaatgtaggtgctgatgtccagtgctgcatgaggccggcctgtatggggcagatgcagatgtcacagggggtacttggtgaaaagactccaatcctcaatgttttagaagcaggcaggcctgggcagcctcgcctcttggcctctgcaggtgcctctgtatgggaggccagagtttctgtcactaactttttctaagctcacaatgtctagaggtgggtacgcttttccacgcagtggaacatgacttttctttgaatctctggcaggtctgtgtgttctgtcacttgctcgcccgagcagtggctttgctggtcatcccggtcgtcctgtacttactgttcttctacgtccacttgattctagtcttccgctctgggccccacgaccaaatcatgtccagtgccttccaggccagcttagaggtaagtaagcagtgggcatcgtggccactggagaaggaagatgatagtggacccagagttttcttacaaacacatcaagtgaacattagcacttgaatcaaaacatgaagaatccacatccatatttctttttttggtgggggggatggagtcttactctgtcacccaaactccgcctcctggcttcaagcgattctcctacctcagcctcccaagtagctggtattacaagcacctgcaaccacacccagctaatttttttgttttgttggtagagatggggt

SEQ ID NO: 43007 - DNA, 2300 bp, Homo sapien
ggagatcattaccactgttacaagaatggccaccagcctaaacatcaccccagagggaggagtggccatcgggaaggctggcttagggtcatttttctttctgtctctcactcatcaaccttctgcttctgtctcagggaggactagctcggatcactcagggtcagccactggaggtggcctttgggtcccaggtcactctgaggaacgtctttgggaaacctgtgccctgctggcttcattcccaccaggacacctaccccatgatgtaaggtgatggttttactttgaagataattaaatgctttatttgctcgtagatttgcttatcttagcaactttccctttctttgaggaagtttgtttgcaggacagaaagaagttgagcagcccgggtgctgattgccagtgagcttcgtggttcccgggtgttgctggagggacttggcgtgtggcagggcccagggtcggccccagctctgtggctgtggctgacctcagcactgcctgcctgaatcatctgatttcggctccttgtctgtggtatcttcattttccctgaaaccccttgctaggttgtatttgttgaaatctgcttccctttgcagaaactttaggagaaaggcgtgtgggcccgatcgatgacccacttccagatacgtttctttccctttcttttctttttctcataaatagacacagggtctcactatgttgcccaggctggtctcaaactcctgggctcaagcagttatcctacctcagcctcccaaagtgctctgattacaggcctgagccaccgcgcctggcccagatacatctctttgttgacttcacacagatatgagaacggccgaggcagctcccaccagcaacaggtgacctgttaccccttcaaagatgtcaataactggtggattgtaaaggatcccaggaggtgagtgcaggtcctgtgactccagagcagagctcacctcctggcctggccaggcgagaccctgggatgcagtcctgggcccccttctttccctccctcactgactctagtcaccgtcatggccttgaacaccagctcagtgctgagtccaaggtcagaggaatagatcatgagaccctcagtgagcagcctgctcagtagctgctctgagaagtttccaggcgagcctcaatgccccgacctgtgtccctctcccttcctcataaaaacaagaacccccctcctgcaaaagtagcatcatcttgcacacatcccagctagaggtgccccttgctctcattcccatatccagtcctgtggattctgcccccaaacaaggtctctagctgtcccggtcactgtctcctgatggtgtcctcccattgctgcctgcccagctccagcacctgcagcccgagtgggctttttcttttttttcttcttattttttcgggggacagagtcccaccctgttgcccaggctggagtgcagtggtacgatctcggctcactgcaacctccgcttcccgggttcaagtgattctcctgcctcagcctcccgagtagataagattacaggcgcccaccaccacatcctggtaatttttgtatttttagtagagacggggtttcaccatgttggccaggctggtcttgaactcctgacatcaagtggtccacccagctcagcctcccaaagtgctgggattgcaggtgtgagccaccacgcccggccccctcatacactttcattggtggaatgcccttcagaaggattccttggcagtcatggtacatttgtcactgtagtgtttgtagacaaattcagagcaatgcaggtgtgatgaccgcgggtagaatcacattcggaaaatgacctttggtttcagaaaagagcccaattaatgtctgtgctttggtttcctgtgttcacctcatgtgaggcacacatgggttgggaggcagtctcagccatgagaattcagagctgtgcccctccggtgcagctgttagttcgaggggaccaggctctgtgtggtcccgacagcactgtgtcttccaggcaccagctggtggtgagcagccctccgagacctgtgaggcacggggacatggtgcagctggtccacggcatgaccacccgctccctgaacacgtgagtgtgcccgccgtctgctctgctgcacctgtgggtttcctctgtggttctctgttcagaccaaaacgtgagccctgccttgggccgctgccccctgtctacccatcatctgcatgtgtagcagctcttagacctacatttgatgccgggaggggacccaggcct

SEQ ID NO: 43008 - DNA, 2300 bp, Homo sapien
ccagctagaggtttggggctggccctctgcttggtggtggttgggatggtcccataggggagccactgtggcccagaggcctgagccgtgtgggcccgggccttgtttactggactgtgggcttcctgggtgctgggcctgctcccagggagtggctccttcccaaagcgtccctttgccttgggagcggaaccacgcaatagcctgactggccctggcagcccatgccttgtggccagtcaccagagagggcacacgagacccaggccaggggtatcagggacagcccctggtcagactctgctagtttccctgcctttcgctacgtggctggaccacaggggaagaaatggcaagaaaccgtgtctaactctcccttgatacaaattcaaagttggcttgggggatggccacctttgggacacacacctggacagatctaagccagcagcgtggctgtttgctaggcactgttctgtgcctggggcttaatttacagaggtacggctgaatgaccatgaggagaggccaaagccatcgcaagattgatcgcatttcctgagagaaggggcacccatgccatgcacggttctcagtagagaaccccaggtttggtcaggaggcagaagcaggggcgaggggagagcccaggcctgaggctttcttggggtttccatggaaaaggcctggcagggcagggaaagagtttaaaattggctagtttgagtaattctagcaggctctgggctgcagagtggtctctagtcacctgatacctggccctgggtgacttagggcagggagaatcttgcctccaaaggcgagaattagataaggaggtagctggggctgtagacttggggtcttttttttttttttttttttttttgagacagagtctcactctttcccccaggccggagtgcagtagcgtgatcttggctcactgcaagctccacctcccgggttcacaccattctcctgcctcagcctcccgagtagctgggaccacaggcgcccgccaccatgcccggctaattttttgtatttttagtagagacggggtttcaccatgttagccaggatggtctcgatctcctgacctcgtgatccacccgcctcggcctcccaaagtgctgggattacaggtgtgagccaccgcgtccgcccggggttgtctgttttgtatatgaaaagcatgctctgccccgagccttagctatctctctctcttttttatttttgagacggagtcttgctctgtggcccaggctggagtgcagtggcaccatctcggctcactgcaacctccacctcccgggttcaagcgattctcctgcctcagcctcccaagtagctgggattacaggcgcccgccaccacgcccagctgatttgttgcatttttagtagaggcggggtttcaccgtgttcgccaggatggtctcgatctcctgacctcgtgatctacccgcctcagcctccaaaagtgttgggattacaggcgtgagccaccgcgcccggctggaaatccataatttcaatggatcagaatttgcctgtcacgttctctgtgccaggcacggagcgggggggcggcagggatggaacccggcacatgggcctctgcctccttggcgcgctgtaggcgcgagcctaaagtcatcaggcgacagcccccgccacgttccggggcgccccgacggctccagcagcgggtggggtgggaggcgtccggacagtccggaggcctcgatggccaagaggagcctgggctggagggggccaggcccgggggcggccgggggagggcccgggactggcgcagaggcagcgcgaggcagaggcaagcactcggacgaaggcgcagccccagcctcggggtgcggaacgggcaccttccgggccacttgagtctgagaccttgtagccggctcgaggcccgggcgcagcagtccctgccagccagctttcggcgcaatgggacgcgggcgctcctggtgtgccggcctcgggccctgcaccctcacgcatgcgcggcccccccccccccggtggactacaactcccggcgtgccccgcgcgcctcccggaagtgatcgctccggttgcctccgacctcggcgctgggcgggcgcgccgggcctggggaaggggcgggcgcggggacccgatgcgcgggagcggaggccgagatggcttcggcgggaggcgaagactgcgagagccccgcgccggaggccgaccgtccgcaccagcggcccttcctgataggggtgagcggcggcactgccagcggga

SEQ ID NO: 43009 - DNA, 2300 bp, Homo sapien
gtcctgtgatctctagaggggtggcacagcactgcccgtcccagaagccaggcgctgtcccatctgccataatccagggcacagcagatgggggagggctctggaattgggcagacatgggcgccgaccccgccacattgcttgcgggtggtgtggcctcgtgcctgggctcctcctctctcggtagggtaacaggactctgtccttgtgggattgctctgggcattgaaggatgtggcatatgttcaaggcatggcccagtgctcaccagcgagtcccacgaagttgtcatggctactggcaatgatgcacccgcaaaggccagttgacttgggccccttcttccagaagcaggtatgggtctatgctggtgccatctctgcttccttccccaaactctttgaacaaaaatccaagcttgacagtgaactgggtgggtgtgggggccgaggaatgagcctgagcacagtgcggatgggccctgctgtgattcccagcccggagcctccttcacctgccagccccaccccacgcagcccccagtgcaagagcaggcgtgggttttcctctcgtttgatgcaagaggggatggggcaagggtgggggcaggagccaagccagcatgactcagctggagatgtgggttcctcgagattcctctacccagcagctcgggaatgagggagaaggtgggagcaggtggtctatgtccagagcacaagatttaagcagtgcgtgtttgcacccagcctcacagtgagaagcacagctgcggagcctccttgggcctcacacctcagcaggcacggggggtggctgcagggagtgagtctggccacccgttggctcaggcagtgtcctacattttaaaattccacttcattctgtaatatcagagacagcacagttgagaaggtgtcaccacagcaaataaatagggctgttgtaattctggaaagtctgggagtccctgactggtaccagccccctctaagaggaggcaggcatggagaggtgaggggtaagctggagctgccagcccacacctgcccagtggctggcaccatgcctctccttggtacccggcccaagccgtgcctcttcagcctatcccttaggacccaaaacgtggaatttccccggatttttctgattggaccctaccatctaaaagtactgaccaggcacggtggctcacgcctgtaatcccagcactttgggaggccaagctgagtgaatcacttgaggccaagagtttgagactagcctggccaacatggtgaaaccttgtctgtattaaaatcagccaggcgtagtggcgcgtgcctgtggtcccagctactcgggaggcttgaggcaggagaatcacttgaacccaggaggcagaggtggcagtgaaccaagatcgcaccactgcactccagcctgagtgatagagtgagaccctgtctcgaaaataataatcataataaaaatttaaaaataaaagtaaagcctagggtttcatttcaggatcctgctgacgggtttgaacagacgattttctttgttcccatgatggctgagaccctctgaagcataaagccttaggacaggcagagcctctcagagtctaatccagggctggctcctacctggaacaggcatgccaccgggttttgatgcctagggcaggcgtcactcgtcagcctaagtgcccttttccgctgggaccagagttggcctcagctcccacagcacggttctccaggcagcaccatcatcggtagaaagtgcccatgagataaaaccctttcctgtttcccctctctgatctgccgtttcctttgagagatggacagagaggacgtgtgacttctctgggacatgcaggcggagacaccagagggggttcccaagccctcggctccctcgcccatcccactccccgtgccatctcccctgcctctctcagagcaaggactcaaatccaccctggctaccaccccccagcactctgcacccagacaagcagtttgcattgttttttccctctagatttggtgttgtactgcgaggcattcctgaccacctacaggaccttcatctccccagaggagctcatcaagaagctgcagtacagatatcctttccttcctgacccagggcccctgcaccatgggcattttggagagagagggaccctcttgcccttcagtcctcgtgggggaagccgagcagcatattgggtggcagtgtgattgaagtagggacacaggagccccatggaccgaggttcccacctctaccctcccgcattc

SEQ ID NO: 43010 - DNA, 2300 bp, Homo sapien
ttccccttccttcagaaaggaagggcctggtttaacacagtggcccactgcgcccagaaacttaacagagcattaagtgcctcttaaacttggtctctctggttctgtgggtcttttttggaatgttgtcccaaatattactccggttctatacttgctcccattttgtaccatccaactctgtaaaataaatttactttggtgcttttgactaaattgaccgaagccagatatctgccacctaagctaatgtattttccgtctacaattataaaagtgatgaagggctgggcgtggtggctcacgcctgtaatcccagcactttgggaggccgaggcgggcggatcacttgaggtgaggagtttgagaccagcctggccaacgtggcagatcccccatctcgactaaaaatacacaaattagctgggtgtggtggcgcacacctgtaatccagctattcaggaggctgaggcaagagaatcacttgagcttaggaagcagaggttgcagtgagctgagattgcaccactgcactcctgcctgggtgacagagtgagactctgtctcaaaaaaaaaaaaaaggtgataataggcacagtgcagtggctcacacctgtaatcccaggactttgggaggctgaggcaggaggttcacttgagaccaggagtttgagaccagcctgagcaacatagggagaccctgtctctacaaaaaaatttaaaaattagccaggcgaggtggcatgcacctgtagtcctagcttctttggaggctgagggaggaggattgcttgggccagggaggttgaggttgcagtgagccatgattgcaccactgcacgccagcctgggtgacacagcaagaccctgactccaaaaaaaaaaaaaaagttaaatattcaccagggacctcctgagtgtcaggcagcatgctacgtacttcacaaatgttctcttttgtttgattcttattacagctgaggaggtgagactggaattatgcccagttaacagataaggaaactgaggctgctgtgctcaactggcaaagccaaggggaagagctagtatttgcacccaggctggagtgcagtggtgtgatctcggcttactgcagcctccacctcccaggttcaagtgattctcctgcctcagcctcccaagtagctgggattacagcttcgtcccaccacgcccggctaatttttgtattgttagtagcgacagggtttcaccatgttggccagtctggttttgaactcctggcctgaagtgatccacacacctcagcctcccagagtgctgggattacaggcgtgagccacctcgcccggctcagagcctgcattcttacccatattatgctgtggggattctttaggggcttttataacctcaaactctgggactgaaataaatgaaatcttttcatccacctcgacattgtcttcctttttaccaagaatatgtgattgatttcattcccttcttttcttctagaaaaccctttgttcagaatttaggtagcgtagcactttctccagcaaaattgttcccaaagtgcagtgggagtttggagcttggggttataaattcttagctgtatttgtccccaaggtgttttcttctttggagactgaggtgtagcagtgttttgatgttttgtttcgttttgtgtttcccttggaaacacagcattagtgaaatcagcttgttttctctgacagtacttgttacgtggtgcacactggtctgagcgtgggactctgaaatagaaggcgtggcataagggtctgtatgaaaatgtttctcctggcatgccccagaatggttcatttatgactttcagcattttgatcacctgattccccatttctcctgcggagaaaagtggtattaaaagtatttggacataaaattcatcttgcaagccgctgttgtgctgatgagtaataaagtgtcaaaaggatgctgaggaaagagcttcttaatatagaccatgcctgagaggcaccggtagggcgataacaagccctttcttctgatttcctccctggggccaaagggattttgaaaggcagaaggcaaagacttgagaatgagattcctcaggcttcccttgtgaggctgcctgggttctgccgctgggtggtttgggatgtccaagagatatcccctttcagccagtgactcggtcctcagttgctgctccggaaagacgctggggctgggaagggccctgtgtcctctggctttaaaatgggcaatgctattgaaaaacagaagcccttgaaacgaag

SEQ ID NO: 43011 - DNA, 2300 bp, Homo sapien
cctcgccggggcgcctggcagcttctcctccaggcccattgcctgccgggcgcggggggaagcggccgctgcgggggcgccaggggccgggccgggcggggcccctgcaacccggggccgggcgcgctagccgctccgcggtccccgggaacttccgaaaatggctcgagccccaagcaggggaagaacagcccgggccgcgtgctgctgcggctgcagcgatcggtgcccggcctgggctcggcgctaggagggtgaacccagctgagctgtaaaatgtgtcatttctaacgagcttcgagtttaacgagaagcgtccacttcggttgcttcaaaggaagcaggctggatgagtgggggtattttgaggaggtagtcaagtttcccctccccaccccgatcaagctcagctctgcaaggagggcaggtgggggaccggtgggttggagtagatggtaaatcttgatgcagacctcgtctctttgtgtgttcctagaaatctgggggagttaccttccgagtccctgggtttgcctgtcctggaaatagagtctccaaagattcaatgactgtcgagcctgtggggccccaggctttattagcctgcagcaccttgcagggcaaatgcgaattcttgggtctaaggtgaagtgggcgggtgctcctgggctcctgtactgggagcatgccctgtggtcataaccccggtagcaggttagcttggcggctgaatgagggaaagcagatttttagggagctgcaaaggaggtctgtggctttgattgtggaagttgcttatgtttcctgggttgaatctgggatacttctgtggggtgcacccctgcagcggacccacaaggcaatatgacttttgcaggctgtggttgaagcacagaaggacatttttgtaggctttattgagggtttactatatatctaactcttagcacctaaaatgcattgcttcttaaatttttgaagctagtctgtgggaaagaatatggtcccagttttacaggctcagagaggttcagtgagttccggctgtccagacagcaagagggcggcaggcccctagtatattcattcctggccctctgaccagaagccagggtgcttttctcaggggcagggcgcttgggttcaggtgccatttcttgagtatttttctcactgaatttgagcccccacagccttgccgagtgaccatgagtcgccatcctgtacacctgctgctccagaaataacttgggttcatctgtgcagcatttctcaggaacttcttgtatagtgtcttgtcagaacggtactgttgggaaacttggataatttattttaaaaagaacattcactgagttcttttataagaactttataatatataagattatattatatctttttatatctaatataagattatattatgttttatatctttataatataagaatattctatgttcattgtcaaaacttggaaatcacagaaaagtaaaatgaaccggattggaaatcatctgtcagccaggtacagtggctcacgcctgtaatccctgcattttggaaggccaaggcaggaggatcacttgagcccaggagtttgaaacaagcctgggcaaaatggcgagacctcattgctactttaaaaaaaatttttttttttttttttgagacggagtcttgctctgttgcccaggctggagtgcagtggtgcgatctcggctcactgcaagctccgcctcctcctgggttcacgccattctcctgcctcagcctcccgagtagctgggactgcaggcgcctgccaccacgcctggcaaatttttttgtatttttagtagagacagggtttcaccgtgttagccaatatggtctcgatctcctgacctcgtgatccgcccacctcggcctcccaaagtgttgggattacatgcgtgagccaccgcgctgggcctctttttttaaaaaaaggaaaaagttgcctgtcatcccatgagctgcccaaaccgctgggaatgaaatgactcttcatttgagttctctgctatttgggagaaagacctgaggccagttcatttcagcatagtttgtccttgggccttttctgggcaccgccttctgctagggggttgtagatgaaagtgcctgctcccagagaagcttgtctaacctagcacagtttctaagctacccaggctgccagaccgagcgaccgtgctgccatggacacaggtgagagaggggtgtcatgagtgcgggaatgaggaagacactggaggggacagtgtttgtgctagg

SEQ ID NO: 43012 - DNA, 2300 bp, Homo sapien
acttagcagatcctttgattcttaaatgactttttttttccttttttttttttttttttttagccagggtcttcctctgtcactcaggctggagtgcagtggtgcaatcatgactccctgaaacctctgcctccagggctcaagtgattctccctcatcagcctctcaagtaactgggactacaggcaggtgccgccgtgcctggctaatttttgtatttttagtagagacggagtttcacacattgcccaggctggtctcgaacccctgggctcaagtcatccacccacctcagcctcccaaagtgctgtgattgcagccgtgagccactgtgcccaaccacgactttttttttttttttgagacggagtctcgctctggagccaccaggctggagtacagtggcatgatctcggttcactgcaacctccatgtcctgggttcaagagattctcctgcctcagcctcccaagtagctgggactacaggcgtgtgccaccatgcccacctaatttttgtatttttagtagagatggggtttcaccatgttggccaggatggtctcaatctcttgacctcgtgatccacctgcctcggcctcccaaagtgctgggattacaggcgtgagccaccgtgcccagccacgacttttaatgaactcatttccacactagaaaagttccacagctgagccccagggtgcccttctggatgtcaaataagcagggcaggcagggtgtgctgtgtccctgagggagttgggcccaggccagcatggaggctctaggcctcaggggacatttaggcctgagtagggccaaccccagcccgggacaggtggctctcgctggcagggtgactgagtcccacatgcagggctggggtggagaatgaatcctccgccttggcatagaccttgggccagcagagggctttcatgccagagtggactcattccccggctggagcctctgggctggcaggaggtgctatgaggccactcccaggccctggtgtggggtctccaattaagaagggggtgcgggcagggtgcagtggttcacacctgtaatcccagcactttgggaggccaaggtgggtggatcatgaggtcagaagatcgagaccagcctggccaacatggcgaaaccccgtttctactaaaaatacaaaaattagctgggcatggtggcatgtgcctgtaatcccagctactcaggaggctgaggcaggagaattgcttgaacccggcaggcagaggttgcagtgagtcgagatcgcgccactgctctccagcctggcgacaaagtgagactcggtctcaaaaacaaaaaacaaaacaaaaaagggggtgctgcatctctggtttgggggaggtcaggacaggctcccagccagcagagcttgttgagtcctggtgagagtgagttctaggccctggtgtggagcctctggcccacaggggatgctgggtccgggatgatgctagggtggggtgggcgtcagttccacgtcctggggtggaaaatctgacccaggagggttctctgtgtctctggtgagggggcaggccaggctcttgggcaaccgaggaccctgggttggagctgtcagtcccaggtctggagctggtgactctggtcccacagcagaggaatgcggagtcccaggcggggtcggccccacaccccaggccccaggccccggcgtggggactccggctcggcagggggcgctgcgtctcgcgcgtcgcgcgggaggctcgggcggctccgggcccacagggggcgctgtggcggcgcggcgggcgcccggcaggtggcgctgtggccgtggccgcggccgaggcccggcgggcgggcgggcggcgtcgctgcgctgcggccggctcgcgggccgggggagcggcggcgggcgcgcgggaggcggagcggcggcggcgggcgcggcgggagcggctgggcccgggcgggctggagcgcggtcgccgagcgcagggccgcggccgcgcggagcccgccatgccggcgcgggtctgaggcgtggcgagccagggccgaggcgagcggcgggcgcgccgcccctgtcgccccgcggcggcccggcccgggcccgatgagcggcggcctcggcctccggcgcagcccggaaatgtccggcaagatcgagaaagcaggtgaggcgcgggcgtggggcggctccctccggccgggcccggccctggggctccgccgctccccgggccgagcgcgggtcgcccgggatgtgcggccctccgtgcgccggggcggggtgaagcc

SEQ ID NO: 43013 - DNA, 2300 bp, Homo sapien
ttctcctgtagtgcctgggatatgccccagccttgccactcaaagcccagtccctaaccagcagtgtgggcacccctgggagtcagctggcagtgccaacgctccacccctccccgagctcctagatgagaatctgacaaaagacccccagtgattgtgtgttcaccagcctcgcattctcatgcattttagcatccctaggaatagcctggaggggctgacttagtgtctgggccccacccaggagattccaatgctgtggctagagaggggcccaagagggcagatttctaaccaactcctagatggtgccagcaccgctggtccccaaacatttcaagcagcaccattcttaaggggaaaattccttggccgcagctcgaacttgctgtgccaccactgtaatgggattgggagacctggccaacatggtggcccatttcctagatgtgcagtgaatatccaaggaggcagattggtctgcagagaggaggaggatgctgagtgacaaacctcctgtagttctgcacaactcaagctcatttcttcctcacattacatatccatcctgagttttgacggggctgtgtcactcaaggatgagtgaccgctggtaacttctaccacagagggcaagtccaagatgccccagcaccttagaggtagaccagagcccaggtcctcagctcctgtcccgcagtccccactcctttcaggcccctggctccacccacctcatctgagccactctccccgcagagagtcagaatggcggtccttctcaccgtctgcacacatgacctgaggacctctgcatcaggcactagactgacatgggctcaaggtagggaaattgacacgaaacaaacatggcaaaaaataccaagttcagatatgaggattgagatgggagaagagagccaggcaaggagacaagccccatcgggggagcctggggggcttccctcaacacgcgaaggagagggggaaaggacagaggcccgtgctgaggggaggactcagggaggacagagatgggcatttgaggagctgagggacccgaggaaaggaggcagacaccgggtgctgcagggtttcacatggagttcacagttcgcatttcatcctgagtgcagggaaagccatgagagcgttttaggggagtgacatacttgggtttctagttgaacgatggcaatcactcatgttttctgaccagcacacgcttctgcccactacttcaccctcactgtcatcccctgtggtaggcactctgtcattatccccattttccagatgggaaaactgtagctaataaagatgaagtgcctcgcccaaggcgtcactgctagaagggatggagcccacgctctttccctctttgctgcagaatgttccctctgagccgtgttgagacaggcaagatgggaagaagtagaaggatttgagatagataacttggaaccacgaggctgcttgggtatgaggcagggggaagagaggcgacagggcagggcccaggtttctggctcaggcctctgggtcaaaggccatttagcaaaaatgctggaggaggtgcaggtctggaagaccacttgagatgttcctgtaatttgcacgacgccttgcctggagagagcaccttgcagttatcagtactgagttgtcttggaatgcttggagaactcaagttcagccagaggaggtcaagtccagaggtcagctgaggaagggaggaggagatgggcacagatctgtcaggccagggaagatgagctcaaataaagatcaggaagccaggccaggtacccagggaacagcaggctggggagggtttggggaacctgggagtgcagggtcttgttggtttggttagaggctctaaactccaaaggccacagggcccctgatgagtggagtaggctggatccaagaccctagggtgctcaggcaaactgcacgtgtcaccgctcctcagctgctgcagctggtggccacgtggcagtgccagggtcacactcacagagatgaggagaagctgggccccctttgatcttcacagtagcctatgagatggtccccagatcctccgatgcttcaagaggagctgggcaccacagttaagtgaagtttcctaaattttaagtgttggtcatttgtgtttaaaaatgtgaaaacaaaagaaataaaagtgcagccagacaaagcctctctgcctgcacatggctgctgaaaggctgaaatggatggaggtggtctcacccaggggatcccagggactgacgttcctatcgcaggga

SEQ ID NO: 43014 - DNA, 2300 bp, Homo sapien
taaccttctctactgtcctaaaagttttcaaacacagtgaaattttcatgaaactaattgtgaacagggaaaagccaggagaactaaatgtatatgcctgttcacagccctgcttttaatttccaagcactgttttcagaaagccaggtttcagtgtattccgcagaatagacacagagctctgaagtgtcctgggtcaaatgcaacacatcctgtcctgtcttcttaaaggacttttcctgtccaatggcttcccaatgctttctggtgttccaaaatcaatcacacaccacacaggcctaaaccgccatggcccagggctctacctgaccgctggccaacccccaaggcaggttcccagaggcccattgaccaggtgttccattcactcaactcttgaattcatatattaaagtcaactttttagcacctatgggacacagtgatggctttctcgtttcctcattgcccttgagccgtctctgtcagcactgtattgtgggtagttctatttttgccatacttaatttgttctaaactcttgaaacagaaggcattgatttgttgaaacagaagggattgatttggtatatcatgcaaaccagtaaaaaccaaaatgtttttggttagaatgagctactgaagtaccctgtgtgtgaccaagtgtgaccagaggaggactggactgggtttactgtgagccctacccacatgccaactcacacctcctccagcttcctcattcgtcaagtaggggtgccctagagcaggggctcttgaccagccgggcgtcagttacccttgggagcagggctacaaaacaaacaatggaacaggctcttgggcccgctccagccattgattcaatactctaggggaggaactgagcaatctgtatatcaaaaaacaaaaaccttcccccgggggcttctgatgctcagccaggatttgagcaccaccagatgaggccatctgtaagatgcctcgccagatagccttgggctcatgaaaggctctgagctattgtttccccatctggagaataagactgtgatggggccagtcacatgggccagttctggggattacatgagtgtgtgtggagggcctagtgcagtgcctggcatggaacaggtgctcagcagctggatgctgccagctttcctccactcagaaaagacctactgatgcccacaacatgccagaccccatttctggacctggagaggcagtgggaaggaaggcaagcctcctgtcctcactgaacttccatcctgtgggcaagtcaggcaggaaacaagtaaacaaagaaataatagagcttcaggcagttttaaatattatgaaaactttaaattttgaaatggtaaaaagggtccagtgtaatggctcatgcctgtaatcccagtactttgggagtccaaggggggcagatcacctgaggtcaggagtttgagaccagcctgaccaacatagtgaaaccctatctctactaaaaatacaaaaattaagcaggcatggtgacacacgcctatagtcccagccactcaggaggctgaagcaggagaatcacttgaacccgggagatgcaggttgcagtgagctgagatcacgccactgcactccagcctgggtgacagagccagactccatctcaaaaaaaaaaaaaaaaaaaagtaaagagaatcaaggtaacaggtactggaaagaatgttttgataaggtaactgggaaatgcctctctgataaggtgacatttgagctcaagggagtataagaagagccacatgggggtttatgggaaaaacaattcaggcaaagggcacagcaagtgcaaagggcctgaggcagcattgaccttggcattgagatatgcaagagccgtggtgagaatcaaagttgaaagtgagccaggggctcagcttgcaggagccttggaagcagcaggtgcctcaaggtgacttgctgtattccttcattgacttttcttaacttgcctacaaatggataaagaagaaattaagtcagacatttaagatccttttcaaccctgagatcctattattctataatcagatttttttttcaagtttaagaagggttaacagtagttacaatattatttcttgaagtcccgaattctaagaccgatgctgatgatccttctctcctttcccctcagcttgatatatggtccaaatccaactatcaagtattccagaaggtaagttttactttttgcttcttactcaagcggcattaggaaaacgtgaatgctttgaggtttaaacattggtctc

SEQ ID NO: 43015 - DNA, 2300 bp, Homo sapien
tatgtaatttttttttttttttttgagactgagtcttgctcttgttgcccaggctggagtgcaatgatgcactcttggctcactgcaacctccacctcccaggttcaagcaattttcctgcctcagcctcccaagtagctgggattacaggtgcccaccaccacgcccagttaattttttgtctttttagtagagatggggtttcaccacgttggccaggctggtctcgaactcctgacttcaaatgattcacccaccttggcctcccaaagtgctgggattacaggtgtgagccacagtgtatggcctgacacagatatttcttgaaaaagtataggtcagtcagttattttgtcacgtttttcagtttgagttctattgatgtcctgattagattcaggttatgcactgctggcaagaatatcatggaggtcatgttgtgctctttccagtgcattgtatcaggaggtgcacaacatgtcccgtcactggtgatgttgaccttggccttttggttaagctggtgtctgccatgtttctccactgtgaagtcactattaagtcactatccatccccccttatgtttacattaatgaattgtttaaaattttttggtaaaatatacataatataaaatcaaccattttcactgtttctaagtgtccagttctgtggcattaagtacaatcacattgttgtatggccatcaccaccatccagctgtaaaacttttccaagtctgtactctttaagtacagacttaaatatggccctttgcaatattatgctgaaatcttcctctctacagccttcctacaactggttattgttattgccactagttaaccaaggaggactcttgtcttgggttgacatgaaggtgagttgaaggtcacaatcatgatctgcctcctgctctcctcttctctgctccaagctatgcaaccccagctcctctaaggaaagaacatgaggacttgggcaggttccctttagtaaaaagataataaattttcagaaacctgtctatagccaacaggacaaagagacattgaatttttccataaagccagatttggccaacattttgttggttttatttaaatcccaaaccttctctttcttccacaacctctatgctatgtatgttattttcagaggtgtgtgttcactgtaaaccagccaccattctactttctgtctctaacattttgactaccctaaacacctcatataagtggagtcacacagaattttgtttttttgtgactggcttatttcacttagcataatgtcttcaagtttcctccaggtagcatatgtcagaattttcttgcttaagcctgaagaatttttcattgtatgccagtatcacactttgtttattcatcagtttatggacacttgggtttcccctgccttttggctatttggtgaataatgctgttatgaacatgtgtacaggtattgagtccctgctttcgcttcttttgggtatatgcccagaagtggaatctctggatcattattttcctcttcttaattaataagcatcttgggggacgatactttgagattacctaaaaagcctgttatttttctgacactttcacccactagttttagcatccatcgatttctatctgaatcaattattctaatggctgtcaaatggcaattttctaattccatcactctttctgcatttatgagctggcattctattggaaagaagaaactttccttctccccgctttatttatgaatatggactcattttattgaatgggctatgttcctttcctttttacactattgctctgagcaattcttttccctatgattccccagagtgcaagtttggggaaatgcgggaactttctgtatttctttgtcaccattaagcaaaccgggagtgcaacctgacttccccaagttgagaaaaatcactttcctgcccatgcattagtttagctcaaggggaaaccctttttcgaaagtgctttctgggtagccccgcgcgaactgcatttcccagaggtcttcggagatacgtcatcagcgagcgcggcttttttgcttgcgaagccggctttggagagctgctgtggcggcggcaacatggcggacgtgataaatgtcagtgtgaacctggaggccttttcccaggccattagtgccatccaggcgctgcgctccagcgtgagcagggtgttcgactgcctgaaggatgggatgcggaacaaggagacgctggagggccgggagaaggcctttattgcgcacttccaggacaact

SEQ ID NO: 43016 - DNA, 2300 bp, Homo sapien
accagaagacagcttctggcataggtccccgaaaaaaagcctgttggcatcagcttgttgcagaggcagggagtattggtgaggtgggggctggcagggaggcatgttaaaaattgtttctagtggcacatatctttacatatgggtcactgaaaccatcctggcagtgctagggaggaggcacccctggttcctccactgtgtttagatgaactacaagtaagaagcagctcctccatctctttggccattcctgacagcatccagtccacagtgatgatggaggagcagggtggttcccagggattgatgaccatgccctggggtgacagcaggctgagggctgaccctggtcatcactcaccctgtgcaggagccccacaccctgcccttcactgctgcctgcaggctgaatgcttaaaaatcaaaccaccaagatctgttctcttctcccaaggagcttcctcctgcatagaacaggtaaccaggggtgggcccatgtctgccttcctgggctgcttggtgagataggcccatctccagtggtaggcatctgagagcatgtgcaggtagaggcacacaatggccctgttttttgacccctctttgaaaaaagaaggatttaccgttcatatctcacatatggggaaactgagccccaaagcagtctgggccgtgttccaagttcaccagccagccaggccagtgagagagcatcacccagaaacccaaaagccctgcctccccggccacaatccttagctatgtgaccttgggcaagttacttaacatctctaacttgaggctttgctactagcagtgaagtcacagggctttggcgaagattcagtgaataatgcacacaaactggtttgcatggagtctggcataaaacaggtgttcaataaatatattattattattattacagcagatgacagtctttaattctgcatcctcttcctgttttgtcacaagattccaaatattattcagcagtataactccgtctccagttttcagggcagctgagaacagggaagggttaaggtggaggtgaagggtggcagcagggcggggcactgaggtgccatgtcttgctccattcccaacaccctctgtgaccttgggctggtctctctctctctgcctctctctctgtctgtcctcaggccctttgttcttgatgcatccaaatgacagtgctggctgctcaaggctgcagtgagcccaccccaggaggccaggagtgtccgaaaaccacatgtgcttctggaagatgtggaaactctcccagaagccctgggaggcaggctggcaggaaacctcctggggatcagagagcccagggctgccggatatgatattgtgaactcggtggcctctgcccggggctgctgctaccggagccctcccacacctgcctcccatgcttgcaggggagggagacagagaacccctcagccaggcccctcctgccccactactctgcactccctgcagagctggcttggcttcgtcaaaagcagggcccatcagggtggaggcggcgatgtgtcagctggtattcaggctctggttgtgcgctcagatcgctccccctccccatctccccaaatccacccacccaccccggtacccactgcttggggccttctgggtggcagcacttcacagagagagaccgaggagcagccctgagcccttggctgtggggggtgggggaactgactcacttggcccccctccctcgtgccgatggggcagcccccacacccatgggcgctggcaccccggcaggcccccgggttttggaagaggaagctgcagcccggctgcgcctgaccggagccggctgaggatgcgctctgggcgcagggacccgctggcccccgggccgggaggcgatgtttaggcagcgaccccccagaggctgccggggccaccctggccacgggcccgccgggacgcccctgctcgccgcgcccctccccgggccgtggcgcgtcccccgagccgcgcaatatttccttcctgcacctttaagaagaccgttgctccgtggtgggatggtgtgttaaagccacacagaggaagttacgcagcccggatcagaccgagagataaaagccccgatggtgatcgtgagtgatggcaagaggatttagcctcggcattaacttggagcggagtgcaggggggcagtgaagcgcccgccatctggcccgcgccgcgccggggggatgccccggctccccgacgagacgccgcgaagcccacccgggccgggggctgcccgg

SEQ ID NO: 43017 - DNA, 2300 bp, Homo sapien
cagtgatgatggaggagcagggtggttcccagggattgatgaccatgccctggggtgacagcaggctgagggctgaccctggtcatcactcaccctgtgcaggagccccacaccctgcccttcactgctgcctgcaggctgaatgcttaaaaatcaaaccaccaagatctgttctcttctcccaaggagcttcctcctgcatagaacaggtaaccaggggtgggcccatgtctgccttcctgggctgcttggtgagataggcccatctccagtggtaggcatctgagagcatgtgcaggtagaggcacacaatggccctgttttttgacccctctttgaaaaaagaaggatttaccgttcatatctcacatatggggaaactgagccccaaagcagtctgggccgtgttccaagttcaccagccagccaggccagtgagagagcatcacccagaaacccaaaagccctgcctccccggccacaatccttagctatgtgaccttgggcaagttacttaacatctctaacttgaggctttgctactagcagtgaagtcacagggctttggcgaagattcagtgaataatgcacacaaactggtttgcatggagtctggcataaaacaggtgttcaataaatatattattattattattacagcagatgacagtctttaattctgcatcctcttcctgttttgtcacaagattccaaatattattcagcagtataactccgtctccagttttcagggcagctgagaacagggaagggttaaggtggaggtgaagggtggcagcagggcggggcactgaggtgccatgtcttgctccattcccaacaccctctgtgaccttgggctggtctctctctctctgcctctctctctgtctgtcctcaggccctttgttcttgatgcatccaaatgacagtgctggctgctcaaggctgcagtgagcccaccccaggaggccaggagtgtccgaaaaccacatgtgcttctggaagatgtggaaactctcccagaagccctgggaggcaggctggcaggaaacctcctggggatcagagagcccagggctgccggatatgatattgtgaactcggtggcctctgcccggggctgctgctaccggagccctcccacacctgcctcccatgcttgcaggggagggagacagagaacccctcagccaggcccctcctgccccactactctgcactccctgcagagctggcttggcttcgtcaaaagcagggcccatcagggtggaggcggcgatgtgtcagctggtattcaggctctggttgtgcgctcagatcgctccccctccccatctccccaaatccacccacccaccccggtacccactgcttggggccttctgggtggcagcacttcacagagagagaccgaggagcagccctgagcccttggctgtggggggtgggggaactgactcacttggcccccctccctcgtgccgatggggcagcccccacacccatgggcgctggcaccccggcaggcccccgggttttggaagaggaagctgcagcccggctgcgcctgaccggagccggctgaggatgcgctctgggcgcagggacccgctggcccccgggccgggaggcgatgtttaggcagcgaccccccagaggctgccggggccaccctggccacgggcccgccgggacgcccctgctcgccgcgcccctccccgggccgtggcgcgtcccccgagccgcgcaatatttccttcctgcacctttaagaagaccgttgctccgtggtgggatggtgtgttaaagccacacagaggaagttacgcagcccggatcagaccgagagataaaagccccgatggtgatcgtgagtgatggcaagaggatttagcctcggcattaacttggagcggagtgcaggggggcagtgaagcgcccgccatctggcccgcgccgcgccggggggatgccccggctccccgacgagacgccgcgaagcccacccgggccgggggctgcccggcgcccgagcgcgggtcctccccgggccgcccaggggggccaaaaagtttgcacttgttagcggcgacctcccgctcagcccgggcgggcgatgcgggcggcgcgggcggccccctcccccggcccgcgtctccgggacggctgcgggcggcccccccggcggccggagggctccctggccccgatctgacggcggcggcggcggcggccacagcggcgggagcggcgcggggaaggagcagcggctcgcagccctcggcccgcgcccccac

SEQ ID NO: 43018 - DNA, 2300 bp, Homo sapien
ctgtcttagagttttctagcaaggagcgccttcaaggccaggcaggctctgtaacaggttcccctttaaacagccagaggtgagacggggaaaatggtcctggctgggttctcgttcatctccatcagcagtccttcacccagagagaggggcaggggtcgccctaactcagatgaatgagtcccatgcctggagccctggggccctggctgggggctgctccgagcctgaggtgctcagggcgctcagggcagcaagtgtccgccacttcggtttgtcatttttggcaggagcgtttttctgtctgggtggagaatggagtttcacggaaacacagttaactcttcaggggccttgcaagtacaggaggtgaagaggatgtcaggggagagccaggtccagactggacatttggggtggtttgggaaatcaaatgcaatcatcgaagacatattaaccagaataattaatcatgcaggcacttttttactgcagtaacctttgccctattggccaatatttttggccagaatcccatgctggctggacttggattctccgggtgacgtatccagtgtctggaacacaccacagtactgcagtcgtgttatttcccaatgtaacattcatgtaactggtatctattttgatataatatattaattatatctattttgattttaaataattaacagaagcttaaaatagcacagcaataatcgtaattgtaacccatttatagacctaccctctaagaatgatttgcaaaatgctggccttgatcagaaaaatctgaactcacaaagcattgttacctctttggcagtcttcaatatccctagtttcttacagttaaaaaaaattaaatttgccatttcagattgtgcctatgattggggggctgtttctcagtgcctggctcttcatggttggccagcacgtggagcactctgttcatctgtacatataggtatgggtccatctgcacctatagttacatgctcatctttgcctttaacaactttgacattctgacttgacagtcatggtattttaaagcaaccattaaatcttggctcctggggatgcttttgaaagtctctgacccccaagccggggcacttctgctgaactaacactcccataaatgagaaaaaaatgcatcaccttttaaataacatgcccgatctccaaatgtgcaactctgatattaataaaaataacccagttttctcgggagactttgctaatgcagcctcattttttgcacattttgccggagagcttttgttcttatacgtctctattctccccctctttaatttgttgcaggtgttgttgctaatgagctctctctctctcctcccctcttacaatgaaagacaagtcagaccccaggtacctggatggattgagagctgagatctcagaaacttcataataagttgccgatggctaccagccaaggtcagctgggccccattagtgccggcccccaccaaagcagaaccaaatagccttctccccagtgaacacctcagtagcttttcattctagtccagtcacacagctgttgccaccttaagctcatatgaaagaaatctcttttattggtctgagaacccaagtccagtcccaaagagggaacatgtttccagctaacatgcccacctcctgattttattttatctttacaacgcaggctggagggttgttttgccgttgtgttgagcacgtcacccattaagagccctttaaagacctggattgattggaaggacaaaaattaaaagcaatctgatccagcctcatgcaggatccctgcggattttctccttatcccatttccatccactgtcacaatttgagaatctgcctgatttgatcagattcacctccaggggaggtgtgataccagggttaggaggacgtgaagttatgggcaactttctgatctgtccatcagcagtctgagaaacgctggctctgaattttccgtgtcggccttttggaaacaacaagttcctcgctgtttgcaaagcttcagtgctcgggtccctgggacaccccggccaccctcgcctggtagatgtggcatttccatgctgaggccgcgagtcccgcctgaccccgtcgctgcctctccagggcttctctgggccgcgcctctgcagactgcgcagccatgctgcatctgctggcgctcttcctgcactgcctccctctggcctctggggactatgacatctgcaaatcctgggtgaccacagatgagggccccacctgggagttctacgcct

SEQ ID NO: 43019 - DNA, 2300 bp, Homo sapien
ttttactatgcatatctttttttactttttaaatttttgaaggaaaaatgtgggaccatacttaacatagtattctgtggcttactctattatgagtgtctttccaatcatacttgttatattttaatgatatagacacctctcccagcaccaggaaagaaatagaatttgttttgtacctttcactaatacacgtctagaaaagaatattcctgctatccccttacttgccccagcccacatcaccacacagaaaaaattgtagtaataccaagatattttcttaaatcttgactttattctgaatgttgactgcttttttttttttacagacagacagaagccattcgatgttcatcagattggccatttcagccataccttgtgtttgatgttggagatggttcagaaagacgggataatgagtatgttttcctcttgcctcagtcctctgatagtcccagaattgttacatgatttgcattcatatttctgttaaatacatttcctatacacatctctctgcctagtgtcagggcacagtcatgttcacttaagttgatgcttcttttttctgtataatggggataatattacctaatgtcataagcaagtgcttgagtagatacttgttgagctcacagcagtgagggaaacagacgtgcccattgcaagatggtggtctcatgggaagacaggccttcagcaggtcatcacctgggtaagcagttattccagttgggttaagtactgtgaaggctaagtataaattcagttgaatgaaaatgtgaaagggaggaaggaagtagtgacagaggttggatggtattgggttgtgaataagggcatgtgttcaggtggtctgtatatgacagcaaagaggagtggtgttgctagaagcagcaatgtcagaggagctggggattcttgtgagagagtaggggaggaatggtctaggggcagcatttgttggcacggatacaagtgccactctgtcatgaagtaggaggaaacacaaatcccacttctacatcatgggatggctgcagagcaggtggcgtcctcaggcgagaatcaggcgttagataagatacagaggtggaagtagggaacactcattgaagaggttacacatacagaggagttgttggccatgggattgtagtgctggagggactgcagcctaaaggttttaatgaggcctcttggaggagagcagaggattgcgagttaagccgcagagcatcatgaggatttcagggatggaagagatcgctagctgattgggttgtccatttagtaagtctcaaagttaggagaatgggtatttaaggctcgtaaagcaaggcgggtaaggtagcctcaggaatcaagggatggggcagtgcatcccctggtcttggtgcattttgggtccggtatggtcatgagggagcatgtgttttcaggaggggttgagagtgcaggatatgaggctgctgaggactacaaagaggacatgaacctgctccagggccccatgttgttcaactggggtcaagtgggacacatccttcacattgagtctgtgtggatggcagctgctcggttgtgtggtgtgtgttgtatgcagccagtggtgagggacaaggaagatcatacatgtaaagcattttctcagtgttcggaagatagttaatccttaattcatgttagctatctcttattcacatctttgttcttattaatactgctgttcttaatactgctctccctgtttcaacagatgaagaaagtggtgcctaaacttcagttgatttcaaactcttttctctctacaacttcatttttcactgggcatttcacatgtattcatatttaccatagtattttcacatttattcatatataccatattaatggtcattgtaacagcctcttggagtcactgctagctgaataaaagatgaagcctatctgcctgccctttactataatgggaaacaaactcagtggaacttaagttagcaattagcctgctattagttttgataacactgtgttttctttttccatcttgtttagctcatatataaatgttcaagaaataaaactggtgatggaaataattaagcttattaaagacaaaagaaaggatgttagttttcgaaacattggcataataactcattacaaggcccagaagacgatgattcagaaggatttggacaaagagttcgatagaaaagggtgaggcatttttataaatatttccaattttcttgttgaattagaatgagaggatatagaaggaaagaaga

SEQ ID NO: 43020 - DNA, 2300 bp, Homo sapien
ctgcctaccttggcctcccaaagtgctaggattacagccctgagccgctgcacctggctgtagtggtgaatttttttttttttttttttttttttttgagacggagtctcgctctgtctcccaggccagagtacagtggcgcgatttcagctcaccgcaacctccaccttctgggttcaagcagttctcctgcctcagcctcccgagtagctaggattacaggcatgtgccactacgtccagctaatttttgtatttttagtagagatggcgtttcaccatgttggccaggctggtctcaaacccctgacctcgtgatccacctgccttggcctcccagagtgctgggattacaggtgtgagccactgtgcccagccttgtaatggagaatttttaaataaaataataacacgtgggaaaaaaaataaagacgaataaaggtgtttttttgtttgtttttttgagacggagtcttgctctgtcacccaggctggagtgcagtggtgcaatctttggcttactgcaacttccacctcctgggttcaggcaactttccagcctcagcctcctgagtagctgagattacaggtgtgtgccaccatgcctggctaatttttttatttttagtagaaatggggttttgccatgttggccaggctcgtctcaaactccttacctcaagtgatttgcccacttatatctcccaaagtgctgggattataggcgtgagccattgtgcctggtcagaaaaaagattttaaaaaacccaatagaagaaattataataaaagaaaaaaacaaaaacattaaaaccaaaaggacaagaagaaagcaatgtgttaacctgagattaaaatgtggttagtaaacaggcaggttaaattggtttttatagttcttgcaattattatatccaagaatttctatcatcttgtgtcccttagtttctagagtatcaaggtgatgtggaacatagttttaaaagctttattctgagtattctgcaaaagaaggctcgatggtcaaataagattctgttctgaaaattacatattaatatataacatataaaagtttttgaaatattctgcagttaagagtgttggggatcagcctcaataccacccgtagggtacccgaagtgcagtggtgacaaagaaatgagaagagacaggttaagagttcataaaggagggaaccagggggccagagcaaatcagaggctgcaaaggctccaagctatgatctccacactatttattgaaataaatagtgaaatggtgaaaggagagccgtgtgtcatacacctaatgtataggaatggcggtttaggtaaattttctttgtgctgaagcagtataaacttaactactgatttattttttaacttatcagagagcagctgtggggagtgggcctaactaggagctggcatatctggccacattccagtgcttcaaaggagtatctttctccttgagcacagtgtttatagataggagagcaggtcacattctggtcatgggaacatgatggcaattagaaggctttactcctcagaggcctcttgtggctttctacaacttactgttccatatttttatggctggtttatgcaggcaccccacaagccctttccccaacatgagagaactgcttcgtttattttatctcatcatttttcttgaaactattttgctatggaatgtcctactgaacatagtttgaaaatgttactgtaatagaatctcaactctgtagtgtactgtttagatggccttgctaacctttattaggtagaaatgataactacttgccttataggattgttaggaacaatatctgaaataatgtataagaagtttgtggtgtagtccctggtgtctggttaattggaagttcatgtttgctcccttctctgattattaacatatttacttagaaatatagatactatgtatagagacaggattgatcagcagtgtccttattagtccttaactgtgattcttatcaacaggaaactgtggagatataaatttagtacgactgggtccagaaaagtctattaatagtgaggttctaaagttcagtttggacagccaagtaaaccacagaatgagtaagtactgaatgtggtatatactagtgttttctctgttttgtttggtggaaaatgacttgggcactaaaggtaatttgaagcctccagaattagtctggctttgggaactaattttccttctcattgtgttgtatatgtgtgtgagtttgttagaattagaatagcatataatttt

SEQ ID NO: 43021 - DNA, 2300 bp, Homo sapien
tcaaaaaacaaaaaaaaaaaccaaaaaacttggaaggccacattgtatattcatctctgttcagtgtattctaaatgttcttatgttcagggagcttgttttctttttattgtttttttttttacagcagctgacaccttttgaaaggagtatgttttctaaccatctgcatgatttttcatcctctgaacctggttgattacttttaactttgataatgctctgatggaccacaaacatacacttgtttgtactttgaagttatttcatttagtgtgaaactactagctcatgcaatttatgatttcttaatttcccaaggccacatgagttatgaaacagataaacctgtaactgcatcaaatacacaaacctgtgaattatgtagtatattgagtatatgttaattaggactttttacctagctaagtttctctttgatagctccagaatttcagctatcattaatcggtcattgtagcttgactataagagatccacttaatctctggctcctggggttgctgtagaagttaatattaggcccaaataatttcaaactaaaagtatctgccctcctttttccaagatgggaactatctaggatcttctaggtactctcaggtaaatctcttgtgataaaattttagtgatccattttttttatctttgttgtacacactaggatgcattttaacagctttattaaggtatactataccataaaatatacccttttaaggtgtataattgaatggtttttttaagtaaatttatagttgtatagccatcaccacaacccagttttagaacatttctgttgacctaaaacaatcctttctgcccattggtagtcattcttcattcctaccactagcccgagtcaaacactaatctctcgtctgtctataaatctgcctcttctggaaatgtcatgtatatagaagtgtacatatgtggtctcttgaatctggctcctttcactccatgtaatctttttgaggcctatccttgtagcatgtattaataggccatggctttttattgccaaatgagattctattgtatggatatattacatttgtttatgcattcaccaactgatggacatttgggttgtttccacattttggtgattgtaaataatgctgtgaacataaaatgcacttttgatgatgattctatggagttgccttactgtagggtattctgggtgatacaaactgatcatgactatcatggtccagagtctgaccttactagcagataacacagattcagtattgttttgttcccctgtccatagcataacccttgtggagtcttggttggttaaccagtgcagaagcagttcaacaccaatagtctttgaggataagtttcttcagaggaactgaaagactatttgttgatttaaatacttaatgactaactgttacatttagacaaaaccctccttagggcccaaaaggtaatatatttgttagttttttaaaaagtgaaagctaatatgacttttttatactagtagtcttcctaaatttgggattgggaatagtcttatttctcagaagatccttaagggtacttctgagtttggagctttgacagactgggagatgggtatagagcattttataaactggcaggatgacatgttggtgagaaatccctaaggtctgccacaaatctaggtccttttggacttgtgagctagctgatctggttgggaagtagcattctaccggagctgtccagcagtacgttatgcactgctggaaatgctccacatctgcccacagcggagcagccacaggtggctgttgagcactgcaagtgtgactagtttgaagaacagaatttttattttttaacatttttattaaatgtaaataaccagatgtagctagtggctactgaattgggcaggacagttccagataattgtattaacctgccgtgaatcaatttttagtttttgtcacctagattctagcttctggattttactgttgcttaactttggaaaatgttactatttagcatcactttccagaatgttgctttcttaatttgcttttgtgctttgtataggtggcacaagaatggctcaactctccaaatagagagaatttctatcagttgcaagtacgaaaatttcctgccgattatataaaatactgggagtttgcaggtaagttttttcttacgcaacttggaatatatgatataataattggagatttctaattaagaggagatagcattatttgaatttagggggacacaaattttctaag

SEQ ID NO: 43022 - DNA, 2300 bp, Homo sapien
gacaccttaacggattctcagatagacagagaccttcacaaattatctttactagctcaagccagtgttattacgttcccatccgattcacctcagaactcatcgcagctgcaaaggaaagtaaaagaagataaaagatgtttcacagctaaccaaaataatgttggagatacctcccgtggacaggttattattatttcagattctgatgatgatgatgatgaaagaatcctgagtcttgagaaactcactaaacaggacaaaatatgccttgagagggaacatccagagcagcacgtttcaacagttaatagtaaggaggaaaagaatccagtaaaggaagaaaagacagagactctttttcagtttgaggaatctgattctcagtgttttgagtttgaaagttcatctgaagtgttttcagtttggcaagatcatccagacgataataattcagttcaagatggtgagaaaaaatgtttggctcctatagccaatactacaaatggtcagggttgtacagattatgtatctgaagttgttaaaaaaggagcagagggcattgaagaacacacaagaccacggagtatttctgttgaagaattttgtgaaattgaagtaaaaaagcctaagagaaaacgatctgaaaaaccaatggctgaagatcctgtgaggccttcatcttctgtcagaaatgagggccagtctgatactaataagagagatcttgtgggaaatgattttaaaagtattgatagaaggacttcaactcccaattcacgtattcagagagccactacggtttcacaaaagaagtcttcaaagctttgtacttgtacagaacccatcaggaaagttccagtttctaagacccctaagaaaactcattcagatgccaaaaaaggacagaatagaagttcaaattacctaagttgtagaacaactcctgctatagtgccgccaaagaaatttcgtcagtgtcctgagccaacttcaacagctgagaaacttggcctgaaaaagggtcctcgtaaggcatatgagttgtcccagcggtctttggattatgtagctcaattacgtgatcatggcaaaactgttggagtagttgatacccgaaaaaagactaaattaatttctcctcagaacctgtctgtcagaaataataagaaacttctgactagtcaagaacttcagatgcaaaggcagatcagacccaaatcacaaaaaaatagacgaagactttctgattgtgaaagtacagatgttaaaagagcagggtcacatacagcacagaattctgacatatttgtaccagaatctgataggtcagattataattgtacaggaggaactgaggtacttgccaacagtaacagaaaacagttaataaaatgcatgccttctgaaccagaaaccataaaagcaaaacatgggtctccagcaactgatgatgcttgccctttgaaccagtgtgattctgtagtgttaaatggaacagtaccaacaaatgaagtaattgtctccacttcagaagaccctctgggtggaggtgatccaacagcacgtcatatagagatggcagctttgaaagaaggagagcctgactccagcagtgatgcagaggaagataacttatttttaacccaaaatgatcctgaagatatggatttatgttcacaaatggagaatgacaattataaactcattgaactaattcatggaaaagatacagttgaggttgaagaagattctgtaagtcggcctcagttggaatctttgagtggcacaaagtgtaagtacaaagattgtcttgaaaccacaaaaaaccagggtgaatactgcccaaaacactctgaagtgaaagcagcagatgaagatgtatttcgtaaacctggcttgcctcctcctgcatctaaacctttgagacctaccactaagatttttagctcaaagagtacttcacgaattgctggtctttctaaatctttggaaacttcttcagcactttcaccgtctctaaaaaataagtcaaaggggatacagtcgattttgaaagtaccacagccagttcccctcatagctcagaagccagttggtgaaatgaagaattcgtgcaatgttcttcatcctcagtctccgaataattccaacaggcaaggttgcaaagttccatttggtgaaagcaaatattttccatcttcctctccagtaaacattcttttgtcatcacagtctgtctctgacaccttcgttaaagaggtcttaaaatggaaatatgaaatgtttttgaactttgg

SEQ ID NO: 43023 - DNA, 2300 bp, Homo sapien
aaaaaaaaaattatattttatgactgtggtggtataaaggctgtgttggtatattagtgttatatgataaaacaaaatatgttcaaaatatttgacaggatgaagaagtagaaaagaggaaaataacggtcaacgcgtgctgctccttagacggttaaatttgcataacggccaccacgcccttccaacaagccacgcccccttgctagaatcttccttcgccttgggcctttcccgcagtgttcccctgggcttgctcctcatcctcgggccagggttctcctcggtaaggctgtatctgacccacttttcccaagctggcccatctcagcctctttttttatcgcctgagtcaccactactaattgtttaatttccctgtctcctctattaactgtaagacggtgacgctgcatcatcgtggtcagtagtaggcgttactaaaagggggtaggggccgggtgcggtggatcacgcttgtaatcccagcactttgggaggtcgaggcggggcggatcacttgaggttggagtttgagaccatcctggccaacatggtgaaaccccatctctactaaaaacatgaacattagccgggcgtgtggcacacgcctgtactcccagctactcgggaggctgatgcaggagaatcatttgaacccaggaggcggaggttgcagtgagccgagactgcgccactgcacttcagcttgggtgacagagcgcgactccatctcaaaaacaaaaaaggggggggataggctttccagtggattttactcatttttatttatttatagacttttctgagacagggtcttgctttgttccccagcctggagtgtagtggcacagtcacggctcactgcagtctcgatctcccggtctcaatggatatccaccccctgcctcagcctcccaacaagctgggcccacaggtgctaatttttttttttttttttttttttccggagagagagtctcgctcctttgcccaggctggagtgcagtggtgcgatctcggctcactgcaacctctgcctcccgggttcaagccattctcatgcctcagcctcctgagtagctgggattacaggcacccgccaccacgcccaggtaatctttttatttttagtagagacggagtttcaccatgttggtcaggctggtctcgaactcctgacctcaggtgatccacccgcctcggcctcccaaagtgctgggattacaggcgtgagccaccgcgcccggcctcggtggctgagttttaatttttttttgtacatacgggtgtctcgctatgttgcacaggctggtctctgaactccgggctcaagcgagcctcccgcctgggcctcccaaagtggtgggattagaagcgggagccaccgcaccagcgagggatttactctgctgtgttgcgcatcgcgcgcattgttcgcaagacctaaggtctccctttcttgtaatataaaggatatacacatattcctccgaaattacacgtttatgtaatttacatttcaggtctttaaaggaaatctaaagagaaaaattacttcgtcaccgtagtacatccgctgagacacctgaggcgtggaaaaaagaagaaaaaagagggaacggaaatggccagcgggtaagggctgaccccacccgcagcagagctcatcccggagccgccccacccgcaggaagccccgggcggggccgaggtcaaggttccgcggcaaactctccccgtccaccctgacggggactcgggattggtcgggccccagctgcccggacgtgacgccagcgcccggcgtgggcggtgcaccgcggccgctcttcccatgccccgccccctggggggcaccaaaaccagaaagcagcggccggggcggggcctgcggccggccgactcagcgcgggggcggggcctacctcgcggcaacagctggttggtagctgcggctgcgggcccgcacttccgctggtggcctagagcggggcccggtatggaggtgggctagaggccgacgccagccagagagcggtgagggtagcggcgggctggaggccgtaggtcgggcgggcgtgagcgcaggcgcggcttgtgcttgcagggccgcttcggggaaccatcgcggcgcctaggtcccggtgggcggatgggggaagagtcggcgcgggctcggccgcttccctcggtgcgggggcgggagcacccctcgacggctggcggccgcctgttgccttcctgcgcgctggacccggccgctgcgaccccctgtccttccgttgtctacactgcgg

SEQ ID NO: 43024 - DNA, 2300 bp, Homo sapien
ctgtagtcccagctactcgggaggctgagacaggagaatggcgtgaacccgggaggcggagcttgcagtgagccgagatggcgcccctgcactccagcctgggcgacagagcgagactcgtctcaaaaaaaaaaaaaaattatattttatgactgtggtggtataaaggctgtgttggtatattagtgttatatgataaaacaaaatatgttcaaaatatttgacaggatgaagaagtagaaaagaggaaaataacggtcaacgcgtgctgctccttagacggttaaatttgcataacggccaccacgcccttccaacaagccacgcccccttgctagaatcttccttcgccttgggcctttcccgcagtgttcccctgggcttgctcctcatcctcgggccagggttctcctcggtaaggctgtatctgacccacttttcccaagctggcccatctcagcctctttttttatcgcctgagtcaccactactaattgtttaatttccctgtctcctctattaactgtaagacggtgacgctgcatcatcgtggtcagtagtaggcgttactaaaagggggtaggggccgggtgcggtggatcacgcttgtaatcccagcactttgggaggtcgaggcggggcggatcacttgaggttggagtttgagaccatcctggccaacatggtgaaaccccatctctactaaaaacatgaacattagccgggcgtgtggcacacgcctgtactcccagctactcgggaggctgatgcaggagaatcatttgaacccaggaggcggaggttgcagtgagccgagactgcgccactgcacttcagcttgggtgacagagcgcgactccatctcaaaaacaaaaaaggggggggataggctttccagtggattttactcatttttatttatttatagacttttctgagacagggtcttgctttgttccccagcctggagtgtagtggcacagtcacggctcactgcagtctcgatctcccggtctcaatggatatccaccccctgcctcagcctcccaacaagctgggcccacaggtgctaatttttttttttttttttttttttccggagagagagtctcgctcctttgcccaggctggagtgcagtggtgcgatctcggctcactgcaacctctgcctcccgggttcaagccattctcatgcctcagcctcctgagtagctgggattacaggcacccgccaccacgcccaggtaatctttttatttttagtagagacggagtttcaccatgttggtcaggctggtctcgaactcctgacctcaggtgatccacccgcctcggcctcccaaagtgctgggattacaggcgtgagccaccgcgcccggcctcggtggctgagttttaatttttttttgtacatacgggtgtctcgctatgttgcacaggctggtctctgaactccgggctcaagcgagcctcccgcctgggcctcccaaagtggtgggattagaagcgggagccaccgcaccagcgagggatttactctgctgtgttgcgcatcgcgcgcattgttcgcaagacctaaggtctccctttcttgtaatataaaggatatacacatattcctccgaaattacacgtttatgtaatttacatttcaggtctttaaaggaaatctaaagagaaaaattacttcgtcaccgtagtacatccgctgagacacctgaggcgtggaaaaaagaagaaaaaagagggaacggaaatggccagcgggtaagggctgaccccacccgcagcagagctcatcccggagccgccccacccgcaggaagccccgggcggggccgaggtcaaggttccgcggcaaactctccccgtccaccctgacggggactcgggattggtcgggccccagctgcccggacgtgacgccagcgcccggcgtgggcggtgcaccgcggccgctcttcccatgccccgccccctggggggcaccaaaaccagaaagcagcggccggggcggggcctgcggccggccgactcagcgcgggggcggggcctacctcgcggcaacagctggttggtagctgcggctgcgggcccgcacttccgctggtggcctagagcggggcccggtatggaggtgggctagaggccgacgccagccagagagcggtgagggtagcggcgggctggaggccgtaggtcgggcgggcgtgagcgcaggcgcggcttgtgcttgcagggccgcttcggggaaccatcgcggcgcctaggtcccggtgggcggatgggggaagagtcgg

SEQ ID NO: 43025 - DNA, 2300 bp, Homo sapien
ggttagattttgaagggaaggggagggttaaagaaagagtggcggctctacagcaaattcaggctttatgtccagcatgagacctacagaggtgggagaccagcttaatgccagtgcctaccgctgcttacaggctggagaaattataggcctgggcggggaggggcccggtgggtatggcctgctgcccgggaagatgttgataaggtattcccatgatgaggcagtttggcccttgttctggtggaacgtgatgttcctgtcactttctcccagcagaatatgataagaggcaggctgtttctcactgcctgaacccccgtggaatgtttcactttaagcaaggtctgcaaaatggcagggggcttacaaaatggtgcagtttggactaacagattcacccgtccccagcactggtcacattttcttgctctctctctgtgagcatgcacatacacacattacagaatcacctgaaaaatatctgtcaacaccatatttaaccctaagtacgtcatcatgtagcaaggacattcccatgtgtaactacaatgtcattatcatgtccgaagattttaatgtgatacaatagtgtttaatataaaatccattgcaaagttgagactctgcatttgaaaaaaaaaaaaaaaagcttcccaggtgattggtgcagttggaggaggattggaaaccactattggagttttcctgaatcgatactggatgatatctaatctctcctctagtgccagccttttgtgggttcattcatgcatcactagcaccacaaggctctgggtaagtggggtcaccacagaacacgtgacaccaatgacggacctggacttcaaggccttccatatcaacagtggacaacaccacatttacagacttctccagacggagctccaactgcacgtccacatcccagagcagcccttgcatggcaacatgagtacatacataggctcatcgtttctccaacctgcttcccttccagactttcacggaagcatagtttgtgcattttttaatcaaagccacttggcagatcacatagaagtcaggtggaacagtgaggggcaagatagtggagtagtagaaagagcataggtctgatttctggctggcccatttaagtcaccttggacaagttactgtaaacccaggtttctcatccacaaggtggggctaataatacctcattacaaggattaagtgagaaaacttgttgcctatatcgtatatgttcactatccaaaaaggttaaacgtttggttggtaaatataatggcctcgaattgatggccaggttaaagctgcccttttggctaagtctcttcaggactctgttgaaatgggaagactgggatagatctccaaagctcctgctaactctaaacttctgagacttcatccaagcttaacatccatcagcctctgcaccagatagcccctgcagacctctgacttcctctcccaccccctcccctgcattcacatgcattcacttaggctgggcgtgtgcgacctgtctgtcaccctgtgggttcactgtgtggattcactctgtgctccagctgctctggccttgtcccaggtcctccagcaaccaagttcaggacttttgcactcacttccagcctggaacactcttctgcctagattttttgcctgccctttccatttagaactcagttcaaatgtcacctcctcagtgagccctctcttacatctaaagtagcacccaccgtcccctagtcactctccatcacgtcaccctgttttattttccttacaagataatctgaaattatcttagttgatttgtcatctgtcttcccaagttgttcctggagttcaccaaaaactggaataaatggaatgcacgcatgcattagtacgtcaatggagggggattctgtcctactttcttcgtttcaggagcactctctaccccacctgacgtctaaaggacccagaaggaaaatgggtaggcaaatgtgcgcgcctccaaggcctagcggcagccgtgttaccatggcagcgtgacgccgagggggccggaaggcgacgcactactacttccgcttcctcaacagcagcacttccgggttgggagaaaggtggcggcgctttcggagggtaagttgaaagcgcctttgttgtttctgtttttcaaaatgcgcgcgtaaaaactcagcgtggggtggtgggtttccccgtcttctgggagacccgccttttggcctgaggtctccaggccgcggtctttgccccaggccttatctcggggaaac

SEQ ID NO: 43026 - DNA, 2300 bp, Homo sapien
tgaccccacttacccagagccttgtggtgctagtgatgcatgaatgaacccacaaaaggctggcactagaggagagattagatatcatccagtatcgattcaggaaaactccaatagtggtttccaatcctcctccaactgcaccaatcacctgggaagcttttttttttttttttcaaatgcagagtctcaactttgcaatggattttatattaaacactattgtatcacattaaaatcttcggacatgataatgacattgtagttacacatgggaatgtccttgctacatgatgacgtacttagggttaaatatggtgttgacagatatttttcaggtgattctgtaatgtgtgtatgtgcatgctcacagagagagagcaagaaaatgtgaccagtgctggggacgggtgaatctgttagtccaaactgcaccattttgtaagccccctgccattttgcagaccttgcttaaagtgaaacattccacgggggttcaggcagtgagaaacagcctgcctcttatcatattctgctgggagaaagtgacaggaacatcacgttccaccagaacaagggccaaactgcctcatcatgggaataccttatcaacatcttcccgggcagcaggccatacccaccgggcccctccccgcccaggcctataatttctccagcctgtaagcagcggtaggcactggcattaagctggtctcccacctctgtaggtctcatgctggacataaagcctgaatttgctgtagagccgccactctttctttaaccctccccttcccttcaaaatctaaccgaatctaggtgaagcctatatgtattttcattgtattcttctttcgactttcaacttttctgtaggtttgaactttttcaccaagttgtgggtgggtgggtaaggggatttttaaaaatgcagcatctggcctggtgaggtggctcatgtcattatcagagcaagactccgtctcttaaaaaaaaaaaaaaaaggagagcctcagatgccatttccagatattctgatttagtgagtctggggtgagtcctgtgaatcttcgtttttctttttttggcacatggtctcattctgtcatccagactggaatgtagttgccgaaacacggctcattgtagtctcaacctcctcaagtgatcctcctgcctcagcctcccccatagctgggaccacaggtgtgtgccagcacacctgggtaatttttttaatttttggtagagatgagacctcaccatgttgcccatgctggtctcaaactcctgggctcaggccatcctccctcctaggcttcccaaagcaatgggattacatgggtgagcagccaagcccagcccaaatctgtatttttcaatttcccttcattctgttgcttaaatttgggaaccattgatgtaatccaactctagcgtttccttgtcacccatctcacaggaaaaaaagaaaaaaagcccttaggatccaagagggtgacttgcccgagtcctcccagtgggtcagcatcagcatcaggcttggaatgcatttagtgctctgtctcaggtgtgtgtgtggcgcaaagagcagaggtggggaggggttgtgagtggaatgggggtgagcagaggatggagtcttcgacttggaagacaaatgtaaatgaccctctatgagccacgccgctttgaacgcaacccactggagattctcggttctcctgtatcgattcaggaaaactccaaacaagtccacactggtagccaccaagagtttcttgaaagaaaagtacaagccgagccgggctctgttggcgtcccgtcgccaaggagacgggccgttgcattcgtcctccaggggtggtcttggttttctttcctctcccagtctgcaacgcggggcccaggagacgccctgaggatcccgcggggctcctgcattgctccggggctctttgcgatgaggggccggcgcgagcggggcgcgcctggctccggaggggtcctggcatctgagtttccccctcaggatcccggtggtgcggcccgggccgcccggcaggcccttcggagctccaggctgtgcccgacgtggggaagcgcgcccaaaccagcccgcgggccggctccccggcgacctcaaggatgccagaggccaggagctccggcccggacctcacgcgatggaggaagcagcagcagcctgtgcgccgcacggtcagccaggtctgcccgcccccgcggcggcccctgaccgtggcggacatccgttccggcatggagaacgagcggctggg

SEQ ID NO: 43027 - DNA, 2300 bp, Homo sapien
gcttccaatctgccggcgggcacagggggagagcgccgggagccgggcgcggggccaccgccgacctagcccgagggaggagaaagtttttgctcctcccgaccacgccaggctgcccccgggagaattctgcgtttagagggcatgcgggtgccttacgatttgctgcggtctcggtcgctgagcccgacgtaggagccggggtagtttcctgggggctgggggtggtggcaggggcgtgcaggccgggctggaaaggcctggcttcccgagcctgcggggggtaaaaggacgcctctgacccgcccgacctcgatgaaggcgtttgggctccgctctgtccgccctttccgccgcagacccgggttgcgatccctggggctgtgcagagaggatccaggcccgggacacagttcggatctgcccgcggtcctgggccccaacgccgggggctgaccctagaaaggcgctggactggagcccgtgacggggtgggaagggcgagggggcgcatgattcacaatgaaaaggccacgtttccagagttgccttgaaaatgcatccctggacgagctctggctctgcgtggaataagaagccgttagcaggcgtctacactcgcactcggaagctcttgcgtgggtcctgttcagaggtacaacagcaccggccccccaagaggtgcccatgggagaggccataagtggggggtgggcgggttactgccttctttgtcccttgagctgcctcccttgagccacacggatttctcgaggtctccctaacgcccctgacaagatcttcccaagtcctccaacctcgccctgaagtgaagccatcggtctcgtcacttcccaggaagacacctggctttccccactcccgccaggcccacagggtcccaagaggccagagagacaggactgcaaattgtcctacatgggaaacaccgagagcccaacagaaatgccgcaaacaacataacttgaattttcttccccacactagaaaaggggttctcgacgcgcgcgcgcacacacacacacacacacacacacacacacacacacacacacaccacacttcttcctccgctggttttagtccctttctgctgctggaggaagaaaaacgggggaaggaaaaaggatctacaatagacctgccgacgaataatttgaataactgtgggaaagggtcggggaacgctaaaaaaaaaaaaaaaaagcccagcgcacatcccagcccaccgcagcgcagtcggctcggccccctcccctccagccgtaccccccttggctaatcaccctcattaggagcttcgtcaccggcctaatgaaagcaaaccgtgtggaaatcgccggtaaacagttgggtctgtgctgtaattaattcggtgtctcttttaatcaaactgaaagggaatcgggcagcggcttgcggagccgtgacatcacccccaaaatcggccagagccaatcagcgtcatcactccggggacacgtgggcgagtccccttaaaaaaacacacacaacacaacgaaaaaaaagaaacaacaaaaaaaaacccagacccaaagtaaaagtgacacaagttcattttttaaaggaagggggggaggagaaggcgcgcgcggaccggcagagagctgccgccgaggagcagggaggcgctgtccacggtgctgacgggcccccggagcggcgagggcgcggagagaggacctccccggccaggtggagagtcatgagccgcgggcagccgccgccgctctccgcggtgctgatgccgccaggtgcgctcctttccgcccgctgctagcgcggcccgggcccgcagctatctgcggtgctgacctggccaccctcagccaccacttgcctggaagaagcgtgcggtttggatttttaaaacgccattctttatttagattccaacatcctcgcgtttcttctgtgccaagggggccctcgggccgtccgtctccccctttgctctccccaacttggcgcgccctccctcccattcctccctgacactcccaccaccccccctcggctcggcggctcggcgcgatgctgcagaagacgcactgagcccttttggatctaatgcgcagaggaggttggcccagagctcccgggctcccccaaggctgaactccgtccaaggtgcccgcaggctccctgcccgccttccccatgccagcccgcagctaggggcaggggcagcggcggctggggttgggggtgggtggggagcttttggggaggacaggtcgcagcttggctatggaagg

SEQ ID NO: 43028 - DNA, 2300 bp, Homo sapien
taaacaaatcctacttgcagctaagttgctttctactggatcaccatcaggctgtacctgtgaatttctgtatgtggcttgctagtgactatgatgaacaaattgcaggactttatgcaccaggagtcactgataattcagctaagctagaaattggtaggtttagatcagtaaaaacctataaactgcctagagagagcagagatatccaggcaaaaggaaataattcttatctctttgaaaataaagaatagactgtagtatattaaatccttcctcaaagtcagcaagcaagatgaaatggaactcatggtttgccttaccttaagcagtttctggacagtgtcaaagctttgtagagctagctgtaaaaattttaaaagttatagatgatgaacaggatccccctttttttttttttaaagacaatttaatgtgattaggatccaaacttggacctcaagttaagatttaagaagaaaaaaaatcctatacacagaatctaatataccttgttcttagactggttctgcaacctgtcagtttgggcaaagagggtaaagacaacacttctatttcttggacatacacaaaaatagtgttttgtgctccctctgctggctcaaattcccagagtgccacacagagaagttcaagtctgtggtgcacaaaaacgtaagagaatgaaacaaagtaacctgaatttgactctccttagaaagagaaagaatataatatgtacgcagagtaaaccacaatagtgacgcaacagggtagcctctgggaacttcgctctcaaggagcgatgactgtattctacaactgtgccaggatatctgaagcctgggagatggtcgctcctcaagtttatatcaataaaacaaaagcaaaccaacagctccatttgagaacaaagcaagtgaaaattaaagtaggctacaaccattaacaaccttcaaaaatgcctcatacagaatcccgttcttaaagaacgtatatacagtttccacatatttagtattcatgaagcatcctcgagaagtagcaagtttgctgctgtaaaaattttaatagcttctgtgcctgctccttcattggactgagctgagataggggactgcaggctatatgaaaagctgacttcaaatcatctctgtgatcaattctctgtaaggaagtgattagcatttgatatagaaaccacataccctaatctgaagttgcctctgtaggcaaataaaatagatcagatagaagagatttccaccaagaaagaaaaaaatattgaaaagtttaacttttaggaacaagtaacatttttggtagcagtagcttcttaaaaaaaataaaggttcattttcagagccaactgcttttggttttgaataaagttgctaaaaaattgcatttctgtaggtttttttttagcaacttaattcaaaacccaattaaacagacatttaatagtatcattagtttctagacaataggaaaatacttttccatacttatgattctcagagactacttgaatttttctccttgacaagaaccagaaggatggtttccaggcaaatggaactggtgtgcagtggcttgtgcagtagggagaaacatggtaaaaccacttttaaattcaacgggacattagtgaaagcatgtgcttaaaacttgtcccaaaagggagcctgcttacctctctcgttggcacgagcaccagggcataggggccatcactgcgctgttgacacacagaaaaaaaatgccatgagcaggataaacaaaggcagactccaaacggacaggacacaggggtggccggttgtagaacatcagaagcactcttaatgaagaaagggacaaaataaggttgcccactgatgtggtctggctgtgcccccacccaaatttcgacttgcattgtatctcccagaattcccacatgttgtaggaggaagggcaggggggcaggagtgaggtggtaattgaatcaggggggccggttattctcgtgataatgaataagtctcacgagatctgatgggtttatcaggggtttctgcttttgcgtcttcctcattctctcttgctgctgccatgtaagaaatgtctttcgtcctctgccatgattatgagacctcccccagccatgtggaactgtaagtcaaattaaacctctttgtcttcccagtctcgggtatgtttttatcagcagtgtaaaaatggactaacacacccactaaccccattattctagaatactgttctagaggtcctggcccatacaatcagacaagaaa

SEQ ID NO: 43029 - DNA, 2300 bp, Homo sapien
agagggaactgtgctggcatcttgctgttaaaggacgtccacagttttagagaagtaagggaagaagagtattttggtgtgtgttctacaaacaaatggacactttaaaggaaaaaaagtgagttctccagactcatgagtaagaagaaaaaaatatattaacttttaggcaggcttggtttcctctgcactttcggttacagcttactaccccttctgtagggtgggttacctaaacttgttttctcacctggggggtggatcagggtttctcagccttggtgctgtggacattttggactaggtcagtcttagttttggggactgtcctgtgcactgtaggatgttcagcagcatcccaggcctctacccactagatgccagcagtgcccccctcccctggttataacaagcacaaatttttccagactttgccctgtgtccccagggagttagggcgggtggcagaatcgccccaagtagagagcaccacctgggtggaggaacttaatttgatcatagtagtcaatgttctctcaatagtttctcctttcttgtgtaatttccgttaaatattttgtatcaaaatattaattaaagctttttcatctcctcttttagatttccacaataaatacggtcttaaaaatgtctagtatgaccaggtaagaacttcaggctcctcttgatttcttaggcattacgtgggtataaccggacgaaacctgtgtgtgcaaggcagagcaaatttgtgtcttggcgttggaacacagtgccaggttatcgaccataaagggttgtcgtctcacttagctactcattctctccacctgttaaatggaaagactggctttccatccagttctgcccttggctctgaaccgcaagagacgtctcatccagaaggtgggctgcatgagcgccgctgttttctgtgcttccctgaaaagaatttggccaaaatatagcatgtgaccatgtcgtttcttagtagtaagaattagggtcaaccaaaaagacaagagtaaatgttcagttggatagagtgggatactgaaaaaatgttttcaatgtttgttacagggaatgactcctggaaaataaagaagtaaaataggtgcgaggagatgagcttccttgttttgagtatttgtgcttctgtgcattttcataatgattttttacttttactagtaaaaattaataggaatattaaagtccaaattaagggacctccccacaagttttttatcaaccaaatttaagtgatttttgtgtctcttttgtttcttgttttaaaatacatgtgtagacacacatttcagcatgtccataaccttttcctggagaatggacagctgctgctggctctctgaatagttggcgagcttcctcctgctatcctgcatggaaacctttccattatgtttcgttgtgtttcatattcctgttagtgagggcaagagtgtgtgatacacttggtggtaactctgatttgttgtcatgcctgtttctttttctttttttttttttttttgagacggagttttgctcttgttgcccaggctggagtgcagtggtgcgatcttggctcactacaatctctgcctcccaggttcaagcgattctcctgcctcaacctcctgagtagctgggattacaagtgcgtgccatcactcccagctaattttttgtatttttagtagagatggggtttcatcatgttggccaggctggtcaaactccttacctcaggtgatccacccacctcagcttcccaaagtgcagggattacaggtgtgagccactgcagtcggctgcctgtcccatttttaaaagaattagtttaatagaatggccagtctctggtttgcctcaccattttcaggctaagttctaaaaatataactagggtttgatctttataatcatcaaaagtttcttcacacctttatttgaatgctttgatagcttctaaggaggcagttgccagatgaatccaagtgtgggcagttgccttttatgtatcctgcgtctctgccagtaactgggtaatataggtaaagtgtgttctttttttcgggtggcccagtgttcagaagcaaagtattcctgtgttgctggaaggcagagatgctctcgtgagatcccagacgggctcaggttagtctcatttcatctctgccctttttcatctgctcaggcccatggtcatgcactaggttttgccatgcggtgtctgggttggtggtggtggcagttttgtttcgtttgggggagggaggccatgcttttgatta

SEQ ID NO: 43030 - DNA, 2300 bp, Homo sapien
aaattattgttctcattttatagataggaaaagtgagaatcagaaagattaagtgacttgctccaaggtcacagagctagtgtgcagcaagggcagcatccgaatcccaagtgtatcctattccaaatcccatgctcccagtggctcttctatccttctccccgctccacccagatgcagctacacttggctagctggactccttactgccaaacatctaaatcctaaagtttgatgatcactttatgattttaatcagtctttctgtcctgtagtcctcttttctaagagacaaatcaactatcctagaaaccagttttcagttactgcttaagttaattctagggcatcttacccctctctagcaatgggattatatcaatgaaaccgattttcctatccccctccattgcatggggatgaaaatctgtcccatttttgaaagctcttcaaaaaaactcctagttgccagtcctcattcctgaaacaaacgaaccttcctcatggcgaccaaaagagttaaactcaaaaatatctgaagagacttattctgagccaagtatgagtgaccatggcccatgatccagccctcgagaggtcctgagaacatgtgcccaaggtggtcggggtgcagcttttttttttttttttgagacggagtctcgttctgttgcccaggctggagtgcaatggcatgatctcggctcactgcaagctccgcctcctgggttcacgccattctcctgcctcagcctcccgagtagctgggactacaggcgcccaccaccacgcccagctaattttttgtatttttagtagagacgggggtttcatcttgttagccaggatggtctcgatctcctgacctcgtgatccgcctgcctcggcctcccaaagtgctgggattacaggcgtgagccaccgcgcccggccgcggcttggttttatacattctagagaggcatgagacatcaaatacatttcagaaatacactggttttgtccagaaaggtgggacaactcaaagcgggggcttccaggctataggtaaatttaaacattttctagttgacggttgagtttgtctaaacacctgggatggatacaaagaaaatgctcaggttaagataaaagattgtggagaccaaggttcttttcaagtctttagtggctgcccttagagacaacagacaagtgtttcctattcagatctttgaaaggtggtagactcttaatctctttaggattgggagggcctggaagaaaaagatctagctatgttaatagagattctttgcagatgcaaatgtccaccccgcccgccccccccaaagaacagctttgcaaagccatttcaaaatgtggcaaagaaacatgtttaggggtaatattttaactttcttctttgtcacataatgttaggccagagccagtttggaaagtaagtcacgatatatagggttaaatgaaagccatctgatgagaatttatggtttgtagggcatgactcttcccagacaggaatgtgggcaagataaaaaaaaaaatcagagcttagtccgcactcagtcgaggaaactggcttagagaagttaagctttggcctgggacttgcgccggaacttcaggtcctaccttccacgggaaacagcctctaattccttcctttacttttctaggcgcaggagccagctccccgcccctccacaccgctccactccccgcttccaggcgcatccctgcgggtggtgttccggttagagacacgtgtttcggcgcaacttgtcccgaagctgcccggtgtctttctcccgcttaactccgtgaatgactcgaaacccgactccaaggcacggctgcagctcgcggcgcgcccacagccgggccgcgggtggggacggagctgaagccgggtcagaactcacccgactcgcctgggctgggggacgtctggagaacgtcctggggttgtcgaagagcgaaccgtcggcggctgccatggtctgcgtgggtgacgcgtggtgcagcagcgagcccggtgcgcagactgctgggcccgggaccccacgtgggacgcgcgaggaccctgcgccaccgccccttccgggtccggaacggctccagctgtacggactcgtcccgaggggagccggggacggcggcaccgggcgggtagggacaagactaccgcgcgtgcccccgcctggtggcagcccctctctgcgtccctcgcggcctggcaaaattacattcggccgagagttcacgctggggaagctctctgaatgcctctgagaagc

SEQ ID NO: 43031 - DNA, 2300 bp, Homo sapien
ttcatgacttaaacgtgtatgcacatgggatgaatgcctcattcctgccgcctggaatgccctttccttccttcctcttacaaaccaaacactaccttctttaggactgctgcagattcaccaccagatgacctgccccataagtctctccccttactactccctcctttctttacattctctctgctaaggtattcgatgtctactatactgacatacatactttccttgagttgctgtgcggatgaacatccttggaaacagttaaattcctttacagcagaagatacaccttttaaatcacctttcttctgcctccctccttttgtatttctcaatttcatagggttgcatctgtctatctgatttgtttacacttgaacaaatgtgttcatatcttcttcaagaagatcttagaggaagcttagtcatacaagctgactaacaatctaacaacagaaagatgtttgaaacttgaattaagtatgctacaaagtgatgagggttatctgcaccctacctatagctaatgactcatattttcaatggttttccaaaataagagtttacgaacacataaacatgttctctatgtgcggatacacatctttacagtgcttatcactacctgacaggaccttatcatttgtgcttgacttgccaaagaatgtaagcttcatgagggcaggggttctgttttgtacactgctttatttccagaacatggggcagcaccaagcagaatggtattcaaatatctattgaatgtatgaatatacactgacagttcacatgtaagcgtacacctctatcaaggatatatggaaagtttttacacctctaagcaactaaaaggaacgctatggcttactacttgaccttgcgcttgaagtttaagataggtagttgtttcgaatctttattttcattcaacatcccaaagatgtttagctagtaaagaaaaactaaagtacaaaccccgagatccagtatttacccgtttgcccaaggagaggcgaggaccattcataataaagtcactgaaacaattaagacaatggatgggaccagtttttcttttctgaagctaaagaggcgcgagaggaggacacacacagtagacaaagccagccaagaacctcggaaagtcggccccaaacaatagcagcaacgacagaggcaggccccgggttggatctacagggggtggagtctcagaaagcaccatcgagtaacccgctccatgtgcgggcccgacggaggggcgaaggaggggttcctgggactcaactccgggaagccccctgggtgtgtacctgtgtttgcggcggcgggtgacctggggaaacagggtgcagacagctgcagagcttttctttttttttttttaagctgtggtaaccctggctgcttaataaatccccagcgctcggtgcgaagagggaaatccccggacagagtgtgggatcggattcccctgggacggatgatgcggccgcgagagggggacaggggaagaccccagggatggcgggggatgacttactttgaggagacagctgttgagcggtgcgggcaccgaggtgcggtggataaccaggtcctggcccgggttgtgcacgtcgcagatgagctccagcacagcgatgctgcgggccgtggacacagacacgcggtggtcctcggaccaagccagcggttccaggccgctcaccgcatactgcagcttcacggccggctcccgccgagtcaccatgaggcggaatgcagcgctgggccccggggccgcgtccgctgctggctccttcccgcccgcctcgccgcccccctctccctcctcctccccagacggcgcaggcccgtcgtccgcgggccccacccgggcctggtcggccgtgttcatcttctctcaggtgcagaggtcggacgccctggcgctccacgcagtcgcgcgaccacctcccggaccgccgccgccacccccagcgccctccgcggcggttttctcccctcaggccccgagcgccgccgagccaagaaggaccccgccgttgccaggcaacgcggccctaccaggtggccaaggaactgcctgtccagaaaaaggacagcgagcggggagccccgaggacccccttttccctgcccagggattgagctccagagcctgttagggagctacccagacaggctttagttcctaaagtgctgaggaaacgcacggggcggtaaaggggaggctcgtcggtgagatggcgccggatctcgcttctcagaggcattcagagagcttccccagc

SEQ ID NO: 43032 - DNA, 2300 bp, Homo sapien
ctatttttagtagagatggggcctcactatgttgcccaggctggtctcaaactcctggtctccagtgatccacctacctcggcctcccaaagtgctgggagtacaggtgtgagccaccatgcccagccatgggggatattttttaactctttgttgcactctgattttctgatacatccccagttgtccagacttcatctaggatgtagtaagtggttctgagttaatgtcttccaagtgctttctgtgtcctggagggtaattcctctaggcttgaacatttaaactcattcaagtgacttttattatatccatgtgtgtcttaggctggaatttccttttaatcatgttctaccctttccagtttaaagagcagcctctttgaaaaaggaaattgacactaaaaaataattgaagcattctttttcttttacccatttctctaaagacagtggataaagtccttccttcttcctgctttcaacataacaaaacatcttttggctagtctctgctctttttggctttagctttcctatttttttatggttctgaaccactttcttttggtcatttatctcttcctccatctttgatgtccctttaaaatcttattaaagagctcacagctgggcacggtggctcacacctgtaatcccagcactttgggaggccgaggcaggtggatcacttgaggtcaggagttcaagaccagcctgaccaacatggtgaaaccctgtctctactaaaaatacaaaaattagctgggtgtggtggtgcacgcttgtaatcccagccacttgggaggctaaggcaggataatcacttgaaccctggaggtggggtttgcggtgagccgagattgtgccactgcactccagcccgggcgacagaatgagactctgtcttactgtcccatacatgttacgaacttggaggagggagagatgaatgaaagcttgaatgacctcaaaaggccttatagggagaattagatctggtaggatagatgggatttacatagggagaagaactaggcaagggagccggggaaagctgaggtgggaatgttcaggaatggcaactagaatagtctgattagagtgaacattattctatagaaacagtaaacaaagcagttggagttggctctcgccattatttgtcaatgaaatttcagataaaggacctaaagctggcatttgtattgcaaagatgttgtaaaaatctaaatatcaatttgtatcaaagatatatatagatacatattttcataaatttgttaacaccttttttgttttgtgactagttcaggtaaatgctctgttgaatcttaagaatcaagtacatctctcttgcatatattaattctaagaagaatatgggaaccaggctatgaataatgacattctgacttattttaaaaaattgccatctccttgagtaaatgctcatctgatagtttttatatctcttattttcaggttggctcaaaaacagaagttgctgagtgcaaggagaaattcgccgcctccaaggaccccacggtcagtcagactttcatgttggatagggtgttcaaccctgaggggaaggctttaccaccaatgagaggattcaagtacaccagctggtctcccatgggttgcgatgctaatggcaggtgcctcttggcagcactgaccatggacaatcgcctgaccatccaggcaaatctcaacagactgcagtgggtccagctggttgacctgactgagatctatggagaacgtctttatgagaccagttacaggctctctaaaaatgaggccccggaaggaaatctcggggattttgctgagtttcagaggagacacagcatgcagaccccagtcagaatggagtggtcgggcatctgtaccacccagcaggtcaagcataacaacgaatgccgggacgttggcagtgtgctcctggctgtcctctttgaaaacggtaatatcgccgtgtggcagtttcagctgccgtttgtaggaaaagaatccatctcttcatgcaacacaattgagtcaggaatcacctctcccagtgtattgttttggtgggaatatgagcacaataatcgaaaaatgagtggccttattgtggggagtgcttttggacccataaaaattcttcctgtcaatctcaaagcagtcaaaggctatttcactttaaggcagcctgttatcttgtggaaagaaatggaccagttacctgtgcacagtatcaaatgtgtgccactttatcatccttaccagaagtgtagttgcagcttagta

SEQ ID NO: 43033 - DNA, 2300 bp, Homo sapien
acaaagcagttggagttggctctcgccattatttgtcaatgaaatttcagataaaggacctaaagctggcatttgtattgcaaagatgttgtaaaaatctaaatatcaatttgtatcaaagatatatatagatacatattttcataaatttgttaacaccttttttgttttgtgactagttcaggtaaatgctctgttgaatcttaagaatcaagtacatctctcttgcatatattaattctaagaagaatatgggaaccaggctatgaataatgacattctgacttattttaaaaaattgccatctccttgagtaaatgctcatctgatagtttttatatctcttattttcaggttggctcaaaaacagaagttgctgagtgcaaggagaaattcgccgcctccaaggaccccacggtcagtcagactttcatgttggatagggtgttcaaccctgaggggaaggctttaccaccaatgagaggattcaagtacaccagctggtctcccatgggttgcgatgctaatggcaggtgcctcttggcagcactgaccatggacaatcgcctgaccatccaggcaaatctcaacagactgcagtgggtccagctggttgacctgactgagatctatggagaacgtctttatgagaccagttacaggctctctaaaaatgaggccccggaaggaaatctcggggattttgctgagtttcagaggagacacagcatgcagaccccagtcagaatggagtggtcgggcatctgtaccacccagcaggtcaagcataacaacgaatgccgggacgttggcagtgtgctcctggctgtcctctttgaaaacggtaatatcgccgtgtggcagtttcagctgccgtttgtaggaaaagaatccatctcttcatgcaacacaattgagtcaggaatcacctctcccagtgtattgttttggtgggaatatgagcacaataatcgaaaaatgagtggccttattgtggggagtgcttttggacccataaaaattcttcctgtcaatctcaaagcagtcaaaggctatttcactttaaggcagcctgttatcttgtggaaagaaatggaccagttacctgtgcacagtatcaaatgtgtgccactttatcatccttaccagaagtgtagttgcagcttagtagtggctgcaagaggctcttatgtattttggtgtcttcttctgatctccaaagcagggctgaatgttcacaattcccatgtcacaggccttcactcactgccaattgtctccatgactgcagacaaacagaatggaacagtctatacttgctccagtgacggaaaggtgaggcagctgattcccattttcacagatgttgcattgaagtttgaacaccagttgattaaactctcagatgtgtttggctcagtgaggactcacgggatagcagtgagcccctgcggtgcatacctggccatcatcaccactgagggcatgatcaacggcctccaccctgttaacaaaaactaccaggtccaatttgttactctcaaaacctttgaagaggcagctgctcagctcctggaatcttcagttcaaaacctttttaagcaggtagatttaatagacctagtacgctggaagattttaaaagataaacatatccctcaatttttacaagaagctttggaaaaaaagattgaaagcagtggagtcacctatttttggcgttttaagcttttcctcctgaggattttatatcagtcaatgcagaaaaccccttcagaagccttgtggaaacccacccatgaggactcaaaaatcttactagtggattcgcctgggatgggcaatgctgacgatgaacagcaggaagaaggcacttcttccaaacaggtggtgaagcaaggcctgcaggagaggagcaaggaaggagatgtagaggagcccactgatgactcgctccccacgactggagatgctggaggccgtgagccaatggaagagaaactcctggaaatccaagggaaaatcgaagctgtggagatgcacttgaccagggaacacatgaagcgagtcttaggagaagtgtatctgcacacctggatcacagaaaacactagcatccccacccgcggactctgtaactttttaatgtctgatgaagagtatgatgacagaactgcacgggtaggtgtttattaacaaaaactctgaaattgtaaagcctgctttcttcatgagaaagaaatgacctaaattgagttcctgaagctcaacttttgctttgacattttttaggtaattta

SEQ ID NO: 43034 - DNA, 2300 bp, Homo sapien
cagaatgcccgtctctcaacgctacagtccggtattcatcccttttgactgtcttttccgaagctaacagttgataccacttgtcctccttttgcagatcccgactggattaagaggttactgcaaagcccctgccctttctgtgattctcctgtcttctaaataatcagtgacgggaagatggaagggcatgatgaactctgccatagaaaacttcctccagcctgaagagaaggatgcactggaggaagccggaccctcacgagtggagagaagtccttggtgattgtaaagagggcccctggagctcatttctgaatcgcactctccatttccagagactaaaggatgtcctttgaaatggctggactcagagagttggagtcgttttgagatgagcattagccccagctttgtaaccaatgaggaacacttacttatttttaagtatcttgacagaagcaatttgaacacagtgtcccgtcatttctagaaacagaatggtctcttctagagagcttggataaggaccttgctgggttgagttaggttttaatccttgctttggtttggaactgccttcgggctccagaacttaaattgcttggtccgtggcatctgatgtaccaacagagattaaaagtgtaaagcaacacatgggctgatgttttgttctcagaaaatagctgctggtctgcatccctccattcttgttttttatgcatatggaaaacattttcctaaaactctatattcttaagttgaagccaagactaaaatttaatgtgtcaaatgatctggtgactattataatgaataattgtgacttatttttcattctctcctgggtcatcaggtttcctgacccaactccttaatccgtataaagatgtcaaatactgtagttcacccacgccacagccctgcttcagacttaactgtggtagcctagatgagctatttgtacacagaggaaaaaaagatattttcctcttttagtaataagactttcagtatttttaatgttgacatttccagatgtttcatttagtatccaggggtctgtctggagacttctagagagggacagctcagaagtgagacccttgagctctggtgctgtaagcttgtgcaattaagttgaacagagcctgggaatttctttcctctgcacagtcccttgatatttggaatccaggttctgcccccaacccctacccacccagtggtctgttaagatgtctcagatggggctgggcttggtggctcatgcctgtactctcaacactttgggaagcaaaggcaggcagatcacaaggtcaggagttcagcctaaccaacatggtgaaaccgtgtctctactaaaaatacaaaaattagccaggcgtggtggtgcacacctgtaatcccagcactttgggaggccgaggcagacgggtcacttgaggccaggagttcgagaccagcctgggcaatatggcgagactccgtctctactacaaatacaaaagttagcctggcatggtggcgcatgcctgtaatctcagttactcaggaggctgaggcaggagcatcacttcaacccaggaggcagaagctgcagtcagccgaggtggcaccactgcacttcagcctgggcaagactggagactgcctcaaaaaaaaaagaaaaaaaatgttggtacttagatgataccatgacggcaacctccccacccccaccccgcattgataggtagtgcagaccagcccttggaggcacttctaaacagtctgctcagaaatgttttctgtttcctattcaaattgctgttttgtctcctatgtttaatcatgtatttgctattctgcttatttttctcatttggtggtaatttcaagaagagcgtttatccactattgattttcaagaaagaaaccaagcagcattgaaatcatgagtaacagaattcagaacattgtatggtggaagtcatttgtgtctgcagctgttttttcactttacaataaataagagtaaaaattgagatcatgtcaaaaaattattgcagttttaatcattatggcatagtttcacttcccctccccccattagaatcagtggagatttgttcttactagggaattttggactgctgccatttaaaacttaggtttttatttaaagcagttgtgcatttttgagaaaatgtattgggagtaactagagaggatctcccaaatttttttgtatgtctctctaggagtaaacatggcaacagtttttctagaacgtggactcactgcagggactggaccca

SEQ ID NO: 43035 - DNA, 2300 bp, Homo sapien
gatggaatgagatgattttagatggttcacacataaatattttacatttcatgtttaaatcattgtgtatttaacgtgtattagaaatataagtacatcaaatcaataatttcaaggatatcacttaggatgaggcaaaagcggctatttaattttttaaaaggtgagttgatttaaacaagtgattagtttaaatggaggtgcagtagcggttatgcaaatctgtacatgtgatacaactgcacagaactgtatgcacaacaaaaacatcaatgcaggtaaaaatggaggaaatccaaacaaggcctacagttcaggtaatcctattgtaccaatgccagtttcctggttttgacaatgtgctacagttatgttagatgttatcacgggggcaatgtgggaggggagaccagaaatccatactattttttaacttcctgtgaatctaacattattttaaaatcaaaagtataaaaaatggaaatggtcaaaaacatggagggaatccacagatgactaaggactggaaatactggactgaaagctttcttgttgggaggccgaggcagaaggactgtttgagcccaggagttcaagaccagtccgggcaacatagcaagacctcgtctgtactaaaattaaaaaaaaaacattagccaggtatggtggcctgcacctgtagtctcggctactctggagggactaaggcagaaggattgcttgagcccaggagttcaaggctgcagtaagccatgattgtatcactgcactccagcctgggcagcagtgcaagaccctgtttcaaaatcaataaaagctttcctgggcaattcctccaacaatcaatgtggaaaacacaccaggttctctagagcagacaacagggctccagatgatcccccatcctgccctgacctgctgacttctaacccagctagctatttgatttgtgattggccactcaagcagttttaggaatctcttgctctccctctatcagttaacactttccgagggaaatgtgtttgatggaggtgcagacacgggtttcttcgtctgggctcagctgtctagtgtgcagggcagaacctcaaatgaccacagacaccactatgccctccatgccatgcccctggggatggggtgtaccctgggaagcagacaaatgatctgaaaactgagctccagcttccccttgcctctcagaacctttgagtggctgagagttcttcccctccagctcctgaaagccttgacctccaccacgtgcaaaagggaaaactggggccctggcggggacggggcctcgcccaaagtcacacggtgagctgggggcccagtcaggcctggagccagaatgagagcttcggagctgccggggacgtctggccctgaggaggagggaccaaggtgggagatgctgctgtcccagaggcggccctctctgaggatggagatgccagcttgaactcggacaatgcccacctcagaaacctgggccgagaggctccccacaaattcgacagatggtaattgtcagcgccgggagagcccctgggagaccacctcttgcaacctggcatttcacaggtggggaaaccgagaaaaggaaaggactggttccagaccataaggcccgctggcggcacagccaggaccaaatcccggctcgagtggcccccttcctccccctgggtccgcctgaggcaaacccgggcaggaccaggagcgtccccagctcgagggccccctcggggtcacggcgacacacgaatcgtacatcccgagttgggctgcttcgtgggcgcgcgactcggccccagctgcgggtcccggccgcgcacccgacgtcgcagtggaggctcccgagccgccgccagcgtcgcgacgggcaggggtgtccggtcacctgcatcaactcgaagatgtggttctcctccccgtactggggcatctcgggggggatacggtgcggggcgatagtggcgtccatgtagccgtctcggctcgccgctccctagtaaccgcgtcgctagggccgccgcgccgactgcgtcatcagcacgcgccgcggccccgccctgcaggctccgcgccgggcccagatacccgatcctcggtcgcgcgggtcgcccccgccccgacctccccggctgacgcgctctgcggctcgggcaagttctttccccaaccccggcctcgcttttcccatttgcgcatcttagcgggggacaccctcaggtggcttccagctgggcctcctcgtatctgagacccccgacgaaacccagaaggggcaa

SEQ ID NO: 43036 - DNA, 2300 bp, Homo sapien
gactgaaagctttcttgttgggaggccgaggcagaaggactgtttgagcccaggagttcaagaccagtccgggcaacatagcaagacctcgtctgtactaaaattaaaaaaaaaacattagccaggtatggtggcctgcacctgtagtctcggctactctggagggactaaggcagaaggattgcttgagcccaggagttcaaggctgcagtaagccatgattgtatcactgcactccagcctgggcagcagtgcaagaccctgtttcaaaatcaataaaagctttcctgggcaattcctccaacaatcaatgtggaaaacacaccaggttctctagagcagacaacagggctccagatgatcccccatcctgccctgacctgctgacttctaacccagctagctatttgatttgtgattggccactcaagcagttttaggaatctcttgctctccctctatcagttaacactttccgagggaaatgtgtttgatggaggtgcagacacgggtttcttcgtctgggctcagctgtctagtgtgcagggcagaacctcaaatgaccacagacaccactatgccctccatgccatgcccctggggatggggtgtaccctgggaagcagacaaatgatctgaaaactgagctccagcttccccttgcctctcagaacctttgagtggctgagagttcttcccctccagctcctgaaagccttgacctccaccacgtgcaaaagggaaaactggggccctggcggggacggggcctcgcccaaagtcacacggtgagctgggggcccagtcaggcctggagccagaatgagagcttcggagctgccggggacgtctggccctgaggaggagggaccaaggtgggagatgctgctgtcccagaggcggccctctctgaggatggagatgccagcttgaactcggacaatgcccacctcagaaacctgggccgagaggctccccacaaattcgacagatggtaattgtcagcgccgggagagcccctgggagaccacctcttgcaacctggcatttcacaggtggggaaaccgagaaaaggaaaggactggttccagaccataaggcccgctggcggcacagccaggaccaaatcccggctcgagtggcccccttcctccccctgggtccgcctgaggcaaacccgggcaggaccaggagcgtccccagctcgagggccccctcggggtcacggcgacacacgaatcgtacatcccgagttgggctgcttcgtgggcgcgcgactcggccccagctgcgggtcccggccgcgcacccgacgtcgcagtggaggctcccgagccgccgccagcgtcgcgacgggcaggggtgtccggtcacctgcatcaactcgaagatgtggttctcctccccgtactggggcatctcgggggggatacggtgcggggcgatagtggcgtccatgtagccgtctcggctcgccgctccctagtaaccgcgtcgctagggccgccgcgccgactgcgtcatcagcacgcgccgcggccccgccctgcaggctccgcgccgggcccagatacccgatcctcggtcgcgcgggtcgcccccgccccgacctccccggctgacgcgctctgcggctcgggcaagttctttccccaaccccggcctcgcttttcccatttgcgcatcttagcgggggacaccctcaggtggcttccagctgggcctcctcgtatctgagacccccgacgaaacccagaaggggcaagtcggccctccgaggggacgggaggcagaacctgcttctggttctgtcagtgctccccggcccggctccctgtgcctcagtttacccatctttaaaacagacgcgggaataaatgtgggggagggtgtttgaagggggaggggcgtccatgagatgggccggaggttcgaggatcgggtggaaatcctcagcccaactcctagagtcgagccccggtagacccctcccagctccccggctctggccaagccgccaagtgacccgattgctatggcaccggcggtaacaatcacgcccgcggccccgccccttctcgcccgacgtccccacccaccctcgcctcccaagtcctggaacgggcctccccaccctccggggcaccgacactcacggagtcactccaacttctctgggtgctccgtggagcgaagagcgctctaggacaagcaagggtaaacagggatgagtgtgggtgggcccactcggaccccaccccggcctctgggtcagaaactggaagctggggtggaggatg

SEQ ID NO: 43037 - DNA, 2300 bp, Homo sapien
gtgacatgcacgccaggaatgtcatgagaggagctgtaataagctatccgaagtgatcgtcccttgaacgagagccactgcagccaaattagtgtggatgaagggcacaggggacgggcacttctcgatctgggggaggagggaggaaaaaaatgattacccataggttttaggctttaattgatttgtatttttccaggctgctaaagaagattgaatcatggtaggaaaagcgcctagggcttaaaataaatgaggagaaaggcaagtcatttcagaaatgtccaggaagcaaaacaaacctctccagtgcaaatggcaggcatggctgttgtgttctttgctcagggggaggcagcttccttttcttccccagctatctttacagttgggtttgacaagcctaccaaggtgtacacactttgaggaagcggtttggaggggaagaggcaacagtgctggcttttacgttgggagggcatgtctctgggctgatggctggtagaaaagggctttagctggagcctggatgcagagttcatgccctggctctgcccaatctaaccagtggccctagccaagatttcccccttttctgggcctcagtttatccatctgtcaaatgagagagtttggattagcctcttcttcaagaggccttctggttctaaggctgtatgatcaacaactgatgagaaaagaagcccagaaaggggaagtgactcacccaaagttacccagccaaccactcctcattgttctaatcctccaacttctcatctgtaaaatgggaatgaaggtgcctatttcacaggattgttggaacgattaaatgagatactactactaatagtagccccatatattgtgtgcttactgcatgccaattactctccaatacattagctcctgaaatccttcagcagttccctcttcacagggcaggaaagtgaggcacggagcaagcagagagtttgccaagctcacacagtaagaagcggagccagaacttgaagctggggctgtctgcattgactgtgccattttccctctccataaggtacagagacaacagaattttgccgagagcacaaagagttcaacaaactcttacagctcctacgattaacggcaacagacaagagctagagatcccaattcagtgttgcgactaataaaatatcaagctgccccgtaccactgggaattcatacgacttaaaaagctccgtctccagcgcgaaccttcccctcgcccccaccccgagacagctgtgcaggcccctccatcctccggacccctccatctttccatcctccaccccagcttccagtttctgacccagaggccggggtggggtccgagtgggcccacccacactcatccctgtttacccttgcttgtcctagagcgctcttcgctccacggagcacccagagaagttggagtgactccgtgagtgtcggtgccccggagggtggggaggcccgttccaggacttgggaggcgagggtgggtggggacgtcgggcgagaaggggcggggccgcgggcgtgattgttaccgccggtgccatagcaatcgggtcacttggcggcttggccagagccggggagctgggaggggtctaccggggctcgactctaggagttgggctgaggatttccacccgatcctcgaacctccggcccatctcatggacgcccctcccccttcaaacaccctcccccacatttattcccgcgtctgttttaaagatgggtaaactgaggcacagggagccgggccggggagcactgacagaaccagaagcaggttctgcctcccgtcccctcggagggccgacttgccccttctgggtttcgtcgggggtctcagatacgaggaggcccagctggaagccacctgagggtgtcccccgctaagatgcgcaaatgggaaaagcgaggccggggttggggaaagaacttgcccgagccgcagagcgcgtcagccggggaggtcggggcgggggcgacccgcgcgaccgaggatcgggtatctgggcccggcgcggagcctgcagggcggggccgcggcgcgtgctgatgacgcagtcggcgcggcggccctagcgacgcggttactagggagcggcgagccgagacggctacatggacgccactatcgccccgcaccgtatcccccccgagatgccccagtacggggaggagaaccacatcttcgagttgatgcaggtgaccggacacccctgcccgtcgcgacgctggcggcggctcgggagcctccactgcgacgtc

SEQ ID NO: 43038 - DNA, 2300 bp, Homo sapien
ggcggagcttgcagtgagccgagatggcgccactgcactccagcctgggcgacagagcaagactccatctcaaaaaaaaaaaaaaaaaagatagctgcaccttgccatactgaggcctgaggcaaaaggagaaatcagtaacactgagcctacctttacttaaatttttgacatgttattctaaatggattttaggcagcattatttttgatttttaaaatatattgcattaaaacgtgaaaaacatccacctcaatgattgaattgccggcactcccttaagttttgtgctgagggtgcatcacttgccttgccctaatgttggcccagggcttacaaatgactcaaaggtgaagctccagaaaagtgagagagagcacataggtggagttccagggagaaagggcgtgtgccctttcggcctggcttttccctcatcatggtgggagctgtggttggtagtggttgagaggaactgactctgttcttgatcctagcaacttgtgacatgcacgccaggaatgtcatgagaggagctgtaataagctatccgaagtgatcgtcccttgaacgagagccactgcagccaaattagtgtggatgaagggcacaggggacgggcacttctcgatctgggggaggagggaggaaaaaaatgattacccataggttttaggctttaattgatttgtatttttccaggctgctaaagaagattgaatcatggtaggaaaagcgcctagggcttaaaataaatgaggagaaaggcaagtcatttcagaaatgtccaggaagcaaaacaaacctctccagtgcaaatggcaggcatggctgttgtgttctttgctcagggggaggcagcttccttttcttccccagctatctttacagttgggtttgacaagcctaccaaggtgtacacactttgaggaagcggtttggaggggaagaggcaacagtgctggcttttacgttgggagggcatgtctctgggctgatggctggtagaaaagggctttagctggagcctggatgcagagttcatgccctggctctgcccaatctaaccagtggccctagccaagatttcccccttttctgggcctcagtttatccatctgtcaaatgagagagtttggattagcctcttcttcaagaggccttctggttctaaggctgtatgatcaacaactgatgagaaaagaagcccagaaaggggaagtgactcacccaaagttacccagccaaccactcctcattgttctaatcctccaacttctcatctgtaaaatgggaatgaaggtgcctatttcacaggattgttggaacgattaaatgagatactactactaatagtagccccatatattgtgtgcttactgcatgccaattactctccaatacattagctcctgaaatccttcagcagttccctcttcacagggcaggaaagtgaggcacggagcaagcagagagtttgccaagctcacacagtaagaagcggagccagaacttgaagctggggctgtctgcattgactgtgccattttccctctccataaggtacagagacaacagaattttgccgagagcacaaagagttcaacaaactcttacagctcctacgattaacggcaacagacaagagctagagatcccaattcagtgttgcgactaataaaatatcaagctgccccgtaccactgggaattcatacgacttaaaaagctccgtctccagcgcgaaccttcccctcgcccccaccccgagacagctgtgcaggcccctccatcctccggacccctccatctttccatcctccaccccagcttccagtttctgacccagaggccggggtggggtccgagtgggcccacccacactcatccctgtttacccttgcttgtcctagagcgctcttcgctccacggagcacccagagaagttggagtgactccgtgagtgtcggtgccccggagggtggggaggcccgttccaggacttgggaggcgagggtgggtggggacgtcgggcgagaaggggcggggccgcgggcgtgattgttaccgccggtgccatagcaatcgggtcacttggcggcttggccagagccggggagctgggaggggtctaccggggctcgactctaggagttgggctgaggatttccacccgatcctcgaacctccggcccatctcatggacgcccctcccccttcaaacaccctcccccacatttattcccgcgtctgttttaaagatgggtaaactgaggcacagggagccgggccggggagcac

SEQ ID NO: 43039 - DNA, 2300 bp, Homo sapien
cactccctgtcagaatggtatgatccctcttttctggagggccagcctgcctgcagcactgttcacaggcttgcaggtgccactgaagagaccagtggagtttaatgtctggaatgtgttccacgtggaaatataattactctgtcatctggaacaagcgattttaattgttagagagttcctcagtccactagtttgactttggccatggtcgtacatttaagaacttggttcaagttttttccatgtttagggtaattaggtgtccatagtatatgaggctcagctttcatactctattcaactctggaatggctgccaaagaagctgattaaatcttaccagttctgagcagggtgtttttgcctcttgtgtgccaggtgccaggataggccctaggtgtcccagatggttcctgtcctcatggagtttaccatctagtgatcagattgtacctaaatatagtttgaaggacccatattttaaaagcaaacaaaaatgtatttatatatactcatttagcatggatatttaatacaagttaatttggacagaaagtagggtaaaagggggaagaaaatagaaaaatgatagctgttcacaaacattttatgtctcttttgtagtaaacttaagtcatgctgcctgaaggcagaattaggctttgcacatttatttaagaaatactggccaggtgcagtggctcacgtctgtaatactagcaccttgggaggccttggtgggaggattgcgtgaggctaggagtttgggaacagcctgggcaacatagtgagaccccatctttaaaactaaaagaaaccgattagtcgggcctggtggagtgcatctgtattcctagctactcgggaggctgaggtgggaggatcacttgagcctaggagtttgaggttgcagtgagctatgatggctccactgtactctagcctaagagtgagaccctgtctctaaaaaagaaagagagaaagaaagaaaaagaaaagattttaacttctagtcattcaatcaagaagtgccagacagcatggtagctgcttgaaatacagtactgagtaagctgcggtctctccctggatataactcctagtgaaggaggcatgttcagtaatcaatcaagcttatttaattgggttgtggtaagtgacacaagaaatataggctgcaagagtataacaggggacctgacctagtctggaaggtggaagtgggaggcaagtagaggcctaggaggtcttctctgaggaagtgagcatttaagctgagattttaaggatgaagagtgagtttaggaggagccaaaggtagactctcttaggctcaggaatggggagcatgtggcttagccaaggaactgaaaggccagtgagtcaaggtggtggggagggttggggaggggtgaggactgtggggactgtggcaggcggtgaggccctgcaggcccactcagtgctttgtgcctctcactgtcctggacctgcctcacatggctcctccagtaacttcggtgtgccccgtgctgtgccgagggcaatggaatgcatcatctcatgtaatccccacaagccttgtgagcttgatgccatcattattctaactttacagacgaggtaacttacggttagacattggagacttaagataaatagctaaatgttacacagctaataagttgcagagcttggattttaacccggaactctctaattctagggcctatcctgcccattcatttatacctctaacagacattaacaaaagacagagattacaagttcagcacaatataaagaattttccagcaaccagctgttcagaaatgtagacggggagaggcacgtgcttccaatgattatgagtgttcattccagtggaaacgtggtggccacctgtcagggatagaggaggaagaagcttgtgccagatgaacccctaacccgcttttgattacatctgggattttgcttcattgtacatatgttttcttccttcagtgaccatgaaagacaccaggttgacagcactggaaactgaagtaccagttgtcgctagaacaggtaagctataaccaggccagtggttagaggaagatgggagggaattatcttgcccatggtcgtgcattcagggatttaacatttacagttttagctacttgccaggaactggaccatctatggcatgaagggattagtcacattactgatgattattagttgcttgtattcagtgcctgacactgtgcaaagcgcattatatgcgttactttcttcttcacagccacg

SEQ ID NO: 43040 - DNA, 2300 bp, Homo sapien
aatgataaattttaatcacttacaggccagctttgatcaaataacagataaatttaagagtcatatctttggagtcagtcagatcccagcagttccagtcctggctcagatacaattggggtgtgaacttaggcaaagtaccctgctctctccgggcctcagtttcttcatttgagaagattggaggtgttaacagtggctgcctcttctctttgtcgtgaggaccaaaggagataatgactgccaagcactttcacagtgcctggcacacagagagcactccattaacgttagctgttgttcttaggaggaccgcgtcccctcccaagtcctcaccacacatccaaaacacacaaagcaaaactctttaacaggaaacacaaagaaagagctttaattctacaaggtccctccgattgcaggctcttcatcctccagttcctcaaatgaatgaatgaacgcctaggaggggctctgcaaatagctgtctcttaggaatcccctttgcccactttaaggtaactgtctttcaccaccaattaaacacccacaagtacacccagagcgagtcatgcaaatttcagcggagacaccgaatccaggcgagtccttgatccccacaggcgacctccattcattctccacgcccctataccccgacccctctctttaagttctgggaccagccccaccctcgcgacccttcccctcccgccaagcgtctctaccctgccctccgcacctagcgtgaacctgtcaccccaccaagtgagggactgacgaaggggcccacctcgcccctgcccgagggaccgaggcccagggtgcagccgtcccctcgggggccaaggaggggcgaagtgctccgtccggctcgcctctcctccccagggacccgccagtcccggccgggccagccggagatagcgtgtaataagagggaggggagagctctccgaaccccccttccccgggatccctaccaagcaagtgagtctcttgctccagcccctccgagcctccccggctggagtcatggtgccggggctgccccaggaagcccccataaaaaggagggggagacacccccatactcacccaccgtctcctccccctcagctgtttacctcacagtccctccagcctacagggcgccgccatcttggacgtacagcacctcccccgtcgtgaaagggccaaggccgacggcggcctccgccacgaaaaagagtccccctccggacctcccctccttctcgaaaggaaggatagacggccgcgctcggcagccccgccggaaggaagaggctcttccactcataactgacgatgtgggttggacgagaaaaaaagtaaggagggtttttatggaggggggcggggccgggcggaaggatccgaaaggaggctgcgaagagatcttgtgactccgcgaaggaggcaaaaagaagggccggcgcggcgggaggagccacgcgagagcccgagggggcggggcgggcggtcacgtgactggcgggcggggggacgcggcggagaggcgtaaacaagctggcggcgcctgggtgtggttggagcgccctgcccctgccccccgagtcgtttctgcccttcgcttgcgtggcgccctccgagggtctctctgtgggcggcctcagagcagcgatcctgtttcccaaggagctgctggggcccgcgtgggtgaagggcctgcttgggagctttggagttgcagctcacctgggaaggggcggaaagctgcgggccagggcagccctccttcctgggctaaacattttcagaagcccgcctccgggattgcgggggacccccctggcttctgccttcaagtagctcacacttcacacctactcatgacatctaggggaaaccagccctaataggagacagcttgaaaatcagaacgccttattccgtttcctgctgaaacaaggctttaagtcctccaagcctcagtttcttcctctgtgaaatgggcataatgacatctgtgacgtgaagaatcaaggagatgaagtatggacagcgtttagcccagagtcctgcgcctagtaaatgctcactcactagataggtggcctttattgcgaggctgagtatgatgggctccatccagcacgaacacaaagccctgtgagaggaggcagagtgagatgaagtcgaactgtgggatatgaaaggcattttgaaggagtaggcatcaggttgggttttaaaggaaatgtaggttttgtgaaatactaggtcggtgcaaaagtcatcacggtttttaccattaa

SEQ ID NO: 43041 - DNA, 2300 bp, Homo sapien
gtcagagctccagagcagtgctgctccccctgccctcctccttaggtctcccatcactggtggtctcagaaatctctgaagatttcagaaatcttgaatcccttccctggtgtgaatgcaaagggaagagtctgttcctgtaaagtagtttgcagattggtggaactgagagaacccagacccttccccgtttccctcgacctttccatctctggaccccatgcagactatgcttgggtggtgacacagaagaatttagtgtttggtggacccgtttctggaagtgatggatgctgacagctggcacttaacagttatcaaaaataacattaactggagtaggctctgtgccacttagagcttaatgactcactgacttcaccccaaatccccatgaactagcattattattagccctatgttgcaggtgaggagactaaggctcatccagttagaacatgatggctgaaacctacattcaaactctggtctgtttgaatctagaactcttagcttccccccagcgactgtgttagaacagaggaatcatcagttcaattttcacctccctcctaagccttcgtggctctagacgtatggttataaaggttgttcactgctcaagggcccaggagggtttggggctggtggataggggccaaaatacagcccaggggtgccatttttctaattctcaccaaggccctatactgactagcagcggctctacccgataccatccagggccttttcagaattctgaaggcacccacggtgctggctactcacacacctggccccccttaaccatggctgccttgcactgtgacccaattggttcccatgacaaaacctgttattcccataactcacccaacacttttttgcccctaggctcttgctcctttggttccctctgcctggaatggccttctctcccgagccgcctcgcctggttctattaggttgatgcaaaagtcatcgcggttttaatggtaaaaaccgtgatgacttttgcaccgacctagtatttcacaaaacctacatttcctttaaaacccaacctgatgcctactccttcaaaatgcctttcatatcccacagttcgacttcatctcactctgcctcctctcacagggctttgtgttcgtgctggatggagcccatcatactcagcctcgcaataaaggccacctatctagtgagtgagcatttactaggcgcaggactctgggctaaacgctgtccatacttcatctccttgattcttcacgtcacagatgtcattatgcccatttcacagaggaagaaactgaggcttggaggacttaaagccttgtttcagcaggaaacggaataaggcgttctgattttcaagctgtctcctattagggctggtttcccctagatgtcatgagtaggtgtgaagtgtgagctacttgaaggcagaagccaggggggtcccccgcaatcccggaggcgggcttctgaaaatgtttagcccaggaaggagggctgccctggcccgcagctttccgccccttcccaggtgagctgcaactccaaagctcccaagcaggcccttcacccacgcgggccccagcagctccttgggaaacaggatcgctgctctgaggccgcccacagagagaccctcggagggcgccacgcaagcgaagggcagaaacgactcggggggcaggggcagggcgctccaaccacacccaggcgccgccagcttgtttacgcctctccgccgcgtccccccgcccgccagtcacgtgaccgcccgccccgccccctcgggctctcgcgtggctcctcccgccgcgccggcccttctttttgcctccttcgcggagtcacaagatctcttcgcagcctcctttcggatccttccgcccggccccgcccccctccataaaaaccctccttactttttttctcgtccaacccacatcgtcagttatgagtggaagagcctcttccttccggcggggctgccgagcgcggccgtctatccttcctttcgagaaggaggggaggtccggagggggactctttttcgtggcggaggccgccgtcggccttggccctttcacgacgggggaggtgctgtacgtccaagatggcggcgccctgtaggctggagggactgtgaggtaaacagctgagggggaggagacggtgggtgagtatgggggtgtctccccctcctttttatgggggcttcctggggcagccccggcaccatgactccagccggggaggctcggaggggctggagcaagagactcact

SEQ ID NO: 43042 - DNA, 2300 bp, Homo sapien
gggacgcggcggagaggcgtaaacaagctggcggcgcctgggtgtggttggagcgccctgcccctgccccccgagtcgtttctgcccttcgcttgcgtggcgccctccgagggtctctctgtgggcggcctcagagcagcgatcctgtttcccaaggagctgctggggcccgcgtgggtgaagggcctgcttgggagctttggagttgcagctcacctgggaaggggcggaaagctgcgggccagggcagccctccttcctgggctaaacattttcagaagcccgcctccgggattgcgggggacccccctggcttctgccttcaagtagctcacacttcacacctactcatgacatctaggggaaaccagccctaataggagacagcttgaaaatcagaacgccttattccgtttcctgctgaaacaaggctttaagtcctccaagcctcagtttcttcctctgtgaaatgggcataatgacatctgtgacgtgaagaatcaaggagatgaagtatggacagcgtttagcccagagtcctgcgcctagtaaatgctcactcactagataggtggcctttattgcgaggctgagtatgatgggctccatccagcacgaacacaaagccctgtgagaggaggcagagtgagatgaagtcgaactgtgggatatgaaaggcattttgaaggagtaggcatcaggttgggttttaaaggaaatgtaggttttgtgaaatactaggtcggtgcaaaagtcatcacggtttttaccattaaaaccgcgatgacttttgcatcaacctaatagaaccaggcgaggcggctcgggagagaaggccattccaggcagagggaaccaaaggagcaagagcctaggggcaaaaaagtgttgggtgagttatgggaataacaggttttgtcatgggaaccaattgggtcacagtgcaaggcagccatggttaaggggggccaggtgtgtgagtagccagcaccgtgggtgccttcagaattctgaaaaggccctggatggtatcgggtagagccgctgctagtcagtatagggccttggtgagaattagaaaaatggcacccctgggctgtattttggcccctatccaccagccccaaaccctcctgggcccttgagcagtgaacaacctttataaccatacgtctagagccacgaaggcttaggagggaggtgaaaattgaactgatgattcctctgttctaacacagtcgctggggggaagctaagagttctagattcaaacagaccagagtttgaatgtaggtttcagccatcatgttctaactggatgagccttagtctcctcacctgcaacatagggctaataataatgctagttcatggggatttggggtgaagtcagtgagtcattaagctctaagtggcacagagcctactccagttaatgttatttttgataactgttaagtgccagctgtcagcatccatcacttccagaaacgggtccaccaaacactaaattcttctgtgtcaccacccaagcatagtctgcatggggtccagagatggaaaggtcgagggaaacggggaagggtctgggttctctcagttccaccaatctgcaaactactttacaggaacagactcttccctttgcattcacaccagggaagggattcaagatttctgaaatcttcagagatttctgagaccaccagtgatgggagacctaaggaggagggcagggggagcagcactgctctggagctctgacccaggaagcccccccacaccctgaccttccttggctccatgacctcatcctgcaggaatgcattctgccatggaggagagcagccataagcagagctcatcaactgctcactttccagggggccataaccacattgtcactgtttctacactgtctggaagaagaatgggcattgttacctcaatatgggaccaccaggggcttgcaagaagaggctgaaggtgacaggcagagacagctctactaccatctcctgccacttaccaggctgggccacctagatgttttctgcttctctggggttgatttttgtcatttgctcaacagacactattcagaccactaccttccatacaccaccctggagcctccctgtgacggggcttcctgaccggcctgtctgagcatgaaagggctgagccctccataggcgggcgtgctgacaggatgcacgtggtggaggacatctgctgcatttggctgtgtgacatctccccctcgccttctgaacaggtgaaccgcccatcctcaattc

SEQ ID NO: 43043 - DNA, 2300 bp, Homo sapien
tctcttcgattctgcttccagtgattttgagtctatacccagaagtagattcactcacttttgacattgcattctctgaattttagaggagacatttgagaacttctaaatttcaaataaaaataatgatttagaccagactggacagcatagcaagaccccatctctaaaaaaaataaaaaaattaaccaggcatggtggtgcgcctgtagtcccagccactcaagaggctgaagcaggaggatctcttgagccagggaggtcgaggctgcagtgagctatgattgcaacactgcactccagtctgggctacaaagccaactcctgtctctaagaaaataataataataataataattttcttgagacagaattttgctcttgttgcccaggctgaagtgcaatggtgcgatctggactcaccgcaacctctgccttctgggttcaagcaattatcctgcctcagcctcctaagtggctgagattacaggcatgtgccaccacacccagctaattttgtattttttgtagagatggggtttctccatgttggtcaggctggtcttgaactcccgatctcaagtgatcctcgcctgcctcggcctctcaaagtgctgggattacaggcgtgaaccactgtgcccagccaataataattttttaaaaagatgtttctttccaccaagagagaccacagagctgggagcagtggtctgctgtctgtagcctggggctgggactgacaccccagcattactgaggcctggtgaccacagggttgtgtcctcctggctggtgctccagggctggcccagcagaaagacctcgcctgaaacacccctttttcttcattttgaaccttggacttgcagtttaaattggggcttcctgtcaccagacttgttttctttatgagggaaacataatatctccagcacccgggctggaagagcagacaaagcagcctaacagtgctctgtttgtggcgttctcatcttatgcaaaacctcctgaaataaatcagtcatcctgcaagcgggaggaggcgggggccagaggaggagggagaaggtggggagccaggggatgggacgccctgccaaatgggaagaaatgccccagccagctcagccaagctttaccgccctcactccccccagcatcaatgggacaccccagaggcccccactggcctccccatcactttgtctgccaccagagggcagcacacacgggctctggcacctggccttcaatctgtatggcagcttcagcaggccgagcgtctcctggcctccgaactcactgccacacctccagggtgcctctacccgctcaaaggtcatatctgggggaaatgcaaatttgatgtctcttctgagatatgacctctgcaaggacaagaggggcctctatgcatgtggccggctcgggtactaggggcattgcaccagcctggctctcacaagcctcagggtgctgaacttggggagggagggaggggaggaggcagcgaggagggaggcagggaaaaaaggagggaggaaaggagggaagagagagagaggagaggaggagaaggagggagggagggaaggaaagaaggagggaggaagaaggaaaataaggaagggaaggaaggaggcagggagggaggaagaaagaaaggaggaagagaaggaaggaaaaaggagggaaggagggaaggaagaaaaaaggcaagagaaaagaaagaagaaaaaaaccaaagagcaatgacttccctatgcaaaatcgagttttataagttagagctttttctaactttaatttttaaaatttaataatttagccatcactttctttttgtgcagatgttattcaaaatttccagcgaaattctgaatttctctgcagagagaaagcgtgccgctccaagtgtcgagggttagaaatgagaattcgaagtcttgtgtcctggaaagttttgataagcaaatacggctgagctcccgcgctctcttcattggctgcttgttcaccgccagattttgacacaaataatcagattgaaaatcagggaggggaacagaagaggaaaaacacacagagagacagagcaaaaaggagaagtatctatttgtgcaaagagtcacacagttgacagagtggaggccagtcccgagagaggctttgcagttcccacctcgggaagctccggcagaacccaggcgagggacagctccggacaggtgagtgctggaggatgcgtttctacgcttttgttttgaaatgtgcctgtgcgccgcaggtggcttcac

SEQ ID NO: 43044 - DNA, 2300 bp, Homo sapien
accccgtcctttgaatgcacctgcagtgggctgggtgctgggatgcgggggagcacatgctgagcacctctcacactcgctcctgatggataaaggtcctttctcgctccccaccatcccatgtggttggattgggatccccgtttagcagatatgagcactgaggctcagtgatgagccttacagcaggcaagggctgggcctgagcttggccccctgtgcagagcccccagtccaaactcttgatgcccccaggctctgggccagggggaagcaggcctgggcatagtcgggtccctcttctgcctggctgtggttcatctccttggggaaggggtgagtccctggcccttttccaagctgcattctctaatctcccacctcccaccctgctcctgggccaaggccttatcacccaggccctcactgctgttctgaagcagctgtgatccctctcccgccttctccggaccctatcacccctgcagccttgcatggcggctggcccaaggggtgggggggtgggactcctctgacgcctcaggcatgggcctggtgtcggcctgggtgcagcgtgggggcagaaaggatagaggaccaccagaagatgctctccagagtgcccgggggaacctcacaggctgagtgcagggatgtgaaccattctgggggccaggcagggctctcagctccagagggctctgcaggggaagccaggagtcctggggtggtcaagttggtccagccctgtcactccctgactctgcctgggatggtcccttgactgatgtggtccttggtttcttctcccactccctgactggtggggttggtagtgatgctgggctgcccacggaagctgggggctgttcgcctcttctcctgtgtccatgaagcctcaggcctccaggtgcagtggagttgggggtcctctcaggtcttgagtccccacaccccactcctcagagagagaaagcccctgtctctctagggaacagactctgggccagggctgtggacaaggcgcagccgtgctctggcggctgtggcttgcggcttgcaggagcacgtggattggcaatgtcccctcgtttgctgcagcttctctgccagagcccccagtgatagacactgaacacctgtgatgcacctgtcagcactgcaagcctggacatccccacttacagcaaaggggataggcccagagaggttaagtgtgtgtcccaaattgcacagcaagtgaactgagattctaacccacgaaccactgattccaaaacctaagctcagaccacccgtttctatggcctctgaaggtgaatctcactggtacccaaatgtagctttctagaattggggtccactgtgtgtcacagagggagaccccagtccctgcctttccttttctgctccattgcagcccaggtcatgccaatgggagcaggcttgtctgagcgttttctagggggcgatgcattcatttcctggtgaaggagcagtgagggaagttaggatttgtagctgccgtaacaaaatagcacaaacaggtggcttaaaaccaacagaaatttattctttcatggttctgggatctagaaatccaaaatcgaggtgtccgcaaagtgggttctttctgcagacgccaggggagagggtttcatgcccctctctgagttctggcggctgtcggcactgcctggcattctctggctgatagaagctccgagttctggcggctgtcggcactgcctggcattctctggctgatagaagtgtcactctctgctctgttgtcggcacacggcgttctccctgggtgtctgtgtctctgggtccaaatttccatcttcttataaggacacgagtcatcttggattgagggcccatcctaacccggaatgacctcatcataacttgattacatctgcaaaaacaccctattgctaataaggtcacattcacaggttctgggtggacatgaactttgggggccactgttcaacccagtatagctggtgttttatctcaggaggaggttctgagatatggaggggtattgttctcttgtccttcctaaccgctcccatccctcccccttgcaggtgtggggtgcacactgaaaatgccacgctccttcctggtgaagagcaagaaggctcacacctaccaccagccccgtgtgcaggaagatgaaccgctctggcctcctgcccttaccccgggtgagtcagagcccgggctggcgcctgctgcacccacggggggctctctgctctgcgtgatgagggtgcagcagcgtc

SEQ ID NO: 43045 - DNA, 2300 bp, Homo sapien
agctatttattctgccttcttaaacccaaggagagcaatcaggtactcttctgattaagaaatcacaggctgggcacggtggctcacgcctgtaatctcagcattttgggaggccgaggtgggcagatcatgatgtcaggagatcgagaccatcctggccaacatggtgaaaccccatctctactaaaaatacaaaaattagctgggcgtggtggcgcatgcctataatcccagctacccgggagtttgaggcaggagaatcgcttataccagggagtcggaggttgcagtgagccgagattgtgctactgcattccagcctggtgacagagtgaggctctgtctcaaaacaaacaaacaacaaaaagaaatgactttaggcaacatagtgagaccccgtcgccacacacacacaaatacaaaattagtcgggtatggtggtgcacgcctgtagtcccaactactcaggaggctgaggcaggaggatcacttgagcccaggagttcggggctgcagtgagccatgatcacaccactacactccagcctgggtgacagagggagatcgtgtctttcaaaaaaaaaaatcacttcagaaacggggtacccatacccaaggggtcacttgctcttactaatttctagctgtaatgcaagtggcatgatcatagctcactgcagcctccaactccagggctcaaaggatcctcctgcctcagccttttgagtagttgggactactgtggcatgcaccaccatggccggctaattttgtattttttggtagaaatggggtcttcccctgttgcccaggctggcctccaactgctgggctcaactgatcctcccgcctcagcctcccaaagtgctgggattacaggcgtgagccactgtgctgggccatgattctcatctcccaatattctcaaacccagtcccttcatctcttgactggattatgcagtctcggagctggtttatctgaactcactttctccccctttgatctgttctccacacaacagccagagaggtctttcaaatgcatgaatgggatcactgctccgcataaaacccttcaaggggccaggcgcggtggctcacgcctgtaatcccaggacttggggaggccgaagcaggcggatcatttgaggtcaagagttcaagaccagcctggccaacatggtgaaacctcgtctctactaaaaatacaaaaattaaccgggcatggtggcaggcgcctgtaatcccagctattcgggaggctgaggcacgagaatagcttgaacccgaggcggaggttgcagtgagccgagaaagcgccactgcattctagcctgggcgacacagcgagattccttctcaaaaaaagaaaccttcaggggctctccacggcactgggaagcagccagcccgacgggtggacccttttcgtgggtgcgggtctctgacctcggtcggcctcggacctcatctcctccctgtttgaggggccacactcctcgctccggggctttgcagcagccctgggcgcctaccggacagacgccgttctccccgcctgggtcttgagtagggcccagcacacagtaggcgcttaatgtctgcctgcctaacagacgaacgccggatgcccgcgttcggccccgagccggcgcttcggggctttctgtggaggcggggcgatggttacagcacagttcccccgcgctcgccttttccacatccacctccgcgaggccccccgcaagcgccgttggaaacctagtcccgagggggctgcaagagcttgggagaagaagcgccaacaccgacagaataccaggccgacccaatgcggaaatcaattctcagccgggaccttttccccaccaagcaggcgggccggaagtctgcctctggcccgcccccgaggtgtcattgggtggaatacccagaagagggctgggacgtggttaactctagttctttattggttaaaacgtacgaagctggaggagaaggtgggacctagcttcctccggacttctcattggctcaaaaaaaaactcgctcggccctcggattctcattggctgaagtcgagggaggtttgtgtcttattatcctccgggtccctcgctggctagtaggagagactggtgcttgccccgcccggtggactaactcgcttaattttaaataaaaagtcgaggacacggcggtcgttttcccgaagacatgggccctcccatgggccatttgctccctggaggccctcgcgtcttgctgagcccggggagttaggatgacgcgagcggt

SEQ ID NO: 43046 - DNA, 2300 bp, Homo sapien
ttgatttatggctttgacagaatccttactctcgctaacctcagggattattacagtgtgagcactttgggaagggaccttccttactcattcactcttctcatgtttcttgagcacctcccctgtgccaggcctacgtttgggttcattcccgccccatcgggactcagaggtgtgtgttttatgaggaggagattcctgagaaccaagtcttcttcattctctcccgagatagttcctgatcacttcctaagggacagaccctgtcctgggtgttgggaaccagctcactagcacgtaggtgaccttgtcccagttcacgttgttggtgctttcatatgcacacatccagtgctcgttgtgacccagcattgggcaagtattcattcatatgtacgtggcacatattgaatgtctaccatgagttaggcaccaggagctgtgctttatagatatttaatcataacagtcgtatgacatagatgctattcttggggtttttaaggagagggaccaaaaagagtgttggtattcagtttcatgtgcttggaaagctagaggtaacagcaagtcagagcccaaatggttgttactgattgatttaatctcatttggacctcgaaacatttgcatatgagactaaataccaagaccctttatggtgggtagttgttagagtaggtaaccctagacaagccactccaccccgcaccaagcctgagttacctccaagattgtgggtggcaagccacccaggtgctgaggcaagagaccgagggcatgagctgttccagtataataaaatacataaaacaacaagttatactagatctagatcatagacatgattatatatgaatatcattaatcattagtttgtaggaattactctttattccaatattataataatcctcgctctataatcataacctaagaaaaaccaggtcatacagagataggagctgaggggacatggtgagaagtgaccagaagacaagagtgcgagccttctgttatgcccagactgggccaccagagggctccttggtctagcagtaacgccagtgtctgggaagacgcctcttgccaagcggaccatggtctagcggtagcatcagtgtcaaggaaaaacacccgctacttagcagacctgcaaagggagtctccctttccctgggggagtttggagaagactctactcctccacctcttgtggagggcctgacatcagtcagacctgcccgcagttatccgggggactgtctccctgtgatgctgtgcttcagtggtcacgctcctagtccaccttcatgttccgtcctgtacgcctggctctgccttttagatagcagtagtaaattagtgaaagtactaaaagtctctgatatgcagaagtaatggcataagctgtctctctctctccctctctgtctgcctcggctgccaggcaggtaagggccccctgtccagtggacacataacccacgtgaccttacctatcattggagatgactcacactctttaccctgccccttttgctttgtatccagtaaataacagtgcagccagacatttggggccactaccggtccccgcattttggtggtagtggtcccccgggcccagctgtcttttcttttatgtctttgtcttgtgtctttatttctgcagtctcgtctccacacacagggagaaaaacccaccgaccctgtggggctggtccctacaaagataagggtgatagtatctcccctcaagtgttgccagaaggaccaactaatgccccacaccgagcaggcacttgatggatgatggcatttacttagaaggaaggagacgattctcattttttccaccagataaaaactaagatacatgggtttaaaaaatgggccttttgggaattaagggcccagaatgaaacatgagcctcctggcctttcctggatcaccgtcaggcttttattgagagaggagcagctccccactggctgcttggcttgtcattgcttcactctgtctcctttggccttgccacagatctacgcagaccccaccaagaggctggagctgtacttccggcccaaggacccatactgccacccagtgtgcgccaaccgcttcagtaccagcagcctgctgctccgcatcaggaagagaacgaggcggcagaaaggggtgctgggcactgaggcccactccgaggtcacatttgacatggagatccttggcatcatctccaccatttacaaatttcagggtaactgaaatctgctcttgcaatgtctggttattt

SEQ ID NO: 43047 - DNA, 2300 bp, Homo sapien
agtggtcccccgggcccagctgtcttttcttttatgtctttgtcttgtgtctttatttctgcagtctcgtctccacacacagggagaaaaacccaccgaccctgtggggctggtccctacaaagataagggtgatagtatctcccctcaagtgttgccagaaggaccaactaatgccccacaccgagcaggcacttgatggatgatggcatttacttagaaggaaggagacgattctcattttttccaccagataaaaactaagatacatgggtttaaaaaatgggccttttgggaattaagggcccagaatgaaacatgagcctcctggcctttcctggatcaccgtcaggcttttattgagagaggagcagctccccactggctgcttggcttgtcattgcttcactctgtctcctttggccttgccacagatctacgcagaccccaccaagaggctggagctgtacttccggcccaaggacccatactgccacccagtgtgcgccaaccgcttcagtaccagcagcctgctgctccgcatcaggaagagaacgaggcggcagaaaggggtgctgggcactgaggcccactccgaggtcacatttgacatggagatccttggcatcatctccaccatttacaaatttcagggtaactgaaatctgctcttgcaatgtctggttatttcagggctggccatcctagctgcctgcaggagctgtgtgggtcatctgcaccagtggagggggccaggatatgcccaggggctgtggggacacagcagggcacaggccccatccaggaggcagcctttcttccctccagccaacagttccccagagactgcaggttcattgctgcccaatcttcagcattcttaagctagaaatctcctaatttttaatgaaaccattgtgtgggaccaaataaaactggtcagtagacctccagtctttcccccaccacagtgttttgaaccttctcttgtctcggctgctgttggtcttgccctcctagctcccgaagccccttgggacctcctcctcctctgaactctcagcaggttgaacgtccctcgtggagccctcaatcaggtttcccacctaccaggaaccccagtgaggaagcaataaagcaagggagggagacgggtgagaaagacagactctggcattgtgcctgcctgagccctgccagtttctttgggaggtggcttggcttccctgagcctcagtgtccttgtctgtgcagtgcgggctacagagcctgcgttccttaggccctcgtgaagattccgggaggcaatgcttgtgaatgggccagcctctggcccacaggaggtgcctggcatattactaacaaggcttagagatggctaagttacatctgcagttctaggcagaatctgaagagtataaagattgagaagggcaaagaggactagaaagaaaagaggggaagaagaaagtgaaatgaaggagaagcaggacctggggtcccatgggttgggcatttttaatggcagtcattctggtgggtcatggcattcaccaaagagggctgttcttttgggacaaggtttcccaagtgattcataaaacataacacctcatatttttcatcgaattgaaccagcatcttgctgctctgtgtgtgtctctggactggcagcatcagcctcacctgggagcttggtagaaatgcaccaggtcagaacctgcatttagcaagatcccagcagattcatatgcatgttactaggttggtgcaaaggtaattgcaggttttacagttaaaagtaacattcatctaagaagcactgacctggactccatcctcacctatcatgtagctccccacctccccaaaataattttcatgtaagtgacttagactgcatggagccaactttgcagaggcatttgggaagggtgtgttttcctgccaccctcaccctgcagcctccaccacatggcccactcagcacctccctaagcagatgtgggtgtcggtgtgtggcagctgcccattcctggactcaatgtctgccatctgcccacctctctttctagggatgtctgacttccagtacttggctgtgcatacggaagcaggcggcaagcatacgtcaatgtatgacaaggtgctcatgctccggcccgagaaggaggcctttttccaccaggagctgccgctctacatccccccacccatcttctcccggctggacgccccggtggactacttctaccgaccagagacccagcaccggtaaggcccccctccatgcagcctcgg

SEQ ID NO: 43048 - DNA, 2300 bp, Homo sapien
agccttgggtcttgggcaccttccttacttacagctaccacgatgctgcaggctccagcccctccctggcatttcctgttgcggacccggcccaaccatctccccagggtgcactcagtcggtgtgaatatggtgtttagagaccccagtctggtcaccaggggtggggcttgctcctgggatttcgttactgctagggctttggaagagacagagccaggaaataagttttttttttttttttttgccaattttaaaaaaataaagtatgaggctgggcacggtggctcatgcctgtaatcccagcactttgggaggctgaggcgggcagatcacttgagctcaggagtttgagaccagcctggccaacatggtgaaacccagtctctactaaaaatacaaaaatcggctgggtgtgatggcgcacgcctgtaatcccagctacttcagaggctaaagcaggaggatccctcgaacccaggagttcaagactgcagtgagctatgattgtgccactgcactctagcctgggtgacagagaccctgtctcaaaaaaacaaacaaacaaaaaacctctgtggactccgggtgataatgacatgtcaatgtggattcatcaggtgttaacagctgtaccccctggtgggggatgttgataacgggggagactggagtggggcgaggacatacgggaaatctctgtaatcttcctctaattttgctgtgaacctaaagctgctctaaaaatgtacatagatataaactggggccttcctttccctctgccctgccccagccctcccccacctccttcctctccctgctgcctcccctctgccctcccctttcctccttagccactgtaaatgacactgcagcaaaggtctgaggcaaatgcctttgccctggggcgccccagccacctgcaggccccttatttcctgtggccgagctcctcctcccaccctccagtcctttccccagcctccctcgcccactaggcctcctgaattgctggcaccggctgtggtcgacagacagagggacagacgtggctctgcaggtccactcggtccctggcaccggccgcaggggtggcagaacgggagtgtggttggtgtgggaagcacaggccccagtgtctcctgggggactgttgggtgggaaggctctggctgccctcaccctgttcccatcactgcagagggctgtgcggtggctggagctgccactgagtgtctcggtgagggtgacctcacactggctgagcttaaaggccccatctgaagactttgttcgtggtgttctttcacttctcagagcctttcctggctccaggattaatacctgttcacagaaaatacgagtcgcctcctcctccacaacctcacacgaccttctcccttccctcccactggcctctttccctccccttctgtcactctgcctgggcatgccccagggcctcggctgggccctttgtttccacagggaaacctacatggttgggctagatgcctccgcacccccccacccacaccccctgagcctctagtcctccctcccaggacacatcaggctggatggtgacacttccacacccttgagtgggactgccttgtgctgctctgggattcgcacccagcttggactacccgctccacgggccccaggaaaagctcgtacagataaggtcagccacatgagtggagggcctgcagcatgctgccctttctgtcccagaagtcacgtgctcggtcccctctgaagcccctttggggacctaggggacaagcagggcatggagacatggagacaaagtatgcccttttctctgacagtgacaccaagccctgtgaacaaaccagaaggcagggcactgtgcaccctgcccggccccaccatcccccttaccacccgccaccttgccacctgcctctgctcccaggtaagtggtaacctgcacaggtgcactgtgggtttggggaaaactggatctccctgcacctgagggggtagaggggagggagtgcctgagagctcatgaacaagcatgtgaccttggatccagctccataaatacccgaggcccagggggagggccacccagaggctgatgctcaccatggggcgcctgcaactggttgtgttgggcctcacctgctgctgggcagtggcgagtgccgcgaaggtaagagcccagcagaggggcaggtcctgctgctctctcgctcaatcagatctggaaacttcgggccaggctgagaaagagcccagcacagccccgcagcagatcccgg

SEQ ID NO: 43049 - DNA, 2300 bp, Homo sapien
ctgaaggaccactgaaaaatcactgacagattgtctcataggagaaaagcatacatatttgtttaatgcgtatacacgggagcctttgaaatggagacccaacttctcaacagagtacagagcttagataccatcttgaggttccacaaagaatgtgggctcagagcatggccaaaactaggttaggggctgggcgcagtggctcacaactgtcatcccagcactttgggaggctgaggcgggcagatcacttgagctcaggagttcgagaccagcctggccaacatggcgaaactccctctctactaaaaatacaaaaattagccgggtgtgatggcgggcgcctgtaatcccagctacttgagaggctaaagcaggaggatcccttgagcccaggagttcaagactgcagtgagctgttattgtgccactgccctctagcctgggtgatagtgagaccctgtctcaaaacaaacaaaaaaacccctaaatctgtggactctgggtgattatgacatgtcaatgtaggttcataaagtataacagctgtaccccctggtgggggatgttgataatgggggagactgggttggggcgaggacatacgggaaatctctgtaaccttcttctaattttgctgtgaacctaaatctgctctaaaaatgtatatatataaaaagtggggccttcctttccctctcccctgccccagccctctcccccacctccttcctctccctgctgcctcccctctgccctcccctttcctccttagccactgtaaatgacactgcagtgaatatcctggagcacaaagggcatgtctcccagttcagaattacctcctttatttagggcaggttctcagaactagagtagccgggcaaaggtctgaggcaaatgcctttgccctggggcgccccagccacctgcaggccccttatttcctgtggccgagctcctcctcccaccctccagtcctttccccagcctccctcgcccactaggcctcctgaattgctggcaccggctgtggtcgacagacagagggacagacgtggctctgcaggtccactcggtccctggcaccggccgcaggggtggcagaacgggagtgtggttggtgtgggaagcacaggccccagtgtctcctgggggactgttgggtgggaaggctctggctgccctcaccctgttcccatcactgcagagggctgtgcggtggctggagctgccaccgagcgtctcggtgagggtgacctcacactggctgagcttacaggccccatctgaagactttgttcgtggtgttctttcacttctcagagcctttcctggctccaggattaatacctgttcacagaaaatacgagtggcctcctcttcctccacaacctcacaggaccttctcccttccctcccgctggcctccttttctctcctgtcactctgcctgggcatgccccagggccttggctgtgtcctttctttcctcagggaagaccacaagtttgggctagatgcctccgcacccccccacccacaccccctgagcctctagtcctccctcccaggatgcatcaggctggatggtgacatctccccacccttgaatgagacggctttgtgctgctctgggacccgcacccagcttggactgcttgctccatggccccaggaaaagctcgtacagataaggtcagccacttgggtggggggcccacagcatgtcaccctctctgtcccagaagtcacgtgcttggtcccctgtgaagcccctctggggacctaggggacaggcagggcatggagacaaagtatgcccttttctctgacagtgacaccaagccctgtgaacaaaccagaaggcagggcactgtgcaccctgcccggccccaccatcccccttaccacccgccaccttgccacctgcctctgctcccaggtaagtggtaacctgcacaggtgcactgtgggtttggggaaaactggatctccctgcacctgagggtgtagaggggagggagtgcctgagagctcatgaacaagcatgtgaccttggatccagctccataaatacccgaggcccagagggagggccacccagaggctgatgctcaccatggggcgcctgcaactggttgtgttgggcctcacctgctgctgggcagtggcgagtgccgcgaaggtaagagcccagcagaggggcaggtcctgctgctctctcgctcaatcagatctggaaacttcgggccaggctgagaaagagcccagcacagccccgcagcagatcccgggca

SEQ ID NO: 43050 - DNA, 2300 bp, Homo sapien
ggggctctgccagtaactctcatcctcaaacacacatggattccgatgcagggggaggttaagtgacttgcccaaagtccctccactggcaagtgagggaacaaggcctcatggtgggaggcccttcttggctgtggccctccgccctgcactcaacccacgtcttaccctgttttggcaaagttggtccagtaggcggtcatagccttagagactgtcctgtcttggggccggtagcccggagtggggtggcaaagggctccccaaagatgtactggatctcatctctatggtcggcccccacccatttggggtagacgggcatccgagagggatgggaaaacaggtaggcgtaggtcttggcactcctggaggggagagaccacccaagtaggcagggtgctcactggggaccgatcagcccagagaccggacttggagggaggtcccgggcagtgggcagggaagtgtctggggaattcacatgaagagatggggcttcttacacccagggaagggaaagctgagaaccaaattcatggattcatgggttccacaatttcagctgaatttatacttcacctccacaaaacattgtgaggcaccttccttctagaattcagtatcaagaaatattttgctctccaagtgaatgtgcattcttcaattagattggacaaggtataggccctcaactgtttccctttttgccttgactgaaaggaggctcacagctaaatgtactgcttagttgctgcaaagctttcatcctagacttctaggtatacttttatcttcctatctttttcagattgctaatttatttttaatttttattatttatttatttacttatttattcgagacacagtctcactctgttgcccctgctggagtgcagtggcgtaatctctgctcactgcaacctccacctcctgggttcaactgattctgctgcctcagcctcctgagtagctgggatcacaggtgtgcaccaccatgcctggataatttttgtatttttagtagagatggggttttgccatgttggccagactagtctcagactcctgacctcaagtgatcctcccaccttgacctcccaatgtgctgggattacaagggcgagccactgcactcggccttatttttccttctaattggctattattacatgaaggtctttaatgaggccttgggctgaaattattttgtaaggtggcaaagttgaggcccatgagagtcagtggatagaaaccattgtccagtgttctctcagtgcacacagcatgggggatggaaggtagctcaagaactctccagtgggaaggaccatggggtgcagggctgagcagggcagaggatcatagggtttgtaaagccctgtaggctgggaggtaaaaagaggccctcaagtcttgccaggcctcagcaaagtggatcaggcaggcacaggtggggactcaagcaccactttcccagacaacccagacacctgagagccacccacagcgaggcctcggctggaaggtgcagcaccccaggaaggcccccaggagccacccgctgcccagatcctcacttggcattggctctgtgctgggctagggcaatctcggtgggcaccaggaagaggacatcggtctcaaagtccaccacagtcttcttcttattctcctgggatgggtcctgggcccaggactcggtgtagacatcaaaggtcgtcttggcgcctctgagccccttggtgattgtgaactcactgaccagcttgtagaagtcctccctgggggaatcaagtaggcactgacactcagcctgtgccaacaggagggtgtgtgcatactcaccccgaccggtgctaacttcctcactcccagtcctccactcaatgccttcctcctccaggctggccccctcgccagtgctttcccggcggccctcccgcacgggtcgcccctgagtcctgtgccccctgcttactccgtgactttcttgttgcccttgttgatggcaggcatgtcgatgctggcgaagatgtggccgtccatgttgttggtgcctgctatatagtcgatgtcggcggcgttggcgtacaggttgatcgggtcagcggggatgaagtctccatcaatgacagggacgaagcccacatagtgcagcatggggtctgggtgggagagccagcaggttagcaggttcttgtaccttccagttttccctgagccgccccttgcctctcagggctggaattggctatgtcctcccttctctgatctatggacacttggggcagggtt

SEQ ID NO: 43051 - DNA, 2300 bp, Homo sapien
acctggcatttcccagatgccagccagggagatggctagagggagtctggggtccagggagacagtgggccccaggaggcccccagaggtcccccagctgttccaagtgagaccagttggggctgggggctgagaaagccttcaggggaggggccttgctcatcctcctaccccaatgtcacagggcatcatccagggcaccgttccctacctgggcacgttcctcaccgacctggtgatgctggacactgccatgaaggactatctgtatgtgagtgtgccgggcggggctggagtagggcccgggaggagagaccttccctgagccctgggggctgggctgccacacctgtcccagcaatgagtaaacagctcagtgccctgctggtgacaccccagggctgcccaaacacagagctgcagcagggtttggctgagtgggacacagcccatccctcaggcagtgaccctgagcacagagggaagccaggccctcagcggtcaggcggcacgtggtggctgagcagggccttctcacccaaggcctcagtccattgtcctccgagagtgctggacaagaagtccccaagcctctgcccgcatgtccccttgccctggtgcccagcaccggcttcaatccaggggtgtgcgtgccctgccccctggtgggcactcttgatagtgcagcatgaggtggggagactgtaatggtcaaggggtcactttctgacggccattgggtgtccaccttccagggcagactcatcaactttgagaagaggaggaaggtaagcagctgcaggcagccctgacttggggaggggtggaaaacagacccaccagggtaggacatttcaactcctaccctctccttagattcatgggacatgggacatttggacacagagagaagggggtcccctcccactggagggtgagggtaggaggttataatccaggaccacctcctggggagtggctgagcccaactttgagaacaggaaggcctggatgggagtagaggggaggaagggaccccaagaacaaagacccagagactggcccctgtgctgcccggggggccttgtcaccgccctgtgcttccctctggccccaggagttcgaggtgatcgcccagatcaagctgctgcagtcggcctgcaacaactacagcatcgcgccagatgagcaatttggggcctggttccgggccgtggagcggctcagcgagactgagaggtgaggccggggcagcaaatggggacagtgggggcaggctgtcctagggggccagctccagagggccagcagctatgacccatggtcagcctcagcccctgttgcctgaggatggccggggcaccccgactccagcttctgggcaggtgctgggggaaggccggagcatggcccctggttgtcacaccactgcccctctgctcatagctacaacctgtcgtgcgagctggagcccccatccgagtcagccagcaacaccctcaggaccaagaagaacacagccattgtcaagcgctggagcgagtaagggcctggccaagggtggtaggggcagctgccttggggctcagaagcttcagggctgagcctgggctcagggagtcagggaggctggccctggaatcctaccctgctgctgactggccctgagactgggatgagtcccctcacctttttgggcctcagtttcctcctctgtgaaatggggtgatactaaatgctctcccagatggctgtggtgaatggagtactggcaactgtcccagcactttgcacagtccttgggcgcagggtgcaggggctgtggggttgggatgtgtccttggggagcccccttaactaagccaactcttcacccagccgccaggcccccagcactgagctcagtaccagtggcagctcccactccaagtcctgtgaccagctcaggtgtggcccctacctcagcagcggggacatcgctgacgcgctcagcgtgcactcggccggctcctctagctccgacgtggaggagatcaacatcagcttcgtcccggagtctcctgatggccaggaaaagaaggtgactgcctgcccttctccccaatatcctttcccatctccccactccaaatccatgcatggggccaggaagccctggatcctgaacacagcttctagaaggttccccatctggcagctggcctggggtgcccccacagggcagtgggatctgctgatcttaccgtctccctcagttctgggaatcagcctcacagtcatccccggagacctccggcatc

SEQ ID NO: 43052 - DNA, 2300 bp, Homo sapien
tagtttcctcatctagaaaatggaggaatgccagccctggggtgctgaccttatggaaggttcaagggagaaaggagtgtgcagccataacaggactgtagcgcagagtctctgaggccctgcgaggcaggtggagtttttttatttgtttagagaaggagtctcgctctgtctcccaggctggagtgcaatggcgtgatctcggctcactgcaatccccacctcctgggttcaagggattctcctgcctcagcttcccaagtagctgggattataggtgtgcaccaccaacccaggtaatttttgtattttttagtagagatggggtttcactgtgttggccaggctggtcttaaactcctgacctcaagtgatccacctgccttggccttccaaaatgctgggattacaggcgtgagccaccgcaccatgcagcaggcggagttctcatccgcactttccagagggggaggcaggctcaggaaggccaggccaccggcccaggaccccacactagtgagtattgatacagggtcagccctggaacccgaccacactggcagcaccccaggtcagggtgcctgagggctgaggggatagggccttgctgaccctgtcctctaccctggcaggagggcacctccaagtttgccaccctggagatgaaccccaagagagcccagaaacggccgaaggagacggtgagagtgcccaaggccgcggaggggcagggggctggcctgggggtagggaggagggccctttcctctctagccacggtgcctatgggccccattagaggtagcctcctctggaccctagcagagccacacctggatcagctggtatctgggaagaccagctgcagccacgaaaggacaggcctggcagagccggctcaggcgggtgtggggctggggagggccaggggccacacgacttgggaacctggcatttcccagatgccagccagggagatggctagagggagtctggggtccagggagacagtgggccccaggaggcccccagaggtcccccagctgttccaagtgagaccagttggggctgggggctgagaaagccttcaggggaggggccttgctcatcctcctaccccaatgtcacagggcatcatccagggcaccgttccctacctgggcacgttcctcaccgacctggtgatgctggacactgccatgaaggactatctgtatgtgagtgtgccgggcggggctggagtagggcccgggaggagagaccttccctgagccctgggggctgggctgccacacctgtcccagcaatgagtaaacagctcagtgccctgctggtgacaccccagggctgcccaaacacagagctgcagcagggtttggctgagtgggacacagcccatccctcaggcagtgaccctgagcacagagggaagccaggccctcagcggtcaggcggcacgtggtggctgagcagggccttctcacccaaggcctcagtccattgtcctccgagagtgctggacaagaagtccccaagcctctgcccgcatgtccccttgccctggtgcccagcaccggcttcaatccaggggtgtgcgtgccctgccccctggtgggcactcttgatagtgcagcatgaggtggggagactgtaatggtcaaggggtcactttctgacggccattgggtgtccaccttccagggcagactcatcaactttgagaagaggaggaaggtaagcagctgcaggcagccctgacttggggaggggtggaaaacagacccaccagggtaggacatttcaactcctaccctctccttagattcatgggacatgggacatttggacacagagagaagggggtcccctcccactggagggtgagggtaggaggttataatccaggaccacctcctggggagtggctgagcccaactttgagaacaggaaggcctggatgggagtagaggggaggaagggaccccaagaacaaagacccagagactggcccctgtgctgcccggggggccttgtcaccgccctgtgcttccctctggccccaggagttcgaggtgatcgcccagatcaagctgctgcagtcggcctgcaacaactacagcatcgcgccagatgagcaatttggggcctggttccgggccgtggagcggctcagcgagactgagaggtgaggccggggcagcaaatggggacagtgggggcaggctgtcctagggggccagctccagagggccagcagctatgacccatggtcagcctcagcccctgttgcctgaggatgg

SEQ ID NO: 43053 - DNA, 2300 bp, Homo sapien
gcaccagttccatcattacagccttcctggccttcacctgtggttgcagagaacgggctgagtgaggagaagcctcacctcttggtgttccctccagatctggtggcagagcagtttacactgatggatgcggtgagcagctcagcttggcagggcaggggtgggcctgccttctggcagcatctgctgtcccagacctaccatttgctgatccagagctgatgttctggtcaaatcccagctctgctgctacacaccaagtaaccaggtcgttccttaaccccaagtcctcagtttacctctggacagtagagatgaggtcacccctatcctccagagtgactgtgcagattctagatggaacagacaggaagctcagcaggcctggcctgtgggagcggagggtgctcaccaaggtgcatccatgggtcacccccatctgttcaggaggctcaccagcctcagcactcattaggcacttggtgtgtcctggagcctatggcagacactggacaaagcccttagttgtagcgcccacagcagatgtgcgtctggatggggagcagactgaggcggggggatggggggtgggcaggcgtgagccgcctgttggagctggggcttggtgaggctgcgcgaggcggtgctcctcttcttcccaccagcgttctgtcccgggtcacttgtgtgctgggcaccctgcatggacacgggataaaacccagagatccccacaaggctcaagctgcatcctcagcttccccagcaccagcccagactgctggggcaggaccaggtgacatttagcctcctccccaggaactgttcaagaaggtggtgccctaccactgcctgggctccatctggtcccagcgggacaagaagggcaaggagcacctggcgcccaccatccgcgccactgtcacccagttcaacagtgtggccaactgtgtcatcaccacctgcctcgggaaccgaagcacgaaagccccagacagggccagggtggtggagcactggatcgaggtggccagggtatgccagaggaggggcctgggcccccactttggcttcatctgttctcaggttgtggtctgcagtccaaggccctgtacaggccccagtctacccttcccaggggcatgctggccttgactctcccagcccactgcctggatgctcacgtcttccttacactctttccttgggttgagctaaaatcctcctgtcacccccgggtcgcaggcgtgccctctggggactccctgggtgtctgtctcattaggaggggaggcttggccaagggggactgaggccaggcaagctgggagctccagccccacctcatgcctcctgctcttcccgccccaggagtgccggatcctcaagaacttctcgtcactgtatgccatcctctctgccctgcagagcaactccatccaccgtctgaagaagacgtgggaagacgtttccaggtgggcatgcctctgtaggagctcctggtgcaccagggacctcccacagggctggcatcacccccttagtgagcccatgggaggccacaaaccctgagggcagggacccttcactgacctgagttggcagcagctctgcctcagagctcggcttcctaagctgtcagatggtgggttgagccacatcagagattttcaggtattcgtgttgtagccacagaaccctcatccaattgaaatcaaaacctttgtgccaggcgcaatggctaacgcctgtaatcccagctacttgggaggctgaggcaggagaatttcttggacccaggaggtagaggttgcaatgagtcgacatctggccactgcactccagcctgggtgactgaaactgtctccaaaaaaagaaaaaaacccctttggaaatagctgctcagtggaaacgggaatggggtcctgttgcaccaacatgaaggccccctccccagacctgcagagcgttagtgctctggggtaccctgtgtgctgcgttcaggcagtctggggtctttcagctctaaaataaaacggatttgcactcacacccctccctaccattcccagctttctctttccttctttgcccttctgacagggacagtttccggatctttcagaagctgtcagagatcttctcagatgagaacaactactcattgagccgggagctgctcatcaaggtggagtggcggcaggctggggcgggggctggggcgggggctggggcgggggctggggcgggggctggggctggggcgggggctggggcgggggctggggcgggggctgggg

SEQ ID NO: 43054 - DNA, 2300 bp, Homo sapien
tctgtcaacctccggactttccctgcctcaagcagctggtggcctacgtgcagctcaacatgccaggctcagacctggagcgccgtgcccaccttctcctggcccagctggagcactcggaacccattgaggcagagcctgagggtgaggaggactggggtgggtgccagagggtgaatgaggaggggtcggtgctgggccacacgaagaggaggctccagggtctggtgctgggtcaggggcccagatgagcctcagaccacacaggcagggaccacaggcaggagagtggcctggtacacgttttgtgggttcggggagagaggcttctctggaagccggggctgttctgtgtctttggaaaggcacaggaaaggctggcatgttgttgaacttttctcctcttgcagctctgtcaccagtgccagctctaaaaccaactccagagctcgagctagctctaacaccagctcgagcacccagcccagtgccggctccagccccggagccagagccagctccaacaccagctccaggttcagagctagaagtagctccagcaccagctccggagctccagcaggctccagagccagctgtgggactagaatcggctccagcgccagctctggaactagagccagctccagaacaggatccagctccctcacaaactctagagctggagccagctccagcaccagttccatcattacagccttcctggccttcacctgtggttgcagagaacgggctgagtgaggagaagcctcacctcttggtgttccctccagatctggtggcagagcagtttacactgatggatgcggtgagcagctcagcttggcagggcaggggtgggcctgccttctggcagcatctgctgtcccagacctaccatttgctgatccagagctgatgttctggtcaaatcccagctctgctgctacacaccaagtaaccaggtcgttccttaaccccaagtcctcagtttacctctggacagtagagatgaggtcacccctatcctccagagtgactgtgcagattctagatggaacagacaggaagctcagcaggcctggcctgtgggagcggagggtgctcaccaaggtgcatccatgggtcacccccatctgttcaggaggctcaccagcctcagcactcattaggcacttggtgtgtcctggagcctatggcagacactggacaaagcccttagttgtagcgcccacagcagatgtgcgtctggatggggagcagactgaggcggggggatggggggtgggcaggcgtgagccgcctgttggagctggggcttggtgaggctgcgcgaggcggtgctcctcttcttcccaccagcgttctgtcccgggtcacttgtgtgctgggcaccctgcatggacacgggataaaacccagagatccccacaaggctcaagctgcatcctcagcttccccagcaccagcccagactgctggggcaggaccaggtgacatttagcctcctccccaggaactgttcaagaaggtggtgccctaccactgcctgggctccatctggtcccagcgggacaagaagggcaaggagcacctggcgcccaccatccgcgccactgtcacccagttcaacagtgtggccaactgtgtcatcaccacctgcctcgggaaccgaagcacgaaagccccagacagggccagggtggtggagcactggatcgaggtggccagggtatgccagaggaggggcctgggcccccactttggcttcatctgttctcaggttgtggtctgcagtccaaggccctgtacaggccccagtctacccttcccaggggcatgctggccttgactctcccagcccactgcctggatgctcacgtcttccttacactctttccttgggttgagctaaaatcctcctgtcacccccgggtcgcaggcgtgccctctggggactccctgggtgtctgtctcattaggaggggaggcttggccaagggggactgaggccaggcaagctgggagctccagccccacctcatgcctcctgctcttcccgccccaggagtgccggatcctcaagaacttctcgtcactgtatgccatcctctctgccctgcagagcaactccatccaccgtctgaagaagacgtgggaagacgtttccaggtgggcatgcctctgtaggagctcctggtgcaccagggacctcccacagggctggcatcacccccttagtgagcccatgggaggccacaaaccctgagggcagggacccttcactgacctgagttggc

SEQ ID NO: 43055 - DNA, 2300 bp, Homo sapien
tcaccaccacccaacaggtcctggacctgctgttcaaaaggtgagcatgagccctccactgcacagggtgcacaggggccctcgcccccacccccacctggctgcgggtcttggcaatgctgattcacctctctgagcctcgctttgctcatatgaaagagaaactggagtgctaagaggacctcatggggttgtcaccatgcctgggcgggatgaggcgtggaaagtgctccctcaacgcctggccctgtagggaatgggctgcggggctgtggtgctcgtttttatgattttcctgtcccccatggggaagctctctgccccaagcctctcttgtatgtggccttgggcgaagcagttttcccacttgtcaaggagattccggattctatctgggggctgttggagggacccaaggggcgctcagatagctgggaaggagctggttgggacttattcattgaacaaatatatatgaagcacctactgtgtgctggcccttttctaggcatttaatataatttgatgaaaaaaagcaaaaaaaaaaatccctgccctcctgggcctccgttctagtcggagagtcagacagtaacactagacgtcataagcaggtacggtagatgtgacgccctcacggcctcctctagatacggctgcatcctcccctattccgacgaggatggtggaccccaggaccaacttaaaaagtgagtgagctttgagccaagaggaagggaccctgtccccaccgaacagtgggagagtacatggggctggggccggagccggggctggctgggcagaaccctggctcccacacctcttgtggttcctgctagagggctggggtctgggggcttcgcctgcaggaagaaagacgaccgagagctgtggaggggtcctggggtggctggggctcggggcagcccccggcgggaactcatcccaccatagcctcatcccagctggccttggctcagtgggccctgatctaggggcccctggcaagaggtggggtgagcctctgctctcacattgcctcacccctcaatagtgagtgctcagtgggcaggctgcaccccaccctctgggagaacaggattagtgggaagatgagacccacacacagctctgagagagtaaggcagctcaccagcactgagctacaagttgaggagccgccagggacctgcagatgcccggcaggaggaccgatccctcatggagtttacattccagcgaggagggggtgctgggagacatgcagagctgtgggcggggcttccttggaggaggggagaggtgttcgccactgaccaggggcctccttggttcttttagctggacagccaagggggcttgggccggggcaggtggccttcagatggacaggggccggctcaggagcccagcctggctcaggggagcccaggcctctgactctgctgccacccacctgtccccagtgccatctcctccatcctgggcacctggctggaccagtactcggaggatttctgtcaacctccggactttccctgcctcaagcagctggtggcctacgtgcagctcaacatgccaggctcagacctggagcgccgtgcccaccttctcctggcccagctggagcactcggaacccattgaggcagagcctgagggtgaggaggactggggtgggtgccagagggtgaatgaggaggggtcggtgctgggccacacgaagaggaggctccagggtctggtgctgggtcaggggcccagatgagcctcagaccacacaggcagggaccacaggcaggagagtggcctggtacacgttttgtgggttcggggagagaggcttctctggaagccggggctgttctgtgtctttggaaaggcacaggaaaggctggcatgttgttgaacttttctcctcttgcagctctgtcaccagtgccagctctaaaaccaactccagagctcgagctagctctaacaccagctcgagcacccagcccagtgccggctccagccccggagccagagccagctccaacaccagctccaggttcagagctagaagtagctccagcaccagctccggagctccagcaggctccagagccagctgtgggactagaatcggctccagcgccagctctggaactagagccagctccagaacaggatccagctccctcacaaactctagagctggagccagctccagcaccagttccatcattacagccttcctggccttcacctgtggttgcagagaacgggctgagtgaggagaagcctcacctcttg

SEQ ID NO: 43056 - DNA, 2300 bp, Homo sapien
ccaggctggtctcaaactcctgggctcaagcaatttgcccacctcagcctcccaaaatgctgggatgacaggcgtaagctactatgcctggccctggctaatttttaagttttgtaaacaatttttttgtagagctgggggatttcactttgttgcccaggctggtctcaaactcttggcttcaagtgatgctcccaccttggcctcccaaagtgccgggatgactgatgtgagccaccacacctggcctgaaattctacttttaaagctgataacctttttctgctagagatactcagtcctgcctcttgccacaagctgctgagggctcggggttccatctgagctccaggagattcgtgtgctgccactgactgtctgtccctcctctgtcccaccccagtatgagaatgagtcggccctgaacctttatgagacttgcaaggtgcggaccgtgaaggctggcacgctggagaagctggtggagcacctggtgccagccttccagggcagcgacctctcctacgtcaccatcttcctgtgtacctatagagccttcaccaccacccaacaggtcctggacctgctgttcaaaaggtgagcatgagccctccactgcacagggtgcacaggggccctcgcccccacccccacctggctgcgggtcttggcaatgctgattcacctctctgagcctcgctttgctcatatgaaagagaaactggagtgctaagaggacctcatggggttgtcaccatgcctgggcgggatgaggcgtggaaagtgctccctcaacgcctggccctgtagggaatgggctgcggggctgtggtgctcgtttttatgattttcctgtcccccatggggaagctctctgccccaagcctctcttgtatgtggccttgggcgaagcagttttcccacttgtcaaggagattccggattctatctgggggctgttggagggacccaaggggcgctcagatagctgggaaggagctggttgggacttattcattgaacaaatatatatgaagcacctactgtgtgctggcccttttctaggcatttaatataatttgatgaaaaaaagcaaaaaaaaaaatccctgccctcctgggcctccgttctagtcggagagtcagacagtaacactagacgtcataagcaggtacggtagatgtgacgccctcacggcctcctctagatacggctgcatcctcccctattccgacgaggatggtggaccccaggaccaacttaaaaagtgagtgagctttgagccaagaggaagggaccctgtccccaccgaacagtgggagagtacatggggctggggccggagccggggctggctgggcagaaccctggctcccacacctcttgtggttcctgctagagggctggggtctgggggcttcgcctgcaggaagaaagacgaccgagagctgtggaggggtcctggggtggctggggctcggggcagcccccggcgggaactcatcccaccatagcctcatcccagctggccttggctcagtgggccctgatctaggggcccctggcaagaggtggggtgagcctctgctctcacattgcctcacccctcaatagtgagtgctcagtgggcaggctgcaccccaccctctgggagaacaggattagtgggaagatgagacccacacacagctctgagagagtaaggcagctcaccagcactgagctacaagttgaggagccgccagggacctgcagatgcccggcaggaggaccgatccctcatggagtttacattccagcgaggagggggtgctgggagacatgcagagctgtgggcggggcttccttggaggaggggagaggtgttcgccactgaccaggggcctccttggttcttttagctggacagccaagggggcttgggccggggcaggtggccttcagatggacaggggccggctcaggagcccagcctggctcaggggagcccaggcctctgactctgctgccacccacctgtccccagtgccatctcctccatcctgggcacctggctggaccagtactcggaggatttctgtcaacctccggactttccctgcctcaagcagctggtggcctacgtgcagctcaacatgccaggctcagacctggagcgccgtgcccaccttctcctggcccagctggagcactcggaacccattgaggcagagcctgagggtgaggaggactggggtgggtgccagagggtgaatgaggaggggtcggtgctgggccacacgaagaggaggctccagggt

SEQ ID NO: 43057 - DNA, 2300 bp, Homo sapien
agcatgcatggctctcagtgttgggcctgcatccttccccaccacccggctggcagaagagggccccccgggggtgggggaagggtgcagggatcacatgacaccaagcagggctgggccagctgctggcctgccagctcacggaggagccgctctctagacctgctcagggacagccgaggccacctggcttcagcccctcctggggattggcctgcctggggacacctctgtccagcaggcactgatggtgctcagccaggacctgggtgctgtgctgggctcccccagggttaatgtttagtcccctgtggcgggcttgtcctgcacgagatctcagagccactgccggtgacttggacactcaggatactgtctgcctcccagctggtccagatgtggctaaaatccctgggagagagagagactcccagctgagccaacggccttcacaggaggcagtctgggacccctgaggaggcccgggtggttgggggccctggtcgctgtaacctctaatgcttttcttttcaaaggaacaactttctaggcaggggagagatgtgtgagtcaggaaaaggggggtgagcgtatgtctcttttcctgtcagtggaagggccagacctcccctggcggggctgtttgtggggtgtgggtgtgagtgtgcctgtgggttccctgctaacttccaagaaatggggctggctctctgtccagaggcggtggcggtcaggagcccggcacaatgcccgcagctttcctgttgtacaaagcccagcgtgggaggcgacctcaggtcggaggaagtggacttccaggatggctcctgggcctctgagggtgcgcaggaggcaggaggccagggtcccgtccacagcatgctggacagtctacctggctcctgctggggttgagggaagggcctgagtcagcactgtctgccaggccttctctgagctccacgcctacctgggctggggcactgactgggcggttaatgaccctgggccaggccagtacctcttagctccttcctaacctctgaggttgatgtccttaaccccccggctcctctacccgctgcaagctcattccgtccctggacagagcaggtggcatagggggctgtgaggccgggggtaattgtggctaagtgacctaggccagcctgccaggtgggggaagtctgtctcctaagacaacggcctttccttactgcctggggccagatgcccccttcctgttccagtctaggcctgtggtttagggctctgtggaaccccagcatctgcctggataccagcaccgtcacctctcacacccgtcccctcacgtgatgatggtcagggaactgggaactcccattgcccaagcaggcacgagggcatgaatgagcagaggggaaggaagtggctgggatgtggctgtctggggtgccccacacctgcccagacctgggctgccaacgcaccagggctgggcccagaggagctgtgcgttcctgctaggtcagccagggccccccaggctgggtagaggaggggtgagtgtgaggatgcccatgggcctctggccctggggaggtagggggaccttctcttggggcatagccgcctggatgcagtcagccgtgtcagagccctggggtccctgcctcaccacttacccgaggcagcatgaccttggaccagttgttcctctctcagcctccatttacccatctgtgcaatggctgaataacagtcccctgtgtggaaggggatggcttgagggtgggtctgtcctgggcaggagcagaagccagttactaggggattggaagcctggtggactcatcataatcacgtcccaggtcgtggctggccgggttggggaagtggagtgccgggacagtggctctcgagctgtgatctcattccaccccaggctgtaggtctgtgcagccgccagtctgtgccctatctgggaaacaggttacacaggtgcatcccctgcacggtggccaggcaggcccttgacgtccccgcgcccggctgccgggcgttgtcttcacagagctccacgcaggagatcggtgaggagctgatcaacggagtcatctactccatctccctgcgcaaggtgcagctgcaccacggaggcaacaaggggcagcgctggctcggggtgagtgcgctcggggtctccactgggagacgcagctggggatccctcccaggactttttcacttgagggcccccagttctgatcccaaaggaaacggccttcactcccttcccgacccccactgtccagccc

SEQ ID NO: 43058 - DNA, 2300 bp, Homo sapien
aaaacgggtgggcgcttgttcccaggcccatcactcagcgaaggagataaagagagcagaggagataaagtcagtggcaggcagcttctggactttcagtttccggaggcattgggagcttggccccagaagaaagggatgggaggaggagcttagggccgagggcagtgtctcggtcacctctttgtggccctgtggggacctcctgcctcgaaatacgcctcacccacattaccctccctggccaaacggcttggaggcttcctaaacagcctctagggatctccatcccaaatcaaatctacccatcttgcttcttaaaaaaaaaacaaaaacaggctgggcgtagtgctcctgcctgtaatcccagctctttgggaggccgaggcgagcggttcacttgaggtcaggagttcaagatcagcctggccaacatggtgaaaccctgtctctacgaaaaatacagaactagctgggcatggtggcaggtgcctataatcccagctcctcgagaggctgaggcaggaaaatcacttgaccccaagaggcggaggccttagtgagccgagatcacaccactgcactccagcctgggtgacagtgagactgtctcaaaaacagcatttatcacatagagctgattattaaaatactgattttagaaattagaaattcagagaagtaaaatgaaaaccagtagagcttccacccagctgcaacttaccaccataatttttgtgaagtaggcccttctagtcgtgtgcacatgggggtcttgttctgaacggatgaactgccgcctcactccagtcacagtggaagtgtttcgtgggtgtctgaggattggcacttgggaagggggcaagatgtgctcgtggaatgtgctgtctggtcccgccctctcagtttacagatggagaaactgaggcccaatagtacggaccagacctggggaggttggcatggccagggctgctggcagcaattgctggcctccatgaagactgaaggctgaggccagggcaggcccagtgatgagtgaggcatgaggaagggtcccattcattcatccattctcctggccctgctgttaagccccaggctgtcttccttcctcactggcttccagaaagagtagttgaggatgtccctgtccctgcttccccttcagccccagcagccccacttccaccctgagaccagggatgtccaagccacaagcagccccagctgacaggccacgcagccatgtgctctgcccagcgttgtcactcttgatgccttcctccttgtcagatgcctctcagccccaaccttggtgccttccgctctcccccacctccctggcttcccctcctctgagggtgtctgtaaggggatagtgtggggctttgccccaaaaaggtagggccccactctctgaccctttcccccactgcacacacagccccacactcaggatttccaattgcactgacagggtcactgaacacatggtcagcctctccaaactccgcctgagcctgtagtcaggtgcaggtgctcagtgctgagtgcttcatgtccattacgtaatgtcatcctccccgcaactgtttgaggaagtcattttcactacccagattttccagatgaagaaacagtgaggctcagaggggttaagcaacttgtggaaggccacagagttggggagaggctttgctggaattcggggtagctgactccagggcggcttccccacacatgatcagcacgtacacatttcagccctacgcaacacacgcactgcagcagcgtgacacgcaaacggtgcctaaccggggtacccaaggccccacgacacacgtgacagccggtcctccgggagacccagccaacgcgcacccctcgacctccccggccccgccctctttgttcagaccccgcccctccaggctcccggtcccgccccgggtctgacctcggcgagggcggggccgcgggcgcgcgcacgcacgcgtccctcggactctccggttccgcccctccccggccccaccctcttcccctccggccccgccccccagcctgacatcagcagggccgggccgcgggctcacagcggtggcaaagcccagccgcgcgggccgcgccgccgcccccgccgcgcgccgggccggccccgcgcccgcgctgcgagccttccatggtgcagcgcatgtgggccgaggcggccgggcctgctggcggcgccgagccgctgtttccgggctcccggcggagccgcagcgtgtgggacgccgtgcgcctggaggtgggcg

SEQ ID NO: 43059 - DNA, 2300 bp, Homo sapien
tcccagcagaggacactggcagctggagttagtaggagggggctgtgggcaggtgaggacttgggattctcttctgggtgggacagaaatggtggagggattttagtggaggtgacttgttctggccacagggtgagtacagggaggtaggtttcagggcccccctgaaaccctctagctccatttctctgatgctcccccaccccagcccagcccacccccacatgcccacccacatcccctgagagtctccaccctgagggtggcagagctcccaggccctgaactgtctgctcagctgggtcccctaaggcccacaaagccaccggaagaggatgtgagatgctcagaggagcagggctgggagcgaggtgctgctggggcagtgtctgggcgggaagccgggccccagggcctgatgtgcctgtgggggcactccacagcccctgcccacaccctctcctccccgcctctgctgttctgctccctgccctgtgccctccacttgcagccagggactgggcatccacccggccaggttcccaggaaggtaaggaagtagctgagactcttggcctctgacttcgccctggcatctctgggctttggggttggggctctgagtgttctggcccccaggtcaggatggaaggagcgtctgcaagctttgcagagcagctggacagacacttttcctgtgagatcttgggcaagtccctgctctctctggggctcagtctttccacttgtcagacgggtgtgttggatgcgtctgatggcttccaatgtctggtttgcagcaaaatgagaaaaacagggacaaggtagtaagttgttgtattgttgtggtggtggtggtggttgtttacaactccagtagtcactctagtaaattattctaaaagccaaatgtactcatttcaagcctgcccttctttctgatggcagccctttcttgttacctttggtggtgttttttctgaatggtgggagtagtggtggtaatattattattttttaccaccctacttaatgaaacaaaccattggcatcccccacccctgcgcccagttaaaatgaaatcttgtggccgggtgcggtggctcacacctgtaatcttaccactttgggaggccaaggcaggtggatcacctgaggtcaggagttcgaaccagcctggccaacatggcaaaaccccatctctaataaaaatacaaaaaaattagccaagtggctgagtgtggtggctcatgcctgtaatcccagcactttgggaggctgaggcaggcatatcacgaggtcaggagtttgagaccagcctggccaatgtagtgaagccccatctctactaaaaatacaaaaattagctgggtgtggtggcatgcgcctgtagtcccagctacccaggaggctgaggcaggagaatcgcttgaacccgggaggcagaggtgcagtgagccgagaccatgccactgcactccagcctgggtgacagagtgagacgatgtctcaaaaaaaaattagccgagcatggtggcatgtgcctgtaatcccagatacctgggaggctgaggcaggagaatcacttgaaccgggaggtagaggttatagtgagccgaggtcgcaccactgcactccagcctgggcgacagagcgagattccatctcagggaaaaaaaaaaaaaaaaaaagaagaaaggaaatctcgtgcctgggtgccagggatggaagagctcaggtctagggggcagggaagccttccagaacaagtgagtggggtctcctgcctgcctcccagtgcctctggctagactcacatccgcctggtggctctgctgaccgaaccctgttttgatttggttacttgtatctgtcacctttctggctctgtgtggtggtttccaggcccccgacacagggggaatgggagtggggacttggagaattaagggagaaagctaggctagcttggggcagcctctccactcgtcctcggctggcccatggcctggtacaagcgggaattcctggtcctgcctgtcacagcagcaggtatgacagccacgcgggtgacaccaggcccaggcactcgggtgctccactccactagggcacgcaggcgacgagcacactggcagagggcctcccgcagggcccactccccacctggctctcgccccaccatggcccgggaagcaggccaggtttgtgccaggcctgccgtgcccagggggaggaagggctctgtgttctttgcctgtgtctctgtggtgaccgccaggagaagggccgtcgcccgt

SEQ ID NO: 43060 - DNA, 2300 bp, Homo sapien
gggggatcaatatatatggggcccaagcgctggactcaggggatacctggccagcgaggccccaacacaggatgaggcctctgatgaccagctcggggatgagtgacggggaagagccatgaagtgggggtcaccacgcacagcagggcctggccacttacagctgagtggcctgcagtgctggtgccttggctctggtataaaattgaatgaagccgggcacagtggctcacgcctgtaattgcggcactttgggaggccaaggcaggaggatctctggagcccaagagttccaaaccagcctgggcaacatagtgagacttcatctctacatagtttttttaaaaataaaaaaggccgggcacagtggctcacgcctgtaatcccagcactttgggaggccaaggtgggcagattacgaggtcagaagttccagaccagcctggccaacatagtgaaaccccgcctctactaaaaatacaaaaattagccgggtgtgatggcacatgcctgtagtcccagctactcgggaggctgagacgggagaatcacttgaacctgggaggtggaggttgcagtgagctgagactgtgccattgcactccagtctgggtgacagagtgagactctgtctcaaaaaaataaaataaataaataaatcaaaagggttggccaggcaaagtggctcacgcctgtaatcccaacactttgggaggccgaggagggcagatcacctgaggtcagaagttcgagaccagcctggccaatatggtgaaactctgtctctactaaaaacacaaaaattagtcgggcgtggtggtggcagcgtgcacctgtaatcccagctacttgggaggctgagacaggagaatcgcttgaacccaggaggcagaggttgcaataagccgtgatctagccactgcattccagcctggtcgacaagaaggagactgcggctggtgcagtggctcatgcctgtaatcccagcactttgggaggccaaggtgggaggatcacctgacgtctggagtttgagaccagcctggccaacatggtgaaaccccatctctactaaaaatacaaaattagccgggcgtggtggcaggtgcctgtaatcccagctactcaggaggctgaggcaggagaattgcttgaacctgggacgtggaggttgcagtgagccgagatcgcgccattgcactccagcctgggggacaagagtgagacttcgtctcaaaaaacaaacaaacgagactccatctcaaaaacaaaagtaaataaaaaataaaaagggacgaaatcagttagccctaataacactgactacccccaacagtcgctcaaccccagtgtgaggcctccttcccccaggctcccttgagccccatcttacaccagctgaagctgcagctggaccttgtggtcccgggtgctgtcagggaagacaaggagggaggtggggaagaggaggggaaggggagacctgactttctccctgcccaggctgagttcgctgtcacctcgggtcccccagctcccagccatccgccgagccgagtccagcaggtggcatcggggtgctgggcgccagggtgaacgtgtatatttggtgacgccggcgcgccgactcagcggcccccgcctggctggggcgaggttggccctaggtcctagcggggtggggagtactgagcaggcggctggggcggacggacacgtgagatcggccgcacatggcgctgggagcgtggcgcgtgcgcgcggcgaagcggagtgacgtgcacgcgctgtctgcggtcccgcgcaggccccgtgtgcgcgcccggccttggacaacaggcccggctgccccgcggggggaacacccgcgtcggcccgcgggagggaggcctgagcgcgcccccgagcgcgtccccgagctcacgcggcggggcgcgcccctcgcacctgcgggcgggctggggcggggccgcggctgtccccgcccacccgggcccgagcccggggagccggggcggaaccgagcggcgaggcccgagcggccggagcgcggcgcggcgcagacaatgggagcggcgctggcggctgccggggcggccccgagggccgcagagtcctgggcccggcggggaccggaggccgcgccatgagccccgcagccgggcgcacccctgcgccgcgcgcgggcccaggcgagcggcctctgcgagccccgggtcccgccctggggccggcgatgtgccaccgaggctgaggatgatggtagattgccaggtgagtgcgcgccgtccccagcctcg

SEQ ID NO: 43061 - DNA, 2300 bp, Homo sapien
ctgaggtcaggagttcgagaccagcctcgccaacatggtgaaaccccgtctctacttaaaaatatataaaaatcagccagatgttgtaatcccagctactcaggaggctgaggcaggagaattgcttgaactgggaggcagaggttgaactgggaggcagtgagccgagattgtgccactgcagtccagcctgggcgacagagcaagactccatctcaaaagatcacgccactgcactccagcccaggtgacagagcgagactccattaaaaaaaaattaagtaaaacataaattttatttatttacttatttttgagacatagtctcactctggcacccttgctccagcctcatagcttgctatgttacccaggctgctcttgaactcctgggctcacgtgatcctctcaccctagcctcccaaagtgctgggattacaggcttgagtcaccatgctcggccttaagtaatatttaataagagttttctttaagtcatatagagagagacagacagaaaaacagagacagagagagacagaactggaaggctagcagtgactcttctccccactgctcttctcccactctgcctggcttggatttgttctttctggttcccttgaacactgcaagtctctgcctacattcctatttc[450 bp omitted]ccttttgaacagcactcaccagctcccagggccggtgccaggctcctgcagactgagaaaacaggccctgccttacaggaaccccaaggtgctctagagaaaccccaaggacacaggtaatcatcacacccctgaggggcctgggaggctgtgcccaggcaccaggcagggctgggtttccaacttccagctgcactgtgacctggagcacacccataacctctctgagcccgtctctggctgggtcccaccccccaccccttgggtcactctctcttttattttcccttagggccccttcatttcgccttactgtccctcccctctcgcacccttcctaggagaggtttctgctacgaaaactttctaccccatgcactggcggacctctggtgagctgcaagagggtctctcctggggtcccagagtccctggggtggaaaagagtagcccttcgtggaagggataatgcaaccccgacaggccgtgggaagaaagtgtggccagtcccatttcacagaagagaacacggaggctccgggtaattctgggagccactcacttgtgtcccctcgctgggtaggggcgcctggctcagaggcccccagcaaaggaggacagatcctaaaccggacagcaagctgcgtccagctggttctccctttccgtgactgcttcaaagctcttataaacaaggtaaggttttccccacaaatcgcttcatttctccacccgcaccctaccatggccccggacctgcggttctcggccccccgagctgggcctgctgcatcctaggcagagttctaggcggctagcggaagccaggcccaggggtcagctcaggcgctcggtcccccgggatcctgctcccaggccgcagggaaggggctctgggaccgcaggggcggggcctgcggtaggtgggcggggctgcggcgccctctttcccgtctggcttctcttttctgtcctctttcctgtctgtcttcctcttttctgtctggcccgcggccccgctgcctgccctgctccaggctccacctgcgccgccgatcgcccgggtatcgcgggggcccaggccagctgagtccgttttccgcgccggggtggcgcccctccaaccgtcctaacgccgggccggcagcaaggagtaagtctgcaccccgtagggacagtcgcgctcccttgg

SEQ ID NO: 43062 - DNA, 2300 bp, Homo sapien
gatgcttcagcatggtggccagccaccgtctctgaaataattaaaataggtggttggtggcacaggcgatggtccctactgtgcagttggtcttgcagccttaactgagattcatcgtaagctcccactctgctccttcttggcgtgcctcagtcccagccagcacatgctctggtctaggtgcttgtttggtggtgccatctaaaccttcttatgcccaggtgtcgagtaaagcccagacactgtccacttcagtgaagcacctaggaattagcagccctgaaaagctgtgatcactgtgagattcaaagaaaagggtcgtgagggaagtggtgagagagaaagttgtgtggtagcggcagcccaacaggagccaccatcagaaggaacacagccatccagagaagtgccccaggccacaaagcactgggggccagagatctcacccctcatgtctgccatgggttgacccccaacctccagccctaccatctcctgacggtgtctgcaccagttgaacccaaccagtatctaaaaggacacagttggcgaatgagactgggacacagggcaagatgggtggatgatgggagactcctggagagcacccgtcgcactgagcgtggacctcatgggagagccctgttctctgaagcatctgtgcatgtcgttccagcattttcttcaaggattgagccagcagcaccagtgttgtaaggtgcttagatcaatgattcacaaacaaccaatgaaatacgaggtgcctggggtacagtcaacaaacacagagaacagagaaaccttcccgttgatgtagagactccagcctgtttgctcatctctggtcctgaagagcccaggccccattctttcctgcccggggggatgagggtggggggtttctgctcggcagcacttgccgtgggaggggtgagggactgggtcacaccagcccgttcgttacagccccagggtttattagagtgtgcattagtattattgagtaagtacttgagagtgtctgatcttgggccagagaggcacaaagatgccattgtgtgggtccagcacctgcctgcagagcgtgggtcagccttgggtcccagggaagatgacacacacctgggaaatgcagggtccgggagggagaaggcaaagttctggctcaggttggctggggatgaggccagcagagccaggtgcccaagggacctcagccacgaactctgagcacaggctggcaggtgactcttggtgcctcatgcgacttgtttatctaaagggatgagattcaaggcctgtcctgggggctgggggccgtcaaagctgacgagagaggggaatgtatattctaacagggagatggtcgatgaatacgtgcaggaagaaatggacaggacaatccagagagatcgcgtgttctgaggacagcacagccaggctccggtacggagtgaagcggggtcggggaggcggcggggtccctcatatggcccgaggaggccgtatataaactgaccctgagccacacaatagtgccctcctctgcccctaggaagctcgagtgcagggtccaggtggggaaaatcaatgcagagtgggtcccagagtgggcggaagcttgggctctagggcgtgcgggactcagctggcagcagccccacgtctctctggttctaaagcccagtccatttctgctcagcagggagatggccagttccccagaggacttgcccagggtcccagccgtggccctgggagggtgcaggggttggtgagggagtatcccgaggctgtgggccctgcctctgtggcttggggtgcagatggacaccaccctgccctgtcctctcgagtcctctgggctcatctgagtgggcgcgttcgggtggtgcaaactctggatggcatcgtgtgtcttttcttctctggctggcactgacttgctgttcaccagatgccagcaatgaggacactccccctcccggatgcaggactggttgccaccatggggaggggtgcaccgtgccacgtgctcccaggacactggccagggggctataaagaacatctcgagaggagccagcacagccttgttcagacgcccagtgacctgccgaggtcggcagcacagagctctggagatgaagaccctgttcctgggtgtcacgctcggcctggccgctgccctgtccttcaccctggaggaggaggatgtgagctgggttggcgtgggcggatggaggagccaggcggactcctgggcagggggcagtgccaggggccctgctttaggaggt

SEQ ID NO: 43063 - DNA, 2300 bp, Homo sapien
acccaggcagtggcgagtgactgtggacattgaggtctctccttgtgttcaagacagagtggggtggcggccagccttgtcctcccagagggtagatgggaaaggtcattcatgcagcatcttactgagctcatgtgggctcgtgggctcgtgggctcgccaggtcggtaaaacccagctccttctccagaggctgcgtctcacccagggatggtggcttctgctgccccctcctctctgtaactgtggccggccgtcatgctgagccaccccctcaatacaaggctccagatgtttcctgctcactgaccagagatagcaggagggggacacctgtttgctgtccttggaccctagaaagaggatgctggcagagccgtggtcacttctctgtcagatgtaggtggggcaggcaaagcagttggccccagacaccaaaggaagtggctgacccacaaggccctgggactctgggccaggccagagagggagctagccaggcaaccgcagacacatacttgacttctcggcagctgtgggcagctgggccagcgacagtggcggaggccaggaatgacttactcttaggaataggtgcagttcaagcctggagggaggaagctctagggtgcagaggcgggtgtgtggaggcctcgcgtgcagcttataatgagggagcacgtggccggcctggccataagaggggcagctgcgtggggaggcgtggctcaggccaggctgagggggagtgagcagacgccagcctgcggcctgctaccagcctccagccacctgccctcagccctccttagtaagagggggtgctggtggtcccccatcgctgggaagaggatgaagtgaatcgcagcccgaggactcgctcaggacagggcaggagaacgtggtgcatctgctgctctaagccttccaatggccgctggcgggcgggtgcaggacgggcctcctgcagcccaggggtgcacggccggcggctcccccagcccccgtccgcctgccttgcagatacgtggctttcctgaagctgttcctggagacggcggagaagcacttcatggtgggccaccgtgtccactactatgtcttcaccgaccagccggccgcggtgccccgcgtgacgctggggaccggtcggcagctgtcagtgctggaggtgcgcgcctacaagcgctggcaggacgtgtccatgcgccgcatggagatgatcagtgacttctgcgagcggcgcttcctcagcgaggtggattacctggtgtgcgtggacgtggacatggagttccgcgaccacgtgggcgtggagatcctgactccgctgttcggcaccctgcaccccggcttctacggaagcagccgggaggccttcacctacgagcgccggccccagtcccaggcctacatccccaaggacgagggcgatttctactacctgggggggttcttcggggggtcggtgcaagaggtgcagcggctcaccagggcctgccaccaggccatgatggtcgaccaggccaacggcatcgaggccgtgtggcacgacgagagccacctgaacaagtacctgctgcgccacaaacccaccaaggtgctctcccccgagtacttgtgggaccagcagctgctgggctggcccgccgtcctgaggaagctgaggttcactgcggtgcccaagaaccaccaggcggtccggaacccgtgagcggctgccaggggctctgggagggctgccggcagccccgtccccctcccgcccttggttttagcagaacgggtaaactctgtttcctttgtccgtcctgttgtgagtaactgaagcctaggccccgtccccacctcaaatcacacacaccccctccccaccacagagacaccattacatacacagacacacacagaaagacacacacagacacaaaatcacacacacaccctccccgccacagagacaccattacatacacagacacacacagaaagacacagacacaaaatcacacacacaccctccccgccacagagacacaccattacatacacagacacgcaatcgcagatacgcccttccggccacagaaacacaccattacacacacatacacagaaagacacacacagacacacaatcacacgcagcccctccccgccacagagacacaccattacatacacagacacacacagaaagacacacacagacacaaaatcacacacacaccctccccgccacagagacacaccattacatacacagacacacacagacacacaatcacacacagcccctc

SEQ ID NO: 43064 - DNA, 2300 bp, Homo sapien
ctcacatcgttgtacagccatcaccagcatccatctacaacactcttttcatcttcccagactgaaactcaacaccgttcacagctccccattcccgccttccccaggcgcccaccattctcctctctatttctacgaatttgatgactccagtccctcagatatgtggaattgtggctgggcgcggtggttcacatctgtaatcccagcactttcagaggccaaggcaggcaaatcaccttaggtcaggagttctagaacagcctggccaacatggtgaaacccagtctctactaaaaatacaaaaataagccgggcatggtggcacacatctgtggtgccagctactcaggaggctgaggcgggagaatcgcttgaacctgggaggcagaggttgcagtgagctgagatctcaccactgcactccagcctgggagagagagcgagactctgccaaaaaaaaaaaaaaaaagttaatagaatcgcatggcatttttccttgttggactggattttacttagcataaggcatcaaggctcacccacgctgtagcaggtgtcagcgtctcctccctttctagggctgagaaacattccatctagagacagactcactccgtgcagccatgacgccttggtgaacaccacggctgcttccagcttttggctatggtgagttccgttgctaggaacacagatgtgcacatgtctcttccagaccccctttcaattccttgggtgtatacacaaaagcaggattgccagctcatacggtaataatatttttatttttatttttattttttgagaaggagtcttgctatgttgcccaggctggagtgcagtggtgcgattttggttcactgcaacctccacctcccaagttcaagcgattctcctgcctcagcgtcccaagtagctgggattacagactcgagccaccacgaccggctaatttttgtatttttagtggagatggaggattcaccatgttggccaggctggtctcgaacttctgacctcaagtgatccgcccgcctcggcctctgaaagtgctaggattgtaggcatgagccaccgcgcccggcctcgtacggtaattctgtgtgatgttttgaggaattgccacaattttttcctgcgcctgcaccagggacacgtctcggagctggcgaactggacttggggtgggagggaaaggaagcattaaagatgcccccagctttcacggagatgagaacggtgccccgggagggcgggacgggatcagggtcctgtgaacgggttatcagtgtaaactcctctgagagatatcaggaaaagcaggaagaagcctctgggacccttcgggaggtaactcctcttcgcagcggggcgcgctctcccagtccctgcagccgccgccgccctctcctgagcttcctcgagcggacgccaggcaagggcgggggtcgtagcggggcggagcggggctttgtccacggaccgcgcgaagaggcctcagggcccggcgcgggcgccggagggggacttgctcgcagggggaacgcgaaggttcctcagtctgcgggacgcagagctccgtggggccgcgagccggggccggggaagcgactctgcctagggggacgtcgcgggcgcggggcacagggtcctgcggggctggagggctacaggctgcggcgcgcgcgagccggaaggccggggatcgtgggttctggggccgcagcttcacgggttcgtctcccccgcctccccgggggagcaggatgtcagggggtcgcccccgcccgggagacagggtgtcaaggggcccccggggacggggcttcaggggcacccggagccgctcggccccagggcgggatgcggggacagggccccaaggtaccagggccacgaggggcgcgcgggtcccttggggatgcgcgcgaggaggcgccgtcccttcctagcaggggtccctggggacccgcggccgcctcccgcgcccctctgtcccctcccgtgttcggcctcgggaagtcggggcggcgggcggcgcgggccgggagggggcgcctcgggctcaccccgccccagggccgccgggcggaaggcggaggccgagaccagacgcggagccatggccgaggtgttgcggacgctggccggtgagtgcaggcctcggccccgggtgcccgcgagggagccgctaccgcagggaatgcggggtgcacccgacagccgggccggggtgggggcgctcagggctgcgaggcttcgggccggccgccgccccagcctccgagaccctgcgt

SEQ ID NO: 43065 - DNA, 2300 bp, Homo sapien
aaagaaaaagaaattagccaggcatggtggcacacgcctatagtcccatctactcaggagactgaggcagaacccaggaggtggagactgcagtcagccaagatgacaccactgcactccagcctgggaggaagagtgagactctccatttcaaaaaataaataaaacaggaccaaagtggtgatgagatgggagtgggtccactgagattctggaggtgctctgaaggcacagctgacaggatttgctgaagcattggatgtggggaataagaaaggagtcagtggtttcaaggtctggcccaagcacctggaaggatggagccgctttaactgaaaaaagggttgacagtgagaggaagagatggggcttggggggtcagatgcccattctgaactcagtaggtgatggtgttaagatacccagcagttcaggggagtcagcagcagcgtcacgcctatcctccatgaaacatcacctctaggctggtctgaatggcagtgggatgtcagaactaattaaccttagtgtcactatagttggcattcgacccccacactgctaaatttgactgccttttttaaaagtgaaaaaaatacatatatcttgagacagcctggcactccaggctagaatgcagtggcgtgatcttggctcactgtaacctctgcctccccggttcaagcaatcgtctcttctcagcctcctgagtagttgggactacaggggccggccaccacgcttggctaattttaaatttttttgtgtgtggagacagggtttcactatgttgcccaggctggtctccaactctagggctcaagtgatcctcctgccttggcctcccaaagtgctgggattacaggcgtgaaccactgcgcctggccaaaaaaatttttttaaatcacctcatggcagaagttaggggaagaaagtttagttctgtttcaaatacaacagttctgtttctaatatatatatcagcagccaccttttcaaattgtaatttaagactcttaagttctcccttctctaccaacggggtggccctggaaggggctctgggtccttaatgagcctgtaattttccagtgcaggaactggggtgtggtggtcccaagcctcaggccatgacctctcttttctcctgcccctagtgagttattataaagaccacatcttgtgttaaaaatcgcagtgtgggctgggcacggtggctcatgcctgcaatcccagcactatgggaggcggaggtgggcggatcacctgaggtcaggagttcgagaccagcctggccaacatggtgaaaccccgtctctactaaaaatacaaaaattagctgggcgtggtggtacacgtctgtaatcccagctactcgggaggctgaggcaggagaattgcttgaacccgggaagtggaggttgcagtgagccgagatcttgccactgcactccagcctgggcgacagagggagactccgtcaccggggtgggggagggaatcgtagtgtgtaattctatttttcagagcaaaagccactgcccagggggtcttccttgaacatgcaggctccctcccgcccaacacttctcccttttcccctgggctttctttggcgctcccctcacctgacagtcacacgcttgccaggtttatcagtcacctctacggcagacactcgccgagaacacatctgtgtgtgtgacacactgcttgtgtcccctaggactgaacctagggcctgccacgtgccaggcgctcagtctgtgtccgcctgagacctgaggccccccactccaaaggacggaatgaatgtactgctggtcattcattcatttcgcccctactcatgagcgcctgctgtgtcggggttgggggtgaggggagcacaggaacacgtgcgggaccggggtgattgaggcactgaggccaggccccgggggtgccctgctgcaccgactccgggcggagattggctgtcctcggcccgcaatgctgtgcgccccgccccgcgcgccgcttccggcggagtcaggcttggctaatcgagcgcgcgggctggcggctcggcgttcgtttggccgcgcctgcccgtgtggtggtttccggcggaggtggtgagagtcgcacgcgcagcggggaaggtgtgagtcgtgaacggcccgggtctccgccatggcctctctactcgccaaggacgcctacctgcagagcctggccaagaagatctgctcccattcggccccggaacagcaggcgcgcacgcggggtaacgcacagggccgggccgggactaaggg

SEQ ID NO: 43066 - DNA, 2300 bp, Homo sapien
gatccagcccaatctgatgcagctgtagctgcagtggtcagcaggcttgcaggccccagtgctgaccgctccacctgcctggaggccaccccccacttctcccctcagtctgcttttctcctgctcattggctgtgtgccaggccccgaggtaactgttttacacagataaactcaccagtcatcacaaggaccccaccatgcaggagaaactgaggcactaaaaagtgaaatctccatccaaatccatactgttagtaagggctggacgtgccattatttggtttgcttatctactgaccagctccctgtgcactgggtgcttcctgcctagaacactattcactcgcgctgctcagcccctggcctctcctgtctccaccccttctcagactctgctccccttggtgggccaccccacccccaccttggcggtcttgatgatctcggtgaagttgtccatgatggacttaatgtcgtccttcagccgcttgttgtaggactgcagcagcgtctccttgctctggggcagggctctctgctgggccatggctgagcctcaagcagcgcagcggggagacctgggacctagagtgcagcacagacctctgagtgcaggcagagtctaccccagccaccctctatgccccaaccttagcagaacacgcagatttctggggattccctttctgccaaataaagtcaatcactgaaacacagatgaactcattccatcagcagacaccgcagggggtgccaggactggccccgcctttgccagagcaagctcatcctggaactcctggccagccctccaagccctgtccagggctccagtccagacttcacgtccaggcccacagcgtgtcccagggagccctgcaaactcaacaccagctccccgtccccagcccttggcttaacttcttagcccgccgccaccttcgccacgccctcccatccgaagagtccttccaattcgacccctctgcaccgcctacatccacgctttccttccactcccactcaggctgccccgctccagacctcatccctgcactgcgggccccgctccctccagtctctgcgcggcagggaagaggtcctaaaaagtggtcattccaaccgggcgcggtggctcacgcctgtaatcccagcactttgggaggccgaggcagggatcacctgaggtcaggagtttgagactagcctgaccaacatggtgaaaccccaactctactaaaaatacaaaaattagccgggcgtgatggcaggcgcctgtaatcccagctactcgggaggctgaggcaggagaatcgcttgaacccgggaagcacaggtcgcagtgagccgagatcgcgccactgcactccagcctgggcgacagggggagactacgtctccaaaagaaaaaaaaaaggggggtaattccactccctcgcttaacatccctcatggttccccggtgcgccgggacaaggggctcaagttccgcgccgcgcctctcggcctctgccctccagccgcactggacggcctcggcgctggagttgcctggccctggggccgggcctttgcgcgcggtgctcagggagggcccggggccccctaggttcggagtctggcgcacgaccgagcggactcctggacgcactcgcattgtttgtgcccatttttggcggggtgtgggaaataagtcacacgcaggaaaggggatctccgaccccagcgcctacgcacccacccacccccactcccgcccacacacccaccccccctccatccccaccccccaccacaccctcatacccgccccagcgcccgcacaccagacgccgcgtccgccgggtcggcctagggcggggtggtcaagtgcctctgcgacccgcactttcccgcgtctctcccacggcctggccctcccgccgcagtctctcttccccgccgcgccgcggtccgaaaacctagtcagccgccgcagcctctcagccccgcctcgatttttagctttataggaatgctgttgctttaaatccgaaatcccgtgccggtatcaactctcgcgatctccgaggccgcatacatattacccacaattccctttcctttctctctcctcccgccgcccaagatggtgagtgagctgtagttccgtggcactatagccaggttccggctgtatccgctgccatcctcctccaggcgcggcctcggagggcctcctgctcctcctggcgctaggagagccccactcggtgtggcacggagacaccgaggtggattagagccccacttggtgtg

SEQ ID NO: 43067 - DNA, 2300 bp, Homo sapien
actgaaacacagatgaactcattccatcagcagacaccgcagggggtgccaggactggccccgcctttgccagagcaagctcatcctggaactcctggccagccctccaagccctgtccagggctccagtccagacttcacgtccaggcccacagcgtgtcccagggagccctgcaaactcaacaccagctccccgtccccagcccttggcttaacttcttagcccgccgccaccttcgccacgccctcccatccgaagagtccttccaattcgacccctctgcaccgcctacatccacgctttccttccactcccactcaggctgccccgctccagacctcatccctgcactgcgggccccgctccctccagtctctgcgcggcagggaagaggtcctaaaaagtggtcattccaaccgggcgcggtggctcacgcctgtaatcccagcactttgggaggccgaggcagggatcacctgaggtcaggagtttgagactagcctgaccaacatggtgaaaccccaactctactaaaaatacaaaaattagccgggcgtgatggcaggcgcctgtaatcccagctactcgggaggctgaggcaggagaatcgcttgaacccgggaagcacaggtcgcagtgagccgagatcgcgccactgcactccagcctgggcgacagggggagactacgtctccaaaagaaaaaaaaaaggggggtaattccactccctcgcttaacatccctcatggttccccggtgcgccgggacaaggggctcaagttccgcgccgcgcctctcggcctctgccctccagccgcactggacggcctcggcgctggagttgcctggccctggggccgggcctttgcgcgcggtgctcagggagggcccggggccccctaggttcggagtctggcgcacgaccgagcggactcctggacgcactcgcattgtttgtgcccatttttggcggggtgtgggaaataagtcacacgcaggaaaggggatctccgaccccagcgcctacgcacccacccacccccactcccgcccacacacccaccccccctccatccccaccccccaccacaccctcatacccgccccagcgcccgcacaccagacgccgcgtccgccgggtcggcctagggcggggtggtcaagtgcctctgcgacccgcactttcccgcgtctctcccacggcctggccctcccgccgcagtctctcttccccgccgcgccgcggtccgaaaacctagtcagccgccgcagcctctcagccccgcctcgatttttagctttataggaatgctgttgctttaaatccgaaatcccgtgccggtatcaactctcgcgatctccgaggccgcatacatattacccacaattccctttcctttctctctcctcccgccgcccaagatggtgagtgagctgtagttccgtggcactatagccaggttccggctgtatccgctgccatcctcctccaggcgcggcctcggagggcctcctgctcctcctggcgctaggagagccccactcggtgtggcacggagacaccgaggtggattagagccccacttggtgtggcacggagacattgagatggactagagccccgggcggccgagagcggaatgcgttgttcccggtgtcgcagggctgggtgtcgcaggcctggagcaccgcagtgcggggctcggagccctagcgtctctcgggcttgctgggggccgctccagaggccttgtgagcgacgagttctgagcccgcccctgttgcttctagagcctgtggggccgcgactcagaggagtcatgagtccggggtgtctcctgggtgggcgacgcgaagagagcgtggtctcgggcttagccttgctctggccactcggggttcccggggctgcatgcttgtgcggctgaatgtgagatgctcctgtcgaggggtggtgctggggggttgcagaaagctgctcgccagcttagttcaggcaggtgctgtcagcgtcccttgttttggaggagccagcctgagccctacccccgacgaagcgagtggaggcggcggtttaactgacgttttctttctgcccagccgaaaggaaagaaggccaagggaaagaaggtggctccggccccagctgtcgtgaagaagcaggaggctaagaaagtggtgaatcccctgtttgagaaaaggcctaagaattttggcattggtaagtaacaaacggcagaatgaaaacggtctatgtttttctcaagggaaggtggtaattgggttgtgttgtatcttg

SEQ ID NO: 43068 - DNA, 2300 bp, Homo sapien
tcaaggttctaatccttgtcacttaacacttaataacaaatgctggactgcggtcctgctatatgactataatttaatgacaactgcagttcaagaagcctaagaccatccccctcatgttctggatgaaataaggaatccttgcctgagaaactcctttccacgccacagaacctcacctgtttggcggtccagggcctgggtgaactggttaatcgcaggaggcactttcagccgcttatagaggatggctctctgccgctgcaacctgatatagcggggccatttcacaaagcgggtgaggtctcttttgggctggatgtcctgtcctgagaagtaaagggtgacaccgagtgaggctcaaattccatgtcaagttcatgtctggggccactaggaagggtgttggtgcatcagcgatcttggtggtttaaaatgtcatcaccatctctcagatagcaaatattcttttacatcatctgcacacaaacacctgagaacaaagagcacgatgcttttcctcatctaacaagaagccaaggtgccacgaagtacagcagaattgcagtcctagtacctcgctgcgacactgctactgtacttgtttccagatggctaagctgaattcaaggccactaccatattgagctgaatgctcgctcagcaactcccaatgaaagcaagaagcatgtatcattgcccccgtctctaagagacacaaattaaggactgcgaccactttacacccactaaaacctacaagatacaacacaacccaattaccaccttcccttgagaaaaacatagaccgttttcattctgccgtttgttacttaccaatgccaaaattcttaggccttttctcaaacaggggattcaccactttcttagcctcctgcttcttcacgacagctggggccggagccaccttctttcccttggccttctttcctttcggctgggcagaaagaaaacgtcagttaaaccgccgcctccactcgcttcgtcgggggtagggctcaggctggctcctccaaaacaagggacgctgacagcacctgcctgaactaagctggcgagcagctttctgcaaccccccagcaccacccctcgacaggagcatctcacattcagccgcacaagcatgcagccccgggaaccccgagtggccagagcaaggctaagcccgagaccacgctctcttcgcgtcgcccacccaggagacaccccggactcatgactcctctgagtcgcggccccacaggctctagaagcaacaggggcgggctcagaactcgtcgctcacaaggcctctggagcggcccccagcaagcccgagagacgctagggctccgagccccgcactgcggtgctccaggcctgcgacacccagccctgcgacaccgggaacaacgcattccgctctcggccgcccggggctctagtccatctcaatgtctccgtgccacaccaagtggggctctaatccacctcggtgtctccgtgccacaccgagtggggctctcctagcgccaggaggagcaggaggccctccgaggccgcgcctggaggaggatggcagcggatacagccggaacctggctatagtgccacggaactacagctcactcaccatcttgggcggcgggaggagagagaaaggaaagggaattgtgggtaatatgtatgcggcctcggagatcgcgagagttgataccggcacgggatttcggatttaaagcaacagcattcctataaagctaaaaatcgaggcggggctgagaggctgcggcggctgactaggttttcggaccgcggcgcggcggggaagagagactgcggcgggagggccaggccgtgggagagacgcgggaaagtgcgggtcgcagaggcacttgaccaccccgccctaggccgacccggcggacgcggcgtctggtgtgcgggcgctggggcgggtatgagggtgtggtggggggtggggatggagggggggtgggtgtgtgggcgggagtgggggtgggtgggtgcgtaggcgctggggtcggagatcccctttcctgcgtgtgacttatttcccacaccccgccaaaaatgggcacaaacaatgcgagtgcgtccaggagtccgctcggtcgtgcgccagactccgaacctagggggccccgggccctccctgagcaccgcgcgcaaaggcccggccccagggccaggcaactccagcgccgaggccgtccagtgcggctggagggcagaggccgagaggcgcggcgcggaacttgagccccttgtcccggcgc

SEQ ID NO: 43069 - DNA, 2300 bp, Homo sapien
gagcactcacagggcctgctctagtcacaagaagctgctgggctcagctgctgactcagtgttaaaaagctcggttttactcttcacagtaatttcaggccaagaaattttacatcactgcaacagcccgcccccagtgttcaccctaaggtggggcctactcacctgctcgaaggacaggtggtctcttcgttgggacgtcccctttgccagcagccttcttctcggcccgggccaacagtctctgcttcttctcttgctttgtctctggtctgtacttgtgggccagcttaagcagctgagtagctggaaaaacactcttcagtttaggcttggagtcaaggttctaatccttgtcacttaacacttaataacaaatgctggactgcggtcctgctatatgactataatttaatgacaactgcagttcaagaagcctaagaccatccccctcatgttctggatgaaataaggaatccttgcctgagaaactcctttccacgccacagaacctcacctgtttggcggtccagggcctgggtgaactggttaatcgcaggaggcactttcagccgcttatagaggatggctctctgccgctgcaacctgatatagcggggccatttcacaaagcgggtgaggtctcttttgggctggatgtcctgtcctgagaagtaaagggtgacaccgagtgaggctcaaattccatgtcaagttcatgtctggggccactaggaagggtgttggtgcatcagcgatcttggtggtttaaaatgtcatcaccatctctcagatagcaaatattcttttacatcatctgcacacaaacacctgagaacaaagagcacgatgcttttcctcatctaacaagaagccaaggtgccacgaagtacagcagaattgcagtcctagtacctcgctgcgacactgctactgtacttgtttccagatggctaagctgaattcaaggccactaccatattgagctgaatgctcgctcagcaactcccaatgaaagcaagaagcatgtatcattgcccccgtctctaagagacacaaattaaggactgcgaccactttacacccactaaaacctacaagatacaacacaacccaattaccaccttcccttgagaaaaacatagaccgttttcattctgccgtttgttacttaccaatgccaaaattcttaggccttttctcaaacaggggattcaccactttcttagcctcctgcttcttcacgacagctggggccggagccaccttctttcccttggccttctttcctttcggctgggcagaaagaaaacgtcagttaaaccgccgcctccactcgcttcgtcgggggtagggctcaggctggctcctccaaaacaagggacgctgacagcacctgcctgaactaagctggcgagcagctttctgcaaccccccagcaccacccctcgacaggagcatctcacattcagccgcacaagcatgcagccccgggaaccccgagtggccagagcaaggctaagcccgagaccacgctctcttcgcgtcgcccacccaggagacaccccggactcatgactcctctgagtcgcggccccacaggctctagaagcaacaggggcgggctcagaactcgtcgctcacaaggcctctggagcggcccccagcaagcccgagagacgctagggctccgagccccgcactgcggtgctccaggcctgcgacacccagccctgcgacaccgggaacaacgcattccgctctcggccgcccggggctctagtccatctcaatgtctccgtgccacaccaagtggggctctaatccacctcggtgtctccgtgccacaccgagtggggctctcctagcgccaggaggagcaggaggccctccgaggccgcgcctggaggaggatggcagcggatacagccggaacctggctatagtgccacggaactacagctcactcaccatcttgggcggcgggaggagagagaaaggaaagggaattgtgggtaatatgtatgcggcctcggagatcgcgagagttgataccggcacgggatttcggatttaaagcaacagcattcctataaagctaaaaatcgaggcggggctgagaggctgcggcggctgactaggttttcggaccgcggcgcggcggggaagagagactgcggcgggagggccaggccgtgggagagacgcgggaaagtgcgggtcgcagaggcacttgaccaccccgccctaggccgacccggcggacgcggcgtctggtgtgcgggcgctggggcgggtat

SEQ ID NO: 43070 - DNA, 2300 bp, Homo sapien
gtagcttcacaagggcagtcaggtgtcaacagcaagcccaacagatgactgataatgagagctcccacctgaggtcaaggcagtgactaaaagtcccaccaaaaggggcaagctggccagcagaagccagggctctgctgttgaactcaagtaaaacaggccctaggggggcagccatgcactcactcggctggcagagggacaggctcagccagaactctggactccaactctgcaatcaggttcagcttccacttccgacgctggacctacagtgacagagcataaggccaagcagatggcagcaaggtcaagggcccagagttacgcacaccagatgccggtctttacctgccatgtccccaagccaaaggcagtcacagggatgaggagcaggacccactgaagaaaggagtcatcttccgcttttgtggcagatgcttctgctgcagaactgccacatctgcttggcctccaggccacccctggagagtttcacaacactgacatggagccagaagccctcgaacacagacctggagcagcccgttccaagacagactccagtactgccaatcaaaacctgctgcctagagccaactagcagcacctgtatccagcccagctcctaacccggtgcccagaacaaggcacacacagtacgtctgccaagtgagtaagtgggatctagggctcagtgccggtttgaccaccaaccacgaccctgagtaactcatgcctttttactcaagaatctagatgtattccactgcactaagatgcaccattcatccattcaaaatgcatttaataagcagctacagttggccgggcacggtggctcacgcctgtaatcccagcactttgggaggccaaggcgggcggatcacgagatcaggagttcgagaccagcctgaccaacatgcagaaaccccatctctacaaaaaaatgcaaaaattagctgagcacgatggtgcttctgtaatcccagctactcgggaggctgaggcaggagaatcgcttgaacctgggaggaggtggttgctgtaagccgagattgcgccactgcactccagcctgggcaacaagagcgaaactgtctcaaaaaataaaaaataagcagctacagttactaagtagcttagtcaggcactagtggttattgtgttatgtagaaaaatatatcaattcagtaatggctcacagagctctcttaacagctttccatttttacaactcatcgtaaatgtaaagagggaagaatgtacacagaaagtgcctttaagctctcagaggatgagttccatccgctgaaaagcaccaggggccttgcggatactatttttttttttttttttataaaaaggcaggcctggggcaggcttgcacagcactctacacacggcaaaacagccctgtgctgcacactgagaggaacacgtaagccgcggtggttagatacgctttactttcagagccctgggctttcagcctgggctggccacccattagctggatgggacgttcggaagtaactctcgagccttctctgtaacaggggaacgaccaaggagctacctctcgcgttgtgaggacaaagcgctcgctacatgcccggcacacgaccacaattccactgaaagcattttaatacggaacttgtcactcccagggagcctccgctcagccggcagttggttcatttcaatccccacgacaacccttcaaagtgcagggcagacagcaggtggctctgcccaggcgcctggatcacagcccggcctgcagccctcacctgggcgcggggagaccctgaggacgctcctccaggcggcgctggccggggcctgcggacacggacgggcgggctgagctccgggacccctccccgcgccccgcaccccgcaccccgcaccccgcaccccgcaccccgcacccggcgctcacccgtcccagccccgccgcccgcagccccagctgcaacgcagccaccgccgccatcgcacccggccccgcgggcgcttccgggacgcaggaggcatctgcatccggggcgccgctgagtcccgcccagagccccgcccccggctccaggttctgcgagcggcttccgccgggctgctccgcgggcgcgtcggccatgagcgagttgccgggcgacgtgcgggcgtttctgcgggagcacccgagcctgcggctccagacggacgcccgcaaggttcgcagcgcgggaggggaacggagtggcggagaagggcgcagttgggatgaggggctgaggggagggcaggggagagga

SEQ ID NO: 43071 - DNA, 2300 bp, Homo sapien
cctctctcccttctctaaactctcgccgggtgctcacccagatccacggtgcaaccatctccttcatccagcacgggtgtccctgtttcaaaagcccgatacttccctaatacacacctttcctaatacagctcaagcttaaaaccttcaaagggactctgaattctccccccaaaacccaccgtcttttcctggatgaccgcagtcaaggagtcctcccttctcaaccatgcacactgtccatgcagcccccacccaaccctctccacacacccactgcagtgctcctggcctggtctctgggtcatccgggctgtgcacactagcccagccagtcctttggagcctacctcagccaacacatttttgcctcagacttccatggaccctggcttctccctggggtgctgttcccccgaccccactgccaccacatccctccagcctcagcctcgagcgaatccctcagcgagtctccccagccctcctgtctccgcaagcccaccccacatccctcgcccagtttctttcacacctcgcattgccacgcacactcactcactcccgagcctgcttctggctctgtgcctgcctgcactaaaagctgtggggtcaggggccatcatccctctcttcactgtgccaaaaaacaggcctgatgcatcaacacggatcgctgaaggacgacctgccttcaagcacgctccatctggggcaaggcgggcatgcactcagatggcgatgcactgatgggggtccactgggacttacatttacacagagctcgctggtaccgccggccctgggtgtgcctcagcacgtgttctgggcacttgttgatgtgccgcagggtgagtttgcagaacaactggtgcctacagagcagagagaccaaatttgtagggacagttcacagcaaggattcagactggtggctgtgtcttggactcatccctggacagtctaccatgcggcttggacatcgggcttttaaaggctcccggagcaattccactctgaagctgggtggggaaccgtctgacccaggccgactgcagcctcttaatgtttaccggaaaagcacgcatggcagcctcactgactgctccaggatgagttcatgcaagaggatggctccacctggagcaagggctcaatgaatggaaacatcctatctctgttttgacgattattacaaagcctagctcccagctaaatcaaagaccccttctggggttaagggaagaacccaacgctgttcacaacctcaggtgacaaatcacaagcctctactcatctgggaagcagccacaccccacaggacaaacctcaggtgagcaaacgagctcaccaagaggcctcgccgctgggaccgcaggtgattccagcacccgggcgcccacctgggtcccagggctcccaactctgaaagagtaggggctgcagcactggcggagtccagcggaggggctgtcctaattgccctgggcctccccgcgccgccgcggaccacctacgggttcttggtgctgggcacgatgtgcggctcgaactctgcatagtcgaaggccggggaggcgcggaccagccgctggtactttttgccgcgggtgtagacctggagctccggcaggcggcagggcagctcgtgacctgtcaggatgcacctcacctgcggacgcgtgggcgggcaggacgtcaggagggccagggctccgctccctggtgccccctcctgccgcgcccccttccctctcctcccctgatcccgccgcgccctctcccctgccctcccctctctcctgctctcccctctcccctctcccctgccctctcctctcccctgccctcccctcagcccctcatcccaactgcgcccttctccgccactccgttcccctcccgcgctgcgaaccttgcgggcgtccgtctggagccgcaggctcgggtgctcccgcagaaacgcccgcacgtcgcccggcaactcgctcatggccgacgcgcccgcggagcagcccggcggaagccgctcgcagaacctggagccgggggcggggctctgggcgggactcagcggcgccccggatgcagatgcctcctgcgtcccggaagcgcccgcggggccgggtgcgatggcggcggtggctgcgttgcagctggggctgcgggcggcggggctgggacgggtgagcgccgggtgcggggtgcggggtgcggggtgcggggtgcggggtgcggggcgcggggaggggtcccggagctcagcccgcccgtccgtgtccgcaggccccggccagcgc

SEQ ID NO: 43072 - DNA, 2300 bp, Homo sapien
gaggccgaggtgggcagaccacctgaggtcgggagttcgagaccagcctgaccaacatggagaaaccctgtttctactaaaaaaaaaaaaaatacaaaattggctgggtgtgacggtgcatgcctgtaatcccagctactcgggaggctgaggcaggagaatcgcttgaacccaggagttggaggttgtggtgtgctgagatcacaccattgcactccagcctgggcaacaaggtcaaaacaccatctcaaagaaaaaataaataaataaaaataaataaacaaataaaattgtgtctttaagcacaaaatcagaatcttagggaaaaaatgcttcgtcaagttgattactttttccctccaaatttaaaatattggctcacagaaagtgttgcaatgagaaccgatggtgaggtcacactagaaagagatcaccccccaggaggaacggaagagctcaatagctgatcagaaaacggtcacttactcttttcttttttttttaaaccacacatatacaagccttccgataagtctaggcctcagagtttgatgactcactaccacctccagaaaaatttaaaaatttaaccatcactacttaaaactctagcaaagccacacgaacacattaagtaaaccgaggaaaaaacggcaagtgggccacacaaggctctccctgcggggataaggctgttaatttgtcgacataacgggattcttttagaagtaaaaggcataaatctgcgtaaccaccaccaccttttgtttttgtttttttgttctgtcaagcttaatcaagaaagagggaagggagttgtgtcccttcactttgtaggatcggatcctgtccacccagttcccgaatgctctcaacagttacccaaccgcctgtttcaaaggcttccctgttgctcagaatgccacctggacacttctggaaggagactatcagggagataggcttcccctcctcccaggctgtgtacaggtccccactcaatccagcccagggcagagtccaaacggggagggagacgcagacagggtcaaagggaccccaagagtccagcacatctgggaaagagaaaaggaaaaggtgctgtggcttcctgtagctggggcgcacgccagcgcgccccctttcctctgggaggacccccggcccccgttcgtccccgagctcccagcccgcctccgggagccccagtgagaggaaaaacgtgcggggaccccccagcagctccaaacgccgaggcgctccccgcgagcctcagacccgacccaacgccaggactcgcgccgccggcccgggaagaaacccccacagcccgcgccccgggctggctggagggtgggggcggctagccaggcagggcgccgaggcccgggctccgggagcggcccagcgggcaggggagactgggcccggaggccgggtttggggctgtccagccgggacagagggcccgggcgggggggtccctctgtgggaacaaggagtcagggggcggcccgggcctggcgccctgcgctgggaggccgactccggagcggcccgggcggcctgggtcgggaccggggccgggggaggagcccgcaggccgcacctggtcggcgaagtcctcggccgtgcccatcaggtcgttctggcccatggcgacggcgggaggctcggctcggctcgctcgctcgctcgctggctctcgcccgtcggcgcccgcacccgctgcggcctccacaggaagtgcccggcggccggcctcgctccgcgtcggctgcggctccagcggctgccacgtaggccaagccttaaaggggccgcgcgccgcccgggcccgccccggtgcgtcttaaaggggccacgcgccatccccagcctcccgacccatccgctcgaagccacgcccgccgcgctcgacgccacgcctctcacgctggaggccccgcccgccgcgcgcaggccctgcggtccctcccggcccggcggaacgcgtcccttttaagggggcggggacctgggggtctggggccagcgcgcgggagggacgcctgagtgcctcgagggcgccgttcgggcggggaggatcccgcgggtcccactgacccacgcggggtggggccaggggtggacgctcgcccgtacgcggtcgctactgatcatgcttgggccagggtccaatcgcaggcgccccacgcagggggagcgaggcccagggtcccccggagagcccatggagaagtaccaggtgccgagtgttccctgcggggaggcgggagctccgtggggtaacggtcgca

SEQ ID NO: 43073 - DNA, 2300 bp, Homo sapien
cactggatattctaagccaggggtccccaacctagtccgtggcctgttaggaaccaggctgcacagcaggaggtgagcagcaggcagtggagcaaagcttcatctgtatttacagccgctccccatggctcgcattaccacccaagctccacctcctgtcagctcagcagcagcattagattctcatgggagtgtgaaccctattgtgaacagtgcatgtgagggatccaggttgcatgctccttatgagaaacaaatgcctgatgatccgtcactgtctcccatcatcccgagaggatggtctagttgcaagaaaacaagctcagggctcccactgattctacattatggtgagttgtgtaattatttcattatgtattacaacataataatagaaatgaactgcacactaagtgtaatgtgcttgaatcatcccaaaaccatcctcccgcctccatctgtggaaaaattgtcttccacaaaactggtcccttgtgccaaaaaggttggggactgctatttttttttttctttctgagacagagttttgctcttgttgcccaggctggagtccaatggcgctatcttggctcaccacaacctctgcctcctgggttcaagcgattctccagcctcagcctcccgagtagctgtgattacaggcatgcgccaccacacctggctaattttgtatttttagtagagacagtttctccatgttggtcaggctggtcttgaactcccgatctcaggtgatccgcccgccttggcctcccaaagtgttggggattacaggcgtgagccaccgagcccggccagggactgctgttctaagccacagcgggctgagggcagagctggtgtgagagcgttcaagcttaggcagcaaattaaacagtaaaatggagccgtatctcgaatcaagtctatttttttttccaaaagcaggtatattcctgaaacgtctatttttttttaatctgaaaaacaactttactttaaaaattatctggccaccagaagctcatctgcttcacctctggcaacgccctatagtcctctcacacaaagacaattcttccaaagtgacaaaaatctaacccgcaaactgtttccaagcgaatgcatttttcacaaatgctgaatctaacatttaataaagtgtatatatcatgtatagaagcatttaattaaacatttacttttattttgcagctttccttttgtgttttgtgaattttttaggtctcaaacattttcacagacccacgctgcaggggtgtttttaggggactgggggctcccaattatgtactcgggatgttcccgggggtcctgcctcggtggacccaagcgcacagaccccaggcacgaaggatagaggagctgccccacgccctcaaatactcagccagggctggagaatccttagtcaattcacaaagggggaaactgagtggcaaagggcacccaggaggtcaccgttggaggccccccgggttcaacctaggagctgcaggccgacactggccagggcgcgggcccctcgccgccctcggtcggaaccgccggccgtagctccagggttgcgaccgttaccccacggagctcccgcctccccgcagggaacactcggcacctggtacttctccatgggctctccgggggaccctgggcctcgctccccctgcgtggggcgcctgcgattggaccctggcccaagcatgatcagtagcgaccgcgtacgggcgagcgtccacccctggccccaccccgcgtgggtcagtgggacccgcgggatcctccccgcccgaacggcgccctcgaggcactcaggcgtccctcccgcgcgctggccccagacccccaggtccccgcccccttaaaagggacgcgttccgccgggccgggagggaccgcagggcctgcgcgcggcgggcggggcctccagcgtgagaggcgtggcgtcgagcgcggcgggcgtggcttcgagcggatgggtcgggaggctggggatggcgcgtggcccctttaagacgcaccggggcgggcccgggcggcgcgcggcccctttaaggcttggcctacgtggcagccgctggagccgcagccgacgcggagcgaggccggccgccgggcacttcctgtggaggccgcagcgggtgcgggcgccgacgggcgagagccagcgagcgagcgagcgagccgagccgagcctcccgccgtcgccatgggccagaacgacctgatgggcacggccgaggacttcgccgaccaggtgcggcctgcgggctcctccc

SEQ ID NO: 43074 - DNA, 2300 bp, Homo sapien
cccctgaaagggaagagccttctgcccaggacgggatgggaccccagagctcacacaggggcctgggacaggacaagagacgggacccaggaggccccatcagcttgggcggaccagtaggctggcatgacctgaacaggaccatgcaagaacagaggaggcagcccccccagagccaaaggggtcgttgtcactctggggaagattaggtagtacagaggtcaagaccatgagcccggagttgccaggcaccagctagtgtcttggccaggcccaggatgctctctgaaggactgtgctgtgggccgagcgtcggttgtgctgtgctcagcgctgggcccagcctgtctagctgagtaacaggcagggtttgtgttgtggggaattggagacactgtttgcagagctgttttgatcagtcacggtgtgcctgcatgttaggaaacctgtgcagatgtgatgtgtttatggacagagagagggtcacagggtagcataacgcagagacaagagtttatcaagtgtgcgtgaaagtcttgatggtgatttctggatgactggacttcagatcgtttttaatttcttttcctttttgatttgttgcttctgttttttggtttgtggcacctggcagatgtaactgatgggggctgattcttgcccccacctctaggtggcagcctcgtcctgtccccaggctcacctgacaccttcaccaggctggccagtccccggtaggcattgttcaccagcagggctctgtcctggcacagccggatgctttgcaggagcagcgccaccacttgttcaaactgctgctccttgatgcagcctgcagaaaggggccgggctgccttgtgcctgctgtgccatgaggcccacccctcccagccccaggggcccagggcgcccacccagctcacccagcagggacagcagccagaagactccgcagctggcttctgccatttccccatccgcagggtaggtggccaacacctggctgatgaggtccgggaccttctccaagggggccttgttcacaatgatacctggaacgaggacagggatggaaggggacacccaggccttgggtgtgtgcaggggggccttcccatcccccatctgctgccttcctccagctaacgacaacagcagaaatggggtgggaaaggtcaactgtcctcagagacgggtgcaggggttagcccaggagaggcttggagaatcccacactttgggtgctggcagggttcttgggtttcccgggctttccgtggtttggagctctctttttcctggggcgctggagtgccaagatggggtctagaggagaggaagcagcacaggccagggggccccctactgtgaatcaaaaatcaaaacaaacagggcatccagcaccaccgctgccctctggaaccaggactgcccggaaaatcccaggacatttccctgggcaggaggcacttaaaactgaggggtctgcccactgggcaagaagtcctgaaacccggcctctgccagaaggcctttctcccctgccttttctctctctgctccttgattttcttctgttggagttggaagctctcagaagagcctttcccggactatggctgttgtgttttagggacaggacatggaggtcctcgaaggctctcaggggcagttagggaggggctgggggagggctgccagccccggtgggacagcaggaggagggcccctcaccgtccagcaggagggcccagagcaggcccaggccgctggcgcagacgtccctgcttttgagggagctgttgaggtgctccaggatgtgctccagcagcccagcgttctgcagctcctctgacagtgactctgactctgtgggtgagccagaatgagggccccagggcccctccctccaggaagccttcctgcctctgttgtccttgggcactgcagtcccatttgacctgcaatcctaggtgcctgctctgggccaagtcgtgtgcactcaatggagccctgaacaggaggatgtgggactggccccagaggagtctgtccatctcgtggaccaccagtcccaatagctgccatcccactaccaggctgggtctgacctctgtagcttcccatccagggggcctgaccctgcctcctgggctcacagagccagcctgtgccttccaggatggaaccatgacggggccctatcccggtaggatgaactgacatccattttgcctgagggttccagttgacatctattcctagtgcctcctttcactccccaaagtgagatcagccat

SEQ ID NO: 43075 - DNA, 2300 bp, Homo sapien
aaggaaagcgtgctgaagccagaaagacccaagtatgaggcctgtccctgcttctcgccagttgggtggtttggggcaagtttctgacgtcctctgtgccttgtggtagtcatggtggcatcataaggagattgtgaggttggcactcttggctcagtgcctggtgattacttcaaccctgtgatggagccaggtgtggtggctgttgcctgtgatcccagctccttgggaggccaaggtgggaggatcacttgatcccaggaggttgaggctgcagtgagctgtgattgcactactgcctccagcccgggtgacggagcaagactctcaaaaaaacaagtgaaaagaataaaccctgtgctggccacccacgtggggtggaccgggagtcagtggccttctctgaatggttcagctggaggtgacgtgttcataagttacagctggcttcatgttgcctgggtgttcaggacacagtcgctgatggctgaggaatgagccatttgggggcctccctgtgttgtgctaggcaggctgtctgggatagagttcagtgaggtgggcctgctcctccctcttgaggcttattgtcaagtgcagtagacagactgtaaactgcagctgttgattaagtgtggtcaggataaatctagtgaggagaaggtattgggtgcctggaacaagagggacgtgtccattcagtggggccaggaatggcttttctaaggaaatgacatttaaccttagcccaagagacagattccccaggcaggtgttacgtgcctgtgtgagcttcctagtacggagggcaaggggttctgtgtttccatcttacaggcattctgtctgtctgtttcctaagtgttcaataatgaacgtgttaccttcataattaaaatgttagcactcattacacttgggtggtgggttatgtgtttctgttttatattctttgtgtttgtctgtgttcctaaatcttgaataatgagtgtattttctaattaaaaagaaaagagatgaggccaggtgctgtgactcacacctgtaatcccagctctttgggaggccgaggcaggtggatcacttgaggtcaggagttcaagaccagcctggccaacatgacgaaaccccgtatctactgaaaatacaaaaaattagccaggcgtggcagtgggcgcctgtaaaatcccagctactagggaggctgagacaagagaatcacttgaacctgggaggcaaaggttgcagtgagccaagatcatgccactgcactccaggttgggtgacccagtgagactccatctcaaaaaaaaaaggaaaatgccaagatgatcaaaatagcagaagcagcagggccagcagtcggggtgtctggggccagcctgtgggagaggcaggctgtgccatcgctccactcacctgcacagtcagccccacagccccaccccaccagttgcactagggtcttctggtgatcagcctgttatctttgccttttagggaagacatctggtttgacgacgtggacccagcggatatcgaagctgccataggtccagaggcggccaagatagcgaggaaacagttgggtcagagcgagggcagcgtcagcctcagcctcgtgaaagagcaggccttcggcgggtacgctggtctcagggagtggggtctgctggggatgcttagccgtggagggcggggcttcttcaaggaagaggatgctttcctctccctgaggtgaatgaggcaagcacctcccagggtcctgctaagaaccaggaccacacagagcttgtcacgtgggtgcaaatgagtgaggggcagagagcttttctctgctgacacttagtccatggatccctggggctctgacctggagccctgtggcctgccgtgtttattaaactacagcctttggttacccttcagcctgacaagagccttagccttggactgtgagatggtgggcgtgggccctaagggggaggagagcatggccgcccgtgtgtccatcgtgaaccagtatgggaagtgcgtttatgacaagtacgtcaaaccaactgagcccgtgacggactataggacagcggtcagtgggattcggcctgagaacctcaagcagggtatgtcatccacagctcaggaacttagaagggaaagtagtaactggattcgttttctcccttttgttcccttttctgtctgagaccactcactgcagctggttttgatgcgtcttgtctccttttggggcgatgggttttaaaatacaaaaggcatccttagacggctttacaccc

SEQ ID NO: 43076 - DNA, 2300 bp, Homo sapien
actactttcccttctaagttcctgagctgtggatgacataccctgcttgaggttctcaggccgaatcccactgaccgctgtcctatagtccgtcacgggctcagttggtttgacgtacttgtcataaacgcacttcccatactggttcacgatggacacacgggcggccatgctctcctcccccttagggcccacgcccaccatctcacagtccaaggctaaggctcttgtcaggctgaagggtaaccaaaggctgtagtttaataaacacggcaggccacagggctccaggtcagagccccagggatccatggactaagtgtcagcagagaaaagctctctgcccctcactcatttgcacccacgtgacaagctctgtgtggtcctggttcttagcaggaccctgggaggtgcttgcctcattcacctcagggagaggaaagcatcctcttccttgaagaagccccgccctccacggctaagcatccccagcagaccccactccctgagaccagcgtacccgccgaaggcctgctctttcacgaggctgaggctgacgctgccctcgctctgacccaactgtttcctcgctatcttggccgcctctggacctatggcagcttcgatatccgctgggtccacgtcgtcaaaccagatgtcttccctaaaaggcaaagataacaggctgatcaccagaagaccctagtgcaactggtggggtggggctgtggggctgactgtgcaggtgagtggagcgatggcacagcctgcctctcccacaggctggccccagacaccccgactgctggccctgctgcttctgctattttgatcatcttggcattttccttttttttttgagatggagtctcactgggtcacccaacctggagtgcagtggcatgatcttggctcactgcaacctttgcctcccaggttcaagtgattctcttgtctcagcctccctagtagctgggattttacaggcgcccactgccacgcctggctaattttttgtattttcagtagatacggggtttcgtcatgttggccaggctggtcttgaactcctgacctcaagtgatccacctgcctcggcctcccaaagagctgggattacaggtgtgagtcacagcacctggcctcatctcttttctttttaattagaaaatacactcattattcaagatttaggaacacagacaaacacaaagaatataaaacagaaacacataacccaccacccaagtgtaatgagtgctaacattttaattatgaaggtaacacgttcattattgaacacttaggaaacagacagacagaatgcctgtaagatggaaacacagaaccccttgccctccgtactaggaagctcacacaggcacgtaacacctgcctggggaatctgtctcttgggctaaggttaaatgtcatttccttagaaaagccattcctggccccactgaatggacacgtccctcttgttccaggcacccaataccttctcctcactagatttatcctgaccacacttaatcaacagctgcagtttacagtctgtctactgcacttgacaataagcctcaagagggaggagcaggcccacctcactgaactctatcccagacagcctgcctagcacaacacagggaggcccccaaatggctcattcctcagccatcagcgactgtgtcctgaacacccaggcaacatgaagccagctgtaacttatgaacacgtcacctccagctgaaccattcagagaaggccactgactcccggtccaccccacgtgggtggccagcacagggtttattcttttcacttgtttttttgagagtcttgctccgtcacccgggctggaggcagtagtgcaatcacagctcactgcagcctcaacctcctgggatcaagtgatcctcccaccttggcctcccaaggagctgggatcacaggcaacagccaccacacctggctccatcacagggttgaagtaatcaccaggcactgagccaagagtgccaacctcacaatctccttatgatgccaccatgactaccacaaggcacagaggacgtcagaaacttgccccaaaccacccaactggcgagaagcagggacaggcctcatacttgggtctttctggcttcagcacgctttccttccacacacgtgtactggcacccactaaatgctgagctctgctcaacgctcggaagaagcaggccctgccttatcatgcgcacactctaggggaaaacaagtaacagcgagtaaacaaaggaacagacgacatcagg

SEQ ID NO: 43077 - DNA, 2300 bp, Homo sapien
atcacctgatgtctggagatccataccagcctggccaacatggagaaaccccatctctactaaaagtacaaaattagccgggcgtggtggcacatgcctgtaatcccagctactcgggaggctgaggcagaagaatcacttgaacccgggaggtggaggttgcggtgagccgagattgcgccattgcactccagcttgggcgacaagagcataacttcgtctcaaaaaaaaaaaaaaaattagctgggcatggtggcgtgcacctgtagttccagctacccaggaggctgaggcaggagaatcgcttgaacccgggaggtggagattgtggtgagccgatatcacgccactgcactccagcctgggcagcagagcaagactccgtctcaaaacaaacaaaaaaaaagaaaacccttttcggtggacttgctgacaatctcagtgccatatctggttcccatctctctgtcctcgtccttctcagcctctcagcagcatctgatgtggtttattctccccctggattctctgatgccactcacatccgcttctcctcccactgcactgactgctccccctcagcctcctctgctgcttcgcccctggagagcccccagcacctgctatctggtcttaacccttcactccctatattggtactctctctttggatgaactaacccaggttcatgtttcaacactaattatgtgctgacgatttccaaattacatctccagcactgacccttccctaagcttaggaatcttatatcctgctgctgattagacgtctctccttggtgactgacggcccattcaaactcagcaagtgtgaaaaggagctcatggctccacccccatacttcaccctgctccccgcagacatttattgagatgataaatggccacacccaattgctcagaccaaaatcctaggagcctcacttccctgttactccatcaacctctgcctgttacacacgcacatcaaatctacccactcccggccgggcacggtggctcacacctgtaatcccagcgctttgggaggccgaggcggatggatcactggaggtcaggagttcaagacagcctggccaacgtggcgaaaccccaggtctactaaaaatacaaaaattggcagagagtggtggcgtgcacctataatcccagctactcaggaggctgaggcaggagaatcgcttgaacccaggaggcagaagtaagggaggagaccacccctcatattgtcttatgcccaatttctgcttccaaataaagaagtaaaaactaaaaggcagaaataaaatccacaggcagacagcccggcgccgcgccctgggcctggttaaagatcaatccttgacctaaccggttatgttatctatagatttcagacattgtatggaaaagcattgtgaaaatccctgtcctgttctgttgcgttctgattaccggtgcatgcagcccccagtcacgtaccccctgcttgctcaatcgatcacgaccctctcacacagacccccttagggttgtaagcccttaaaagggacaggaattgctcactcagagagctcggtttttggagacgtgagtctgccgatgctccccactaaataaagccctttccttctacaattcggtgtctgaggggttcttgtctgcggctcgtcctgctacagagtgaactggcaggaactcctcccggtgcctgggcctcagtttccccactgtacgtggaagatgagccgctgtgaggctgagcaaggagcagcccaaggcgggaaaggctcgagagtccaggacgcaggcgagcgacctagcccggctctcactagccccaccgcccagtgcccccagctcagctgccctaccgggtgctacacacacagcggccccccagttcccttccggcgttcgcatctctcatccccatcccggatcttggggaggtcctcggcttgccccagtcaaactcgaggtcgatgaccccggatgccgctggctaaggcggcggcccaagtcccgtgcgggtgaaccgcccaggctgcgcggaaccagaggcagggatccggtttccagccggttgtggagagacgagcgcttccggggactggagcgtgcgtgctgaggtatgcgcaacgcgtgcggggtctcttccggagtcttttcctggacggggtccctgcggtgggtgtgtttcggcctggcctgggcaggcgcttgtgctgccagggcgccgggcccggggaggccggggtctcgggtggccgccggcccaggcgctggacggcagcagg

SEQ ID NO: 43078 - DNA, 2300 bp, Homo sapien
agctaattttttttttttttttgagacgaagttatgctcttgtcgcccaagctggagtgcaatggcgcaatctcggctcaccgcaacctccacctcccgggttcaagtgattcttctgcctcagcctcccgagtagctgggattacaggcatgtgccaccacgcccggctaattttgtacttttagtagagatggggtttctccatgttggccaggctggtatggatctccagacatcaggtgatcctctcgcctcagcctcccaaagtgttgggattacaggcgtgagccaccgcacctagcctaatttttgtatttttgaaaagagacggggtttcactatgctggccaggctgatctcgaactcctgacctcatgatccgcgtgcctcgtgatccacctgcctcggcctcccaaagtgctgggattaaaggcgtgagccaccacacctggcccaggttttctttttaaaaaaggaaaaaaactttgttccagcagtttgtaaaccagggcaatgcagccttctgtacaaaggtgcattccagggaacaaagagaacaaagaaagaggtcgtcttttgtagagaacttcctgcccaggttcccactttggtccacttatgcaaatgaggaaggcacacttgcttagttctgattggttaatacttgctgagttcagattggtcgatgcaggtcacagtcgatgggttgattctggcggcataaacaggaacagatagctgtgaaaccatcccagagttaagtgagagtgggggctttccaggaacgcagaatgtgtgtgtgaccctagtcagcaaatggctgctaggtcctactttgaatttaggcccagttagtaacttgggatccatcaagaaggattggctctttcagggttcacaaagttattggtgaccttttaaagatcaatttcaatggtatgtgggaattgaaggcaaggaagtggagatagccactgaaaataatgtttctaagttcttaaagacagccagaaacagggctatggcaggaggacagtgtgggtcaagggaaggttgttgattgtaatcaagagacaccagagtgtctgggcttggtggctcatgcctgtgatcccagcactttgggaggccgaggcagtcagctcacctgaggtcaggagtttgagaccagcttggccaacatggcgaaaccccacctctactaaaaatacaaaaactagccaggcgtgatggcgggtgcctgtaatcccagccacaagggaggctgaggcaggagaatcacttgaacctgggtggcggaggttgcagtgagccgagatcgtgccactgcactccagcctgggtgacacagcaagactctgtctcaaaaaacaaacaaaaaccaaaaagagacaggagagtcattcatgctgatggagtgagccaggtaccaggatctcgatatctaagcatgcccccttctccaacagcctccttaccttcctgcatgaaagcacacccttccctccagtcccccattcctttattctgctgtatttttctccataacacttaccacctttgaacatactacatatacaacatgtgtctgtctagcaactttgctgtctggctctcttccctagaatttaagctgtgagaggccgaggctgctgtctgcctggcttggggctgctttcctggtgtctagcacagagcctggcctgtttcaggggctcagtgaaacatttgttggctgaaggaatgaatgaatggctctagcagaggggcagaaactaacgatgcaggaggagagagctgggaagggatccagagccagggcctggcaggaagtgtaggtgtgtcctccctgatcgcagaggaggagagaggctgcactttgaggggtggaaagacaaggtgaatccccctgctggtcatcagcttgtgcggctctgtgggtgtaaaagagtggtttggagcatgtgaagtgagtcttccaggagatgaaggggattgccaggccgtttgtgatgatgctgagatctggtgccgtgcagcctgcttctgcgactctcctcatcaggcgcaggcacagagtaggtggagagttgagccagaaccacgatgtctttggcacagcctctcatctgtcagatgggagcggggaccccggagagggagtcagccgaggtcctggcattccttgtgaacccccgtctgtgggtttctggtccagtgtcccttctccagattagatggcttaggcctcctctaagggggtgggcgtgcacatccggagagctgtctggtgtgcagg

SEQ ID NO: 43079 - DNA, 2300 bp, Homo sapien
ccacgctggtctcaaactcctgacctcaggtgatccacccgccttggcctcccaaagtgctgggattacaggcatgagccactgagcctatttcttttgaggatattcctaaaagagagacttgagaaaactggccctaataacatctttatgatagacacaatcagagattttcatattgtgatttttttttcttttttttttttttgagatggagtctcgctctgtcacccaggctggagtccagtggcgcagtcttggctcactgcaacctctgcctcctgggttcaagtgattctccgtctcagcctcctgagtagctgggattacaggtgcgcaccaccacgctcagctaatttttgtatttttagtagagacggggtttcaccatgttggtcaggctcgtctcgaactcctgaccttgtgatccgccgcccaaagtgctgtgattacaggcgtgagccactgtgcctggcccatattgcaattcttataatgcctctcggtcaacaataacagctaccatttgtcaagtgtctactgtgtgccaggcacttgttatcttcccttttaaaaatctttataaatgattctgcaaggtagatgccattatctttttttctaaatctaagattcagagggttaagtcagttgtctgaggtcacacagctggtaagtggcagagccgggattgaaacccatgcgggccttatgtgctagaggtgtccagtgagcctgggctgcagtccttgctgagcctgtcccttggggctctgggtctctgctttgtccacgcaggtctgatggagctgcgtttcctgtgcatggactctgccctcagggtgcctgtccaggaagagctgtgtggcctggcaagcaagcctgggagccggcgggaggtctgccaggctgtcccgtgccctgctcggtgagtgaggggagcaagactgtgtgctggccttctccctgtaagtgggagacccgagccttggctccatgcccggtgacctgcggaggggggcaggtgctgctggctgtgcactgtgtgaggctggaccatggccgccccatccccctgcctcactccaagtgcaggccagagccccggcccagcccctttgaggactgcaacccagagccctgccctgccaggtgggccccttcccaaggagacagggggtgctaggtctgcatcctggctctttcctcacctccaagccagaccttttgaccctcagtgtcctcaccagtgggagcaggtcattttgtgcccccagaagactgggggagtttaatgaaaggattagatgcatgtaaagtacatgctaaatgcaatgagtgtaaaatgcatgctcgatgcaacgcgtgtaaagtacattgcacaggatctgggatgctgtgggtgcacatggttgctggtgcgtttcttcatcgcctgctctttatggagcacctaggccccggggccgtcctggagctaggggacacagcagagaacaaggcagacaaatgtccctgacctcctggagcaaatgcagggggaaagggggacagataataataggacaggcggggaatgcagtttgatggatggtgttcagtgcgatgcagccaaacacagcgggaggggaggaggggagggctggcggggtgggctccagggcggtggtgctgggatcactgttgaagacagacatgcagggcccttgggtgcccggacccctgcccccactgtctctgggatacgacatctgtcgtttgccctcacctttctcttctgtaaaatgggtttgtccaaatgttctgtccactctgccaagcctcttggtgaggacacaagggggcctccagaaagagaacctctccgggcccttcccagcttcctgtctcttcctagtctggggaaatgaaggggagacctggctcccctgggttcccaggccctggggctgtttggggtccctgactccagtttgctccaggtggcagtacaagctggcggcctgcagcgtgagctgtgggagaggggtcgtgcggaggatcctgtattgtgcccgggcccatggggaggacgatggtgaggagatcctgttggacacccagtgccaggggctgcctcgcccggaaccccaggaggcctgcagcctggagccctgcccacctaggtgagtcagccggtgatgggaggggcagctcctggtgtgtgcagatgccaggccaggcgctgtggtgtgtgcctgtaatcgcagctacttggaaagctgaatcaggagaaccacttgagtccaggagtgcaagtc

SEQ ID NO: 43080 - DNA, 2300 bp, Homo sapien
accggtctgtctgggttcctatgtccctatgtcccacctgcagaatgtgacatgcagctctttgggccctggggtgaaatcgtgagcccctcgctgagtccagccacgagtaatgcagggggctgccggctcttcattaatgtggctccgcacgcacggattgccatccatgccctggccaccaacatgggcgctgggaccgagggagccaatgccagctacatcttggtgaggcccagcatggggacttgtgctgtgattctggacagctttccctagggcgtgcagggctaggggacccccttcagtttatttcagactaaaaccctcaaaatcattagtgaaagaatgggagaagatagcttcctccacatattcaccaagaaatgttttttgagctacctacaagagtgaaatagtggctcacaactgtaatcccagcactttgggaggcccaggagggcagatcactcaaggtcaggagttcgagaccagcctggccaacatgatgaaaccttgtctctactaaaaatagaaaaagtagccaggcatggtggcgtgtgcctgtaatcccagctacttgggaggctgaggcacaagaatcacttgaacccgggaggtggaggttgcactaagcccagatcgcaccactgcactccagcctgggcaacagagtgagactctgtctcaaaaaaaaaaaaaaaaaaaaagcgaaatggtaaagaatggtaaagacctttctgatgtagactgacagctaacccaagactgaagcataattttacagtctgatataacttggacagaatagcaccctgcaccctccccgaggtttcaagtgtcctgggagaactgtgttctgcagggtatcagcttccccagaggaggcagcctggccccgctctggcaccctgactgtgtgtccttggggaagtgatgtaacgtccctggacctcggttttctgggtagagtaatggcgtattcctagtagggctttgtaagcattaaatgtgatccggaatctgtgagcccttgcacacgaaggcttccgtgagtgctaattattacttgtggccggtccttctgggctgccccttttctctcagatccgggacacccacagcttgaggaccacagcgttccatgggcagcaggtgctctactgggagtcagagagcagccaggctgagatggagttcagcgagggcttcctgaaggctcaggccagcctgcggggccagtactggaccctccaatcatgggtaccggagatgcaggaccctcagtcctggaagggaaaggaaggaacctgagggtcattgaacatttgttccgtgtctggccagccctggagggttgacccctggtctcagtgctttccaattcgaactttttccaatcttaggtatctactttagagtcttctccaatgtccaaaaggctagggggttggaggtggggactctggaaaagcagcccccatttcctcgggtaccaataaataaaacatgcaggctgaccggcgtttttttcttataagctgtccagacctggcttgaaaacccatcccatggcaaggcagggattcgctggccgcggttggctctatcttgatctgagcaagccgctggacgtccctagttatcttcttcctatccaggaagaaaatccaatcaggattccactccgaggatggcgcattagccagctccctgcgaagccccacccgtgtgtcctggtgtgaggctctgaccgctaaggtgtctgcgcgcctccaggccccgccccctatgctaataagcgcccgcctcctttgggagcaagtcgccgcaaactgcgagcccccgccccctacgctaatgacgcccgcccccctcgggcacacctctccgatgcctgcgagccccgccccgtatgctaacgagctccccacccccagctcctcgccgcagcctgcgggtcccgccccctacaataatgagcacctacctcccctcaaacgcccctagtcgcggcatgagggtcccgctcactatgttaatgagcacccgcctcccttcgggcgcgcctcgccgcagcctgaaagccccgccccctatgctaatatgctccctctcccacaaggcagcgcgccggctcggacgcggccggctaccgagccctttgtgagggctgtgagctgcgcctgacggtggcaccatgagcagctcaggtggggcgcccggggcgtccgccagctctgcgccgcccgcgcaggaagagggcatgacgtggtggtaccgctggctgtgtcgcctgt

SEQ ID NO: 43081 - DNA, 2300 bp, Homo sapien
aatgcaaaaactacccaggtgtggtggcgggcgcctgtaatcccagctactcgggaggctgaggcaggagaatcgcttgaacccagtggtcggaggttgcagtgagccgagatcgcactactgcactccagcctgggcaacagagagagactctgtctcaaaaaaagataaaagaaagaaagaaaaggtggaaatgttttatatcttgattgggggtgtttggggttatacaattgtcaaaactcatcaacctatatttaaaatggattcattttactgtatataaattatagcttaacaaagttgatttttcttgtattttattttttcaagaaggctctccctctgtcacccaggctggagtgctgtggtgtgatcacagctcaccgcagcctcaaactcctgggctcaagcaatcttcccacctctgccttccgagtagctggggccacaggcacttgccatcacacctggacaacttttttagctttttgtagagacagggtcactttgttgcccaggctggtgtcagactcctggcatcaagcaattctcctaccttggcctcctaaatgctgggattacaggcacacaccactgcacctggcctaaagttgattttaaaagaaaaaaaatacattttaaaaaaagagaaggccgggtgcggtgactcacgcctgtaatcccagcactttgtgaggctgaagcggaaggatcacaaggtcaggagttcaagaccaagctggccaacatggtgaaaccccgtctccactaaaaatacaaaaattagccgggcgtggtggcacatgcctgtaatcccagctacttgggaggctgaggcaggagaatcgcttgaactcgggaggtggaagttgcagtaagctgagatcgtgccactgcactccagcctggccaacagagcgagactccgtctcaaaaaaaaaaaaaaaaatacacatatagatatgtaaaaatacatacacatatatatgtatatacgtatatatatggccacgaggactgtgcagcctgatcaccataccagggtgtgcctgagtccaaagcctatgatcttgatggcaagaaaacggtgacgtaaaggggctgcacagtttaatgggggccccaatagcaaatatgcaaaataggcacatgaggaaaagactggaagaggctaaaacgccatcaaggtcaggctgacgggagatggatgtgattttattgttctattatggttgtatttcaatcataataaaagggaattctaacttttaaaaatgctttaccatgttaatagctaaaatgggaaatgacccaaatactcagcaacaaaggctccgtttaaaagcgtgtgtggcacgtccatccaacagagcagggcgtgattccgtcctcttcccgaaaaggcccaaagggagaggtggaactgctgtgggattttttgaggacggtcttcccgggaattttccatttctgcttttcttatttttcaatgttatcttactacctgggttacgtgtcacgagctcaggttatttctaccaccagagcctggggtggaggatacagacctcgcccactggagctgcccacagcgcctcgccggcccctcctgcctccttcgtcccgcacatccgctgctgccctgacacaccccgattccctggtgccagggagagccagggcagaggtggccctgagacgccacgcgacggggagggctagagcgtaaggaggagcgaggtgcgcattcgctgtgaccctggcgctcggcttcgcctctctgggcctcggtttccaccccgcgggagcgagtacgacaggggctgcgcgcattgccgcagtcacgcctgcaagagccgggccgggtgagccgcttccggcgctccgcgggggccccggacgatccagcaggggctccgccctgggacccccatcctgtcttggggcgtgaccttcgggggcgcacgcggtgccggccgcgcccggggaagccgggtccgcatccgagcatcaggacagcctgcggccgccccattggccggcgtgtctctgcagggccgtcccacagccaatagcggccaaggggcggagcctggccggtgccctcggagctgctggccccgggcggctgctccagtctgagcgccctccgctcgccccgagagagacccggccatgcaggagccgctgctgggagccgagggcccggactacgacaccttccccgagaagccgcccccgtcgccaggggacagggcgcgggtcgggtgagagtcgctaggttgggggctgcgggt

SEQ ID NO: 43082 - DNA, 2300 bp, Homo sapien
tggcagggagcactcccagaggggaatcggagtcctgtgtgtgtgctgggaggacggagagcaggccagcccagacccacacctctcagtgaaccaaaggctgctcctgacccctttgcaggccctgcgtccctgttggtcccagcctcttgtctgccccagcttgcctctctacgtggaaacttgcccctcttgggcaccacatccctgggcttgcagggaaaggagaagctgagtcagggctcgcaaggccctgggctccaggaacagcagtggaggccatcggggagggtcccgctgctggtcctggtggggaggctgagcacgtcctgctgctctgggctctcctgggacccaggtgcaccccatcctggaccaatgacaggcaccccatcctagccccagacatctcacaggcacactcgagagacaatgtgagaaagttggccaggctgagaaagtccacttggactcaggcggggtccaagccttggcctcagcttccttctctgtctgggcgtggcagtgttacctgatgtggcattgtcaggatggaggatgacagcagagtagacactggccccgggctaccctttgggctcagagcaaagcacgtgcagcccttcctttctccaccaccatcccaggcccttctcccatatggactcatttcagcctcacaagagtccagcatggggagtgccttatcaccgccactttacaggtgaggaagctgaggcacagagaagcttctgccctcgcccaaagtcacccagctggagagagacggagtcaggatttgaacccaaagagtccggttccaggcactcacgcgtgaggctgctgttgctgtgctattggaagagctgctgcttcctatgctgagcctccacgctaagcctctgagacggggcccttctgagtgtcgggatccaaggtcctgggtttcctgcttcacctggctgtgacaccagtggctgcccgcccctggtcactgtgggtggcatggaagaaagagctcactggcttggtgatgtcctcctgcccccagcagatatccctgacacggggcatctctggaggtcatggccgtgtgcgagcagagcccgaggggctgctgggggctggggttcttccggtccgccagctttcagatgatgcttccaggagtcctggtgcccagaaggggcctcagggctgctggggagaagaggggaagcaggagcccccacctctgcttttgtctcagttgtctcttgagtgtgcctgtgagatgtctggggctaaaaaaggaccttgaccttgtgcaacagaccaggaaactcggcctgtcagggacaagtggcctgaagtgacctggccagccagtggtcgtgcatggacctgggaccagccagggaaggcgggggaggctcttcccgtatatccagccccaggggggtctcagggacagctggcttctatcctgggccaggaaggaagctcggggacagggacggctcttggggttgctgaggccccctcgctctttccctggggctgccttctgagtcctggtcctcttccggggctgccagccacctcccagctggccacatggtcccttggtggccccgtcccagtcaggtgtgagaactctggctgggtctgcccaggaggctcctaggatgttctgggtcctgggctggcaacagagaagaaccgcaggatgccagggaaggtggtattggtgggccactcttgaggctgtggccggccagccctatcggctaggtgaaccacactacacacatacatttgccaggcctgctaggcctctgggtgacagagaggggacccacctcgacagctcgggccacgtccttaaactcccgagcctgctgtggccactttgctgtgaggacaggccctgctcccactgcggcagcctaacatcctccccagggaacctccaaagtggtcagccacggcccaccagcccctctgcctcaagcctgcttctctatccccgccgtgttttccctggaaccccaccctcccgggcatcccccacacatattcctgctgtcctatttctaagctcctcagatatctggaaaacactggcggagaaaatccccttcttttttttctctctctttttttctttttgagacggaatctcactctttcacccagactggagggcagcggcgagatctcggctcactgcaacctccacctcccaggttcaagcaattctcctgcctcagccttccgagtagctgggattacaggtgcccgccaccacgcccagctaa

SEQ ID NO: 43083 - DNA, 2300 bp, Homo sapien
cctcaagtctgcaggctctggggtaaggggtgggggtggtgtggaagtgtggctggccaggggagctggggcctggagggtcacacacctgcaggaggtcacagagccaggggatggctggccccacagacccgtctcccaggtggccagcctgcagcctgtgccgtcctgctgagccaagagaagacactgggggtgtttgtgttggtcggctgtggggtccctcccaagggaaaccgttagtcaccctggcgctggctggatgtgaggccacaaacgccaggagagctcggggactgtgccaaggggtgcgaggcctggcggtcaccagaagagagaggaaggggatggcagaggcacccagagcgagtgtaatccggtcatgtgagagggactgggtgtgtgtgtgcctgtgtgtgtgtgtgtgtgtgtgtgtgtgtgtgtgctgggtgacaggtgccaccatgtctgtgattcagcacagcgaccccagggggcagtgtgggcctgggttagggttagggttagtcctggttccacaccgcaggtggccctgtgactaggagcagccaccttgcatcccagttgccccagcaggagaatgagatgaataagacttgcctgcccgagggtcccggggagagaaacttaaacaacccggcagaggagagaacccgacactcaggagcgctggcatcccagccttgcctactggagaggtgacttggtccccgaacctcagttcttccacctgtgaaatgcagatcataaaggtggatctggcctcacagctctgggcccgtaggacaagctggacagagggcagacggtattatcgctttcactactattactggtggctttccttcccagcctttctggtgggtggtcagacacagggcagaactttctcatgaaggcagctgaaggaactcacaagtttcttccagcagggaggacagagggaaggagaagtgtcttcccggcactgctgtgggcccaggacatctgctgcatggaggcaggggcatggatgaaaagacacagatgacctgatggaatggtgccccagcttcctcctcctcccctttttggaggtgcctctgtttgccgaggatgggctctggggaagctggtgtgcagaggctaggtgcccagccttgctttaggaaagcctcacaaagtctggggcccgccgggagtttcccaggggggctctgctgctccacccactctcgctcccctctgtgccctgactcagcaggaacagaggcttgagctccaggcctggcctgccaggggctgccaagttggtgctggacatctgcagaatccctgagcctctctgccctggccctggctgctctagccatctggtcagcaggccacgggcacatctgtctcctccctggagcccttggttcattctcgctgggtctccctgcgtccctccacctgcttaggcccctgcatctcgggagctttctgaggctcgtgacctggggcacggtcgtcccggaagttcagcctttccctccgtacaacggagccatcagacgggacacctcatacatcccagaccccattctcaggagccccagggacagggcccgctctggaggcagaagccggacaggcggggctggggctttgccaccgccagcctccccggtaacctcaggccagcggctgctccgtctggacacccgacatgtggcccccagttctggacccgggaagaaggcctccctgctcgccgctcctgggccgccgccgccggcagcagccaacaggcagctgggccggcctggccgggctccagaggcgcagagcgggttaaagtgtgcgccaggccggccggcgcgggcgggggagcggcctggtgggaagtgtgagtgttcctccccgtctgcctgacagctataaaggcggccgccggcgcagagccgccactgggctgcgcccctcccgggaaccccctctcttggatgctctttgaagtgggagagggaggcggcgcgggggaggaggggaaggggagagggaggccgggccgcagcctctgcactcacgccgcccccgcacgcacagcgcacctggcgccgtctgccctccgcagcgctcgcccctttctctgggaggacaacctgctgacccgaagccaggtaggccacctcgtccccgtccccctcacgttgcagcgtccaccaggccagcccactgctcagagtggggctgggggtaggagcaccccgcgccctctggagccgttacataacgtggggaggcttgtggggagg

SEQ ID NO: 43084 - DNA, 2300 bp, Homo sapien
tggtcagaggtcaatggatgctgccgttctgagggtggctgccaccacctgatgcagggtgcggcttccaccatacccaggagcagctggccttggaagtgagccatgtgacctgccttccgggcagacccctagcggagctgagcatggtggtggggtgtcagcagggtgtctgctttgccaagtcctttgcggacctgccctgagttcctccactcttcctggccaggggactccaagcgtgtgggcgttgtcagtaagtgtcaagcctgtgggcgttgtcactaagtgtctgcaaacatctgtgattcctcccagacacatcgctggctggagaggggacgtcgctcgagacgtctgcagggtgaggcagcctcgctggcaaggggcctgatgggcagccctgcgtggaagatgtccccagggaggacacagcactgtctcccaacacccagagaatggcagggagggggctggactgggtctgtgcagcgtggcccaaggtgcagtggggcaaaggacaacaggaaatcagaaagacaggttttggctttggaagaaggaaactctgctttacaggaggttgttcagaaatggaaatgagccaccctgagagacagagagagagagagagaaagggggagagagagagagagagagagagagggagagagagagagagagagggagagagagagagagagagagggagagagagagagaaggggagagagagagagggagagagagagagagagagggagagagagagagagagagggagagagagagggagagagagagagagagggagagagagagagaagggagagagagagagagagagaaagggggagagagacagagagagagaaagggggagagagacagagagaaagggagagagagagagagggagagagagagagagagaaaaagggggagagagagagagagagagagaaagggggagagagacagagagaaagggagagagagagagagggagagagagagagagggagagagagagagggagagggagagagagggagagagagagagaaagagggagagagagagggagagagagagaaagagggagagagagagggagagagagggagagagagagaaagagagagggagagagagaaagagagagaaagagagagggagagagagagggagagagagggagagagagggagagagagagggagagagagagggagagagagagggagagagagagggagagagagagggagagagagggagagagggagagagagagagggagagagagagggagacagagagggagagagagagggagagggagagagagagagacagagagggagagagggagagggagagagagagggagagggagagagaaggagagagagagggggagagagagggagagagagagagagagggagagagagagagagggagagagggagagagggagagagagagggagagggagagagagagggagagggagagagagagaaggagagagagagagggtgagagagagagagagaaagggagggcaggagggagggagagttccctgtcactgtgggaggtgctgaatggcactgggcagaaataacagagtcagggtccaccctttgcataggttgtgtccgtgcggatgtcccatggatggtcattggcccaccctccatcctgtgcctcgcaagaacccaggcacagggcagttctatcagtggggcagatcagcctgccctgagctttggccgcggtggggaagcttgtttttagatttttcttcgaagacactcttttggagccatagcaacagaggagcgtgagtttggcctcggctcaggtcataggtggaagtttctgctgcccttcggcgctccagggcaccgtggtgaggacagtggatcctgcggcccccaggcttcatcctcccctttcttttgtttcaaggaggggctccgtggctcagggggtttgaaaagcaccgttttcgagatgggtgtcatgaagagggtgcccagaaaaaacgtcctggcatttgattctcacaggctctctggaaggttcccatttcgggaaggagcatgctgaggcctggagtctggtcacggtcacgtcaccccagggaggcactgagctgggacttggattccagtctctcttgaccaaggcctgccgcgtttccactccgtgacgaggagcgaatgaataaccaggcacttggcgatggtctgcaagtccccagccccgcacctccctgggccccagag

SEQ ID NO: 43085 - DNA, 2300 bp, Homo sapien
cattcatgtcataggctgacagcaacatttaggtccttaaatacccatgacagcaggtctggaggctgcttcagctctgagctctacgctgtagaaaggaatgactgtgtctttgcacgaacgtgaaatttggagaaagtgccagccttcccctggccctcgcaggcagtgctctctgccccacagtggccaggccatcctgcaaagccaagctcaggccatgagcccctccccactgattgcacccagaggggcaccgttcgcccccacccacagcccaggcaggtgaggtccaagtgcataatcacctgtgcaatagagtgtggcattggtgtgaaattgtctcccaggccaggggaaagacactcttgggagttctctggtgagccttgggaagggtctcagcctccgaaggcctggctttcccatcaggacatgccacctccgtcgcctgagagcacctcaccttcatgcctcagattagttccaaaacctcctcacctgtgccttgtaagcaggtgtctgctgcatcccggacattcactctcgggactggggagcggccacagcgagccggtgatacgaagagcctccggggtgggcaggcactggtgttcccagcacgggataacaaaagccagcagaggcagaggtgagggtcacgggctccacagcacacccagctcaggggtgagccctcccagcagcctggtggccacccaggtggctccagctagacaacaggctaaacgagcaccagctggggcccgcgttgtgggaaggggggcacctctctcccctctggggtattgaggccccaggcacccctcctgctcctccggggtcagagctctggggtcatatcctgctccgccctcctgaatgcgcagctggcgtcctcagagaagcgctttccaacccagcgcctcctccccatctacagacacaggaagttggatgacaaggacaattgatccctccagcttccttcaacccagcggttctgtggagcgagaggcagtgaagagcccctgatgctaccagcccttggacggctcaacacacctccaggcctcgctcctctcccggatacgccaaagaccaacagctgctgggagctctaaggagggacggcaggtgcggtctcgtgctcagcagtgttatgcacacatgtttatttttaacaggaatcaaagacattttctttatccaactcaaaactggctttcctctagcatttgacagaaatgattcagctgattccaaaatactgataactaagtcctagggagggacaggagacacaagtcaggccgcaccagggcttcccctgccctgcctccatcctggccagccttgggtggctgggtgtgcgatcatccctgtctcagacacaggagagtcagcctcggagaggcgagacaatgcgcctgagctcacagggtgggccagtgcctggggcaagcaccccaaagagggtgccctgagctggagggggctgcacaccttgtcagccaaggtcagaaaaattccactggagtcaagaggaagggacgctcaaatgaaaaatgcaaccgcagagaaaatctgcggagactggggccgggcgggagggagcgaatccaatcggatggccccgtggctgcgcccttccttgcattaatggattttaaaagggagcaatccgaccccagggtaaggaagcaacagtcagctctcctcctgccctcaccctcctcagaggtgacacctgcttgccaggtgctctcttggccacatgcctccctgtggtgccccgcggggggctttcctccctgctcccacccctgctgcctctgctccagtgtctgggtgcacgttgccctccagaggtggcggtgggggtggggatgggaatgggggtgggagtggggttgggggtggggtaggccggggaggtgcagggtgtcacggccacggtgtcaggaaataagccccattcctgctgctcagcgcctggcttccctccaaggcgcatcgacggctgaccttgtttagaaccaatttcagctttttaataagccctttgctttcctgaatctctctgatgccatcagcctttgcaggctgtaattccccatcgcctctgccacatgaggctggcttctgctgacgtcctaacctcaggcagtgacaaccccaagtggagcgacggtggtgcagactggagctgggtgagtgaacaggccaggccactccccagtgacaacggggcctggccacaggacagcactgtccctcgcctgtggctcaggctctta

SEQ ID NO: 43086 - DNA, 2300 bp, Homo sapien
atggggaggaggcgctgggttggaaagcgcttctctgaggacgccagctgcgcattcaggagggcggagcaggatatgaccccagagctctgaccccggaggagcaggaggggtgcctggggcctcaataccccagaggggagagaggtgccccccttcccacaacgcgggccccagctggtgctcgtttagcctgttgtctagctggagccacctgggtggccaccaggctgctgggagggctcacccctgagctgggtgtgctgtggagcccgtgaccctcacctctgcctctgctggcttttgttatcccgtgctgggaacaccagtgcctgcccaccccggaggctcttcgtatcaccggctcgctgtggccgctccccagtcccgagagtgaatgtccgggatgcagcagacacctgcttacaaggcacaggtgaggaggttttggaactaatctgaggcatgaaggtgaggtgctctcaggcgacggaggtggcatgtcctgatgggaaagccaggccttcggaggctgagacccttcccaaggctcaccagagaactcccaagagtgtctttcccctggcctgggagacaatttcacaccaatgccacactctattgcacaggtgattatgcacttggacctcacctgcctgggctgtgggtgggggcgaacggtgcccctctgggtgcaatcagtggggaggggctcatggcctgagcttggctttgcaggatggcctggccactgtggggcagagagcactgcctgcgagggccaggggaaggctggcactttctccaaatttcacgttcgtgcaaagacacagtcattcctttctacagcgtagagctcagagctgaagcagcctccagacctgctgtcatgggtatttaaggacctaaatgttgctgtcagcctatgacatgaatgtgcccctaaggctagattctgggtttctccagagagacgagaaacaggagggaaaaggaaggaagggagggaggaggctggggaggagggacagcttctagtccagctggagagatctgtcaacccagcctggggggtggagctggagggatcaagcagaatgtcctgaaggcagctgccctcagtctacttgtgggagaggacaggagggagaggtgccgtggtgagactgaccctcgggcccacgggtggatgatggcaaaggtcctgtggcaggtgtgggagaagcagggctgcggccagctgccctgagaggcttcaaattcaggccagatctgctctgggcaagaggaagctgtgggtttgggagcttcagagacaggggagcaggcctgtcactcaccctcttttccttaaaggctgtcacccccagcagtgcaccctgcagcctgcctatcccctgtgcagctccagctccgtctgtccccagcaatgcaccccacgcccatgtcccccactccctatgatgctctcgcgccttctggagcagcagtggtaccagctggaggctgtggaaaaattgagaggagacaaaagtgggaagagcaggccgtggagagagtgtctaaacacagggactatttggagattgtcttatttttggtttgaaatgggcccacctgctagtattgtacaaacggctctgctcgctaggccaggcctgcagtggctacgggcctatccttcactggtcagcctggagcagctcctcggacctcagtctgctcatccgtgggtagaggcgacgcagaccccatcccactggggactgggccagacagcctgtgaggcagtcagctggtgcctggccagagggtgtctgaaaggcctcttggctgcagggtgcatctgcttttgggacagctcttcagagccatctcagaagggacagcatccgcctgtctacttcaactcccactgatgacgtccatgtgtcattagtgccaattagaggagggcagcaggctgagtgcttggcctggggcgcaagcttgtgggagggaaaattggattccccgctagacaaatgtgattacccgtgctgcctggacccaccccattcaggaccagggcataaatggccaggtgggaccagagagctcaccccagccatgcccgccctcagtcgctgggccagcctgcccggccccagcatgcgggaggcagccttcatgtacagcacagcagtggccatcttcctggtcatcctggtggccgcactgcagggctcggctccccgtgagagccccctcccctatcacatccccctggacccggaggggtccctggagctctcatggaa

SEQ ID NO: 43087 - DNA, 2300 bp, Homo sapien
atgaggctgggcagcgttttgctgaagtggctgaacacaagtgcatctgttactgtctccagaaaccatcaaagagctgaacttgtccctgagaggcagctcagagggcaggaaggggagacccacccaggccagctgaggcagcttcaggacgctcagggggaagcacttggtaccacgcctggcacagggaggaggctcaggagcaagcttctctctcctggagcgacggcccggagtgcaaacatacccacctccagtgggtgccagcccaagtgtgagctttattggctcattagcccgcacggcatcagcctggttttacagatgagaaaagtgagggtcaggaatgtgaaatggcccgcccaaggcacactccctaagtggcagaaccacgcggaaagcacagccctgactccaccccggtctgttcagcgctggccccaccggcagagaagcaagctggtgctaataattccaccccacgtggaaccggcgcccagaagccccgctggatctttgccgcctcgtcttttggtgatagttgttgtcagggcttccctttaggtgggcgaaaatatctgtttactcaggaatggagcaatttcccaggcgagtctctaactagctaaatgcctggtcctgcctccgtcgcagggaagccgcccactgtgaaacacgagccactcagcagggaaatgtttaagcggcacccgcacccgctgcacaccgggagcagcggggcgggggcgggggcgttcccggtgattccacaccccggcccagcatggtgcctgtcccagaagccaggccacacccagtgaggcggaacagggctggcggagggctggaccctggaccactgtgcaggctgtccctgcactgagtcagccgggtttaaatggacgaggtcgtggtccactcggtccagggtaggtcaacagggcacccacaccctctcagccatgcaggggaccctgggggaagaaggctggattggaccgtggtctcaggcaggggcgtggtctggccccttcatcctgggcgtgcagggctgttccatggggatcgtcgcagagtagagtgcacagtgccggtgtgagcccacagggacagcatggaggagggggaggagtaggtcccccctcagcctttgcccccaccaatgctgacaacggtggggccagcagggcttcggccctggctggtggggcactgtggggtgggctcttccagtgtggagatgaccttgggcaggggctgcaggttccattcaccctgcaaggaagggggcaggaggtaaactgaggctggaggggcaagatgggtggctgcttccccagccacttcccagccacctcttggattcttgccctcaaactcagcttgtctcaaactgaactcactctgctcccccaagttgctttttgggggtcctcacctcagtaaatgccccctcccctggcttcccattcacctagtcaggaacctgggagtcatccaggcctctccccgcctctgtccccacccaatttaatcattcaccctagtgtagcaaccagagcccctggctgcaggctctgatattttttagctatctcttcccctcaaggctacaccaaatgccaagttttcaaccccatcagacgtccaccccacactattctcagcaagccagtattagcccttccttcccttggtgctgaggatgtttgacttagcagttaatctggctcccaaatgcttctgggaaggatcttcctggatctccaggctgcggcaccttacgcgactaactctgcataggccctggcctcctgaccacagcccagtgggcccaggataaattagatgccttcgaataccagtgggtctcagataaggaggaaaaaaccagctcgcagcttcagactggttcgtttcttaccttcccctcccctggtgctttatttttaggcaggttagtgcgccctgctcacaccacctgcatttggcattcggtacagtgtggaggtgtcaccagagagggtgcctgccctcccttccttgcctcgttattggttctctctctctccctctctctctctctctctctcctctctctctcctctctccctctccctctctccctctccctctctcctctctctcctctctctcctctctctcctctctctcctctctcctctctctctgctggctggctggctgtctaggcctatgtgtcaccacctggcacttgctctcattgtcttgtgcgagtgcttttgccagcagtttggagtgcagacccatcaccc

SEQ ID NO: 43088 - DNA, 2300 bp, Homo sapien
tccaaatagagtcacgtcagggtcagggctttgacatacgaatttatgtggggatgtgattccgtccatagcagatggtaattctacagatgggggttctcagggccaaggcagatcagggcaggtggtaattctacagatgatggttatcggggccagggcagatggggcaggtgctattctgtagctgggggttctcaggatgagggcagataggggaaggtgataattctacagatggggttctcagggtgagggcagatggggcaggcggtaagtctatagatgggattcctggggcaagagcagatcagggcaggtggtaattctatagatgggggttctcagggtgagggcagatggggcaggtggtaattaattctatagatgggggttctcagggtgagggcagatggggcaggtggtaattaattctatagatgggggttctcagggtgagggcagatggggcaggtggtaattctatagatgggggttctcagggtgagggcagatggggcaggtggtaattctatagatgggggttctcagggtgagggcagatggggcaggtggtaattctacacataggggttctcagggtgaggcagtgagggtagctgcaaacactgggctggaggcctggttccaagagtcagggcctccttgctctccgcacccttgggtgtaaagtggcggatgtggctctctgccctgcgcaggggtatcaggccatgcgtgacagatgcctgttccccactcctgctcaggaactccttggacaaggctgcgtgttccaggagcggcatggctgggagcgaccgggatggtttcatccccgaggcccagctccggtgagtagtgcctgctgggctgtgctgctgggaggccctgccctgacaacccccttgcccctccacgtgccccgtccttgcccctccgtgtgccccgcctccccaggtggttccactgtcgtgatcagttattctgcacacgggaagccgagccctgccgacctgcccccaaggctcagtgcattctttgtgccgttcacgcaattcccactcctcgtcctccccactacccgtccgctgtggccaggccttccatggcctaagtgggaagggctgtaggcagagcagaaggggtgtcctgcggtggggagacagcaagaagactcccccaggttgcaggaggaatggagcgtctcctaattctgtgcatctatttttggccactccgactgttggtttatgtccgtaggagggcaggcactgggcaggttgatgcacccagggtgctcagtttcccagtggaggtttcacagtggcctggactctgggcgtcctctggggactcccagggacctgggtcctcagtgagaggaacaaaggcagtcctgctgtgaaacctgggacccagaccctcgggagcaggggacgcgaggccttaaggccagctgaggggtagcatttgatccagatttacagaaatcgaaatccccttcccggggctgcgtctcaccagtcccctctggtgcacccaccttccatccccatggcaacccacagcccaggccaggctccagagctccagggcatcgggaggggagatgagagccagagctggctaacggggccacggctctggggtcagagccttgcaggtcatcgtctcttctcctgctggcccctagggacatgccgtcctcatgaaccctgcggggaggaggggtctgggcagaccctgtcttgaagtgcaacccactgtgttccagtcagatctggccctggaagcccctctcccctgtccctgggcgaggagaggagagtcaggaacacaccccaggtcccaagatgggcggattttgcacccccacccgggagccagcctgggtgtccaggacaccttggcagggctgcagtgggtgggatgtccctgctggggaggggggtactccatgcagagatgccagcaaagcctgactcccttacaacctcacactggctcccacttgtgtgtgaagaggaggtgaggcttgggcggacggggctggcagccctgggaggttaagaattgcccacacctgcattcacagctgtgccgtgtcggcagttaggagggcaggtggcggggtggggggttgtctgcaggagcagcggccagggaggggcatggggctgtggggctgtggggtgtctgatgggggcagatcccagggaggccaaggcagtggcagaaaagctggactctggagcccacgcacctgcctggcttcgtgccactgccaggtccaggac

SEQ ID NO: 43089 - DNA, 2300 bp, Homo sapien
ctcaggggctccccacctgtgcccttggctcccagccccagagcagcccatggcacactcccgccaaagtcccagtgatggaaggaagacagctgaccgagggaggcccaggcctgcccccaacttgccaggggtcgcctcagggcctctgccagcccatgagcaaacatcctgtctgctgagtgcgggactaggccccaggtcaggagctgggcaggctgggcagctccattttgcagccgaggatacagaggcacagagaggccacacagaaccctggttggtgggttccagagctggaatccccaagggaggccagggcatgaagactgtccctcctggggagggagctgggtccctacctggctctggttcaaaagccgggtgacttcaggcaagtcacctccattttgctgtttgcagcaggaggggcctgaattggcccttccttgaagtcctttacagttttatcatttccgggacattcctcgcttgggagagtgcaggggcgcaggcccagacgggctctgagtcagccagaggaggcttcactgtgtcgggtgccatggaggggtggcagctggggggcctcagtgtcactgtctccgtggggtcagacattcttctccacagtgggcgtaatgtcctcatcaggccaggaaaggactaggtcagcagaggcgaggggcgcaccgagctgagccaggccttctccctccggagcccacccacctactgcctccccagggaggctgtccaccagcagcagcagccgggagcagagtgggctggagagacccggaggccgggctccctccaagccgtcctgcctcgacagccaccccacaacgcacggggagtggcccgggccacaggccctgctgtgtgggtcggagaggccaccgccatgaggacgagacacaggaggagcctccccccttgccggggagcgcctgcaccactgtcctgtgctctgcaagagatggccctgactggcagaaggccatcgggataggctgccgtcaccggctctggccaccagcaccccagtccatgcctcggctggggatgacttagcgtttccatgtgcagaccccatgctgggtgcctcaccagtacaaatgccctccctgctcccagaacctccacagcccctccccatcaccctgcattagagacgaggaagtggcttgcactgggtctcattcctggccgctttgtcagtgtacgattgaacgggacagccggggctgcctggctgcaagccgcggcatacacactcagcacagttttcccagctcagccccgctccctcctgcccccaggcctcagtctccccatctgtgaggtggggtgatgccatcccactgatgactccagagctgtccaggggctcaggcaggaccctgggacaagagatcttcaaagctgtaaaggggcgtggacctgccccccagccaccccctcagcactgcccaccttctgctggtggccttcctccctcactgctgccccttccaggaagccacctggatttcaggcaaggctcctttctcagtagccctcgctgtttaccccacgccacctgtcctgagtggcgggccctgcccttaggtcccaatgggcacttacctgatgtcatagccatgcatgtccttctccgggcgcccatggatgatccagtgggccagctcctgcccacagccaccacccagcatcattcctggcaggaagagaagcgcagggctgcggtctgccccccagggtcccccacccatgtccaaacatgtgcccccatctccacggacagcacagacactccaagctctgctctcacacctggggtgctgcacgcctcctgattggactgctgctggactggaccctggcacaggtgcactctctgggaagcagaaggggctggactccccagcctctcctgtccccaccactgtcgggggccacggtgctcctgcgcccgcctcccccagagctctgggaatgacaggacctccctcttgggggccaggagggctgctgcccggactcacctgcgctgttgaagccacagcccaggaagaaccctcggagctcaggtgcctcccccatcaggggcttgtggtcgggcgtgaaggattctgaaagaaggagagagaggcctggagtcccttttgcagtgcacatactcttggggtgaggtcttccaagagagcagtgatcaggcagggtctgcaggggcccctccacccaaccccctccctcctctaggccctgctcagcgccacttcctcatgggggcc

SEQ ID NO: 43090 - DNA, 2300 bp, Homo sapien
ttctccttgccaggcacggccaatggcctttggcctccaggaaagagcagggaagtcccaggcccccgtgacttagggagcgcctgggagggcaggcagagctctcattccaggatggtggagctcaccaaggtcagggtgggagccgcaggcctggcccctggccatgttgcctggaggtcccatgtgtcctcgggttactcaacccgcatgagtcatttgtgaaacatccaagagacccttgttccctgcagctgcccctccgctagctcttgatagcgctccccgcagattccctgtgaggttgttcagagcttctttcctgccctccctgggcctagaaatagttccagccctcccaaggtgctccctgggccatccccaaacccagcccaggttacctccccaatccccccttttttaaaggtcttgctgtgttgcccaggctgcagagcagtggtgcgattttggctccctgcagcctctacctcctgggctcaagccatcctcccttctccgcctcctgagtagctggaactacaggctcgctccaccacatccggctaattttttgatttttttgtagagatgccgtctcgctatgttgctcaggctggtcctgagctcctgggctccagacatccgcctgccttggcctcccaaagtactgggattacaggcgtgagccactgcacccggcctcagctcactctttctgccccatcgtcaccttctctggagccttccttgtctctcacccagatggctgctccggcctctgccctctgccctgataacccaggccctccacgtagggccctgcccctctagcctgcctcctccaccctcccctgcagtggccctgccaccttctgcccctcaaggagccctgcctctcctggccaggctcttagcccaggctccccgtggctctctgccccctcagctcctagcgtgggggccctgattgctctccagggagcgggacggcacttgctcctgatctgcatgcagaggatgaccccccagacttggagccatccccgtatcatcgttcacgaacgaagtgccctggggtccctcagaccagggccggccgcttcctcatctagagtctaacatggtgtggtgctggggtgccaacagtagcagctggcacctcagtgacgcgtggccctcagttcatcgtattttctttacgagaccgtctgttttttgcttatttaagtatttgctccctccctccgtcagctcctcgagggctgggacatgtcctgctcagcgctgcctcccagggccaagcccaggacatgaacgtctgtaggctggcgagcgcacagctctgtggaggttctgctatcccagttttatagactaggacgctaagccttgctcagagaggcgaagtgactcgcccaatgccacacagctaggaaggggtgaagcaggttttgaatccaggactgtggccacagagagccagggttcccctcccaccgtgtcctggcctctgtctgaggctcagctgtggccgccggagtgggacattggtctcctcccccgcagaagttgggagcctttgttggctcaacagacatttatcaagcacctgcacttgctgggctctgaccctgtgctgggcggggggaagtggagtgagaaaactggtctctgccctctcaaggtccagtgggcaggagtgacaagtctctggcagggacacagcaggacgctggtgcactgggggagccgcagcatggtctccagggtcagagaagggctccttgtcggcaggacaacggccacaagacagcgggaccccaccaggcagaacccagccaggtcgccgtcagctggttctggcagcacacgtggaggggctcagagagcacgggcaggagccagcggggaggcccccatgaggaagtggcgctgagcagggcctagaggagggagggggttgggtggaggggcccctgcagaccctgcctgatcactgctctcttggaagacctcaccccaagagtatgtgcactgcaaaagggactccaggcctctctctccttctttcagaatccttcacgcccgaccacaagcccctgatgggggaggcacctgagctccgagggttcttcctgggctgtggcttcaacagcgcaggtgagtccgggcagcagccctcctggcccccaagagggaggtcctgtcattcccagagctctgggggaggcgggcgcaggagcaccgtggcccccgacagtggtggggacaggagaggctggggagtccagccccttctg

SEQ ID NO: 43091 - DNA, 2300 bp, Homo sapien
tctgaagattcaagaggaggcaggaggggcacactggcttgccttgctcagtctccctctcctccagccccagctaagtctcacccctcctccatccactctgcgtcctccagggttggttggaatctcccatcctctactgctgcctctgcctgttctctcatctttgtcggttatatgttttgcttccctcccttcctcccttgctctcttcctcgatccattccttcttccttcttccccttttgctgttattttatgggatttggggaaggagaggcttgaatggcagtgacccattcactgtgtgtaacttgaggccccgtgtccactctgtcctcggggtcctacaacgagaaggaccatctcgagcccgtgaccctgggtggaggtgctggcccaccacggggcatggggaaccaagtccccacccagttctggatgatgccaaggcctctctctctgccttccagaacatgcccaatgtccgtgatcatgatgcctctgtctacctccgcctccaaggggatgccttgtctgtgggtggctatgaggccaaccccatcttttgggaggaggtaagatgccagggccctgggataatgggagggagttggggctgcatctcagcatggagagggcctctttcaggaagtccatcctcctgaagctcctcagaggcacacctgagaagtggccggtcccctgaccccaccaagctcaaagccatcttgctcttaccctgacggtcctggcaggcagtcaaatacagacccagggcagctggagggctttgcctcaaaacatccacagagaaggtctgcgcagtgtggagtgatgacctcagaagggcatgagagcacacaagtcctacgtccttcagcaaatgacactgccctcccaaccagctgctgcagcggcatttcccctggcctgggctgtttcccgggcagcttctggggttagggcagccctgcagccctgttctatgtgtatatgcatttagtccacacatggaacgactgagtggctactttgggctaaaaactgctttaatttctggagaaagagggaaactaagataaaagtccctgactctgggtgcctatattttggtggagagacatacaataaacaaacaaatggctgggcacggtggctcacacctgtaatcccagcactttgggaggctgaggtgggcggaccacctgaggtcaggaatttgaggccagcctggccaacatggtgaaatcccaactctactaaaaatacaaaaattagccaggtgtggtggcgggcacctgtaatcccagctacttgggaggctgaggcaggagaatcacttgaacccgggagatggaggtggcagtgagccgagatcgcaccactttactccagcctgggtgacagagtgagactgttacaaacaaacaaacaaacaaatgaacaaggaatgaaattctggaagatgatcgcgcactgaataaaattagcaggttaaggatcagcctagagagactggagcagaaggatatcctttagatgggtggtcagggcagggtttttcagggaggggacatccaagcagagccctgcaccgcgacaacaaaccagcgtgccaggtctgggtgaagaactgccccattgaggggtgaaggccttgagctcacacaagcttgctcttcccaaagagctgcaggaaggtcagggtggcgggcccagtggtagaggtaggcaggctggcacatgccatacagggctttggggccatcgtgagctgcagggggccagaggaggcttgtgagtagggaaggggcatggtgggatctaggggagtgggtggaggcctgggctggggtggggagggggagcagacagaccttgctgatgggttggtgggtgggggagacaaacggctgggacgtgtgggtgaccaccagccctctaatgcatctgattcagcagaggctggcctggcagccatcacaaggcaggtttggcatggggatgcatggccttcttggggacaacggagatgttcccctgccctgccttggcaggtgtcagacaagtttgccttcggcctctttgacctggactgggaggtgttcacccagcacattgaaggcgccatcaacagggtccccgtgctggagaagacaggaatcaagtccacggtctgcggccctggtgagtgacagcctcggagctggggtgggcgtccatgggtcctttggtctgatgactgttagtagtgatgccccgtgagaccagcctgtgtcacacaggggacccagggc

SEQ ID NO: 43092 - DNA, 2300 bp, Homo sapien
agcaaaccaaattcaacagcacattaaaaagatcatgcaccgtgatcaagtagattttatccctggtggggtgacttctttgaggtggcagcccctctgttggtgtgatctagagcaggactgaaggaaatttactcagggaaatttacaaggcttctgtgaaactgacatggcagggcttccagcctcctgttccaagatgggaaaactaagtctcagcaaagggagaggtgataagaccagcccgagatcgtacaggaccctgtcttggcctccttgtccggagcctggcctctccagagctgtgactactagtccctggggggagacagcctttccacctctcccagaccggagctgggtgctaacaggccctgccggatgaaaatcctacgatactaacagacagctaacaggccgggaccggcccccagccaccaccccttgtccaaagtgcaggttcattgtgctgccctcttggcttgtaacagttttgcaacagttgcaacttgtctttgagtgcagggacaggagaagtgtgggctacccggccactgccctggagctgtggtgactgctgcgtttttctcccatgcacttgcacgtccaggactcctgggagaacttgggccacactccttccttgccctcttgagctcattcgtcaccctgttgggtgagcacagccctagctcaggccactgggcaagccacaccatccaaagaggaggtcctctgccccaggacccccacaccaccccaggtaagcctcaaactggcggggccagctttccactgggcagccaggggcctaagccagtgggccctttgcctttgaggcagggactgagaatggtgtcagcacgtggtcaggcccagagcccaggccccctcctctaagaggtcctcctggattccctgctggaaggaagccagccttgtggtgtcgtgtctctccctggatctgtctgcttcgtggaccctgagcccctcgagggcaggggctgggtcttagatgtcactataggtttcccagcagtgctttgtacacattgggcattcagtaaatgtagaggatagacaagctggcaacaagacagtcggacatcctcggtgtgaataagaacacaatgatttgattggtattaattacagcagtttactatacgatcgcttccggtattggcagctggcatcattacaatattaacagactgccattgaaatgccccgtctttgatccagcgcgaggaggagatgtgactttccatcagcacctgttctgattctttgggcatccagaggtgtattctttctgggtttcctccacacccctcctctgggtgtctacttctgtctgggaaggggtaacttgccccagcccagagtcaggctgcagcatccggtctgcctcctccaccagcttgctgtgtggccccctccctgggcactgctgtccccaacagtcaatggaggctggaatccctgccctgggggctacgtgctgtgcagtagccagtggcttgggggcatctccccaaacaccagaggggtctgggagctcgggaaagcaggacgcagacagaccaggagaccctgtccctgggaagctgacccaggccttctcactcgcctctgaaggcagtgagcatcctgtccctgggggtgagcaaactggggcatgtgctgagatgacctcaccaaaggagcctccctgcagtggacgggcccctggcccaagctgctgctgaccccacctttcctgcccaccctgcctgtgcatagctccttctgggcgcggggagctcgggcggctccagcaggcaggtggtgcctgggtctactgcagcaaccctgaggcgcctgtttcagagacgaggaaatgagggttggagcggaagggtgactgccaggtcgcctacgggtaatggggcatggggttcacaaccctgctctgccgccctcagagggagctgcccacagggctggcctagaagccccaactaagctggcctagaagccgcagtggtgggcggtacgctccgcccagatcctgggcggagacatggggctggcagcgagggtggggggcgggggaggcctggagttccggccaggccactgcttgggaagcaagaaggtgaaggcacctctgctgggccaagcactcttagggccgaggggcactgcagctgacaagaggtacttggaggtacacccccagggagggacgaggctggggcctcccctatgtgggcggggctgggcctggtcagatctggctgggatctccctctgcc

SEQ ID NO: 43093 - DNA, 2300 bp, Homo sapien
atgattttgaagcactcctggcacctgcctggcataggctcagccgccgggatccaccatgtttccatggattccaccgcggattccatccaccatgtttctttcactcacaaacagtgttaggccatggagtggagagggtgctccggggaatgaggatctgcattccggccctcaggagcccgagcccacaacggccccaggccacaactgccaggtgggggtcacttcagcagctcattcctgggaatgcctgtgcccagatggcttcaggcctggagcaatttccacctgcctctgtgcatcggtgtcaggcagatgggggcagccacctgcttctcaggaaggaccacccttaccctgggagggcatctcttctactttgacagaggatagaaaacattctgtcttcatgaaatcacggggatattcagtggtagttttctttttcaggttcttattgaaaaaataaaatcttggcagtgtaaattcagcccttgaaaattgttctggaaatttccctggcccatgaatcacctgggtctggcacctgttggctgtgttctccctcagttttcccatctccacgatgggtagcagttgttgctgtctcatttgagatgacacgtgtgaagcctttagcacgctgcctgactcccaggaggccctcagaggtgactggggcactgccttcctcctggtcagtggtgatgttggctcttatagtttgggttgggatgctgttgctcatgtcctctttcacagggctgcacgcagagctcggtggaggagcctcctcccccaacgcctccgcttcttcctccctggacttctgccccgtcagagggcagcctgcaggcacctctctctgtcctggaagcctggccagcaagtcggggccaagggctggtgggggcctgcagagagggccagcctgagccagaggaagagtcttggggttggctcaggtatgtccaggccatgagggcagaggaacaagtctaccacagtccccactggagcggtggcggggaggctggggagggcagtgaacctggaggcagcccctcactcctgaatgtagagtcaactgtgactttgatttgcaccacagttttcttcagagtgcactaaacatagagtcatactcattttacgagaccagcattaccctgataccaaagccagataacattacaagaaagaaaattatagaccgatatccttgatgaacatagatgcaacaatcctctcaaaatattagcaaaccagctgggcgcggtggctcacacctgtaatcctaacgctttgggaggacgaggtggggggatcacttaaggtcaggagttcgaaaccagcttggccattcatggtcaaaccccgtctctactaaaaatacaaaaaattagctgggcacggtggtgcgtgcctgtaatcccagctacttgggaggctgagggaggagaatcgcttgaaccgggaaggcggaggttgcagtgagccgagatcgtgccaccgcactccagcatgggcgacagagcaagactccgtctaaaaaaaaaaaaaattagcaaaccaaattcaacagcacattaaaaagatcatgcaccgtgatcaagtagattttatccctggtggggtgacttctttgaggtggcagcccctctgttggtgtgatctagagcaggactgaaggaaatttactcagggaaatttacaaggcttctgtgaaactgacatggcagggcttccagcctcctgttccaagatgggaaaactaagtctcagcaaagggagaggtgataagaccagcccgagatcgtacaggaccctgtcttggcctccttgtccggagcctggcctctccagagctgtgactactagtccctggggggagacagcctttccacctctcccagaccggagctgggtgctaacaggccctgccggatgaaaatcctacgatactaacagacagctaacaggccgggaccggcccccagccaccaccccttgtccaaagtgcaggttcattgtgctgccctcttggcttgtaacagttttgcaacagttgcaacttgtctttgagtgcagggacaggagaagtgtgggctacccggccactgccctggagctgtggtgactgctgcgtttttctcccatgcacttgcacgtccaggactcctgggagaacttgggccacactccttccttgccctcttgagctcattcgtcaccctgttgggtgagcacagccctagctcaggccactgggcaagccacaccatccaaagaggagg

SEQ ID NO: 43094 - DNA, 2300 bp, Homo sapien
gtgaggatgagggagattgcagagggtgtctggaacagggcctggggtgtggacataggtgtggtgctagtctgcctgagcccgaccaggtaggggctgcagcgaggccagccccacaccctcagggtggggccactcacccgtccgttggtctcgcccttccaccagccctggtctccgccgatgcggctgtagatcctcaccacgtcaccctcccgcagcgaaagctccctcatatctcgggcggcaaagttatacctggccacagctgtgccgatgacgcggggcgtgaacactgttgagggagatgggcagcatcacacagctgcaggaggagcccaaccagtgatccaggaggcccttgggccaagctgggtctctcccctggtgcccagaaccctgctctgtacccagagaggaaggatgtcaagcagaaaggctctggagggacacactggcctccaatcccagggccccttgccctctgggtctggggacacagcacatccaagtccctgcaatgaggatgttcttagggacaagagcaggtgcccaggctttgaccatcatcattccagtggtcccccaaatccaaccagaaacccagtggaaccagcttggcccagatgcagaatcctgatagacaggtgacaatgaccatggctgagggcgaaacacacacagctgctgggaagggactttgactctggcagccgaaagccatgaggtcaaggctgactgaaaacccctcctccctgcacccaagtcccacagctcctcctcgtggccacctgctttctgctaccagaggcaaagctcttgatgaacaaggaggaatgacagtggacggggctgggaaagtggccatcagggtgggcgtgtccacagggggtgggtggtgacaatggcagggccaagcctgacgtgtcctcaggtgctcgcagcagcctctgcccggcctccccagcccctttctcccctccacccagtgccagactgcggacaactgtggccacgtcaggcagggctgtggggccagtgggcagctccgtgctgggtctcccaaggcagctgccacaggcccggtccccccacgccctggggagcagcggtacctgaccagaagggagcggaggggccctgagaagcaaagctgaggccctgaggactgagaaaagaaaagttgtaggaagcacaggaagctgcaaagaggcgagagagaacgtgaggcgggcagcagggcatccacgcacagtcacggtgggcacagctacaggccggggggcatggggtggggcaggccctttggcaggagaggccctacaggggggcaaaggaggcagggggcagcacgggttgtcaagccccacccaggcacaggtgccactcggccacacctgagctaccctggaaccactctatgcacccgtgtactcgagagcaaattgggaccacctcctctcatgccctcgcctggcacatagcaggtgctcactaaggccagctgttcctctcctgtccagctcggcctgtgtgagacccatggccctgcaggaccctgcaggctggaggacgtggggtgactctggagagagtcctgagcgggaagccgcatgctcggggcctgcccctgcccctgattccgtgtggccttccctgttctgagctgtggagtccaacctgcaaacaggctgcctctcacagaggaggcccaggggctgggcacagggagggatctgggaacaggtgggcctgcccttttctctcccacctgtgacagctccatgcgcaggggtctctgcctggacctggcccctccaacccccactggtctctgggtgaagaagccaagacacagagtagcaattctgagcaggtgcagagtccccgcctgtcacatggcccaggagatgccacatgacagcatctgcgatggctgggggaggggcgggggctgtgttccccagggtgggactcctggtctgggtctgtgagggcaggatctgagccctgggaagtgggccagggcagacccctccgaggagtgctggtgtgccggctgggccggggcgttacctggggaccggctggaggccctggaggccgaacgttcccgggacttgtaggggtacttgagtgtggtgtccagctgcttgaagctctccttcagtgagtggcactggtagtactccaccaactcctgcagggcgtacacactcactgacagctgctgccacctccaggaagtcctcccccagtgacctggcctccctctcccacctcttggttcatgtggggga

SEQ ID NO: 43095 - DNA, 2300 bp, Homo sapien
aggctttcctctcccgtcccaccctgcggtgcttggaggagggctgtgggtaggtctggctgtggcttgtccgagactctacatgtagctggctggggcctgtggctgctggggtggggccagggctgcaggggtggggcctgtggctgctggggcggggccaggactgcagaggtgggcctgtggctgccagcgggtggggccagggctacagggacggggccgaagctgctgtggggcaggaccatggctatagggctattgctggctggctgtctggttcagtcctgcttcagctgaggcttctgcccatggcacttgagcagctaccgtgtgcagccctggtggggtggggggcgggggtcaggagcccttgttctgaaagtccagtccctggcctccagggctggcagtgtagccctcgtccagacccagcaagtgcagactggatgagctgttgagggtgaccctccctgccctcatgcccaaaacaagtaactggggcccatgaggcagtcctgccaccagcacccaacactctgggaagaaattcctttccccactgatcaccccacccccagcctgggcactggggggtgttccacctgccagggctcctggcgcctccacactgcggcacccaccacagggccgggcttagcctctcactgaccgtcttccccttcctctcctctccatgcttcctagtctcacgggaaaatggtaagcacctagcgcccaggtcctcccacctgcctcaatcatcccagcctggtgctggcacttctgcccggagccaggggacccaggggcctgaggggctgggctcagggttttcttggtccttcgtcctccactccctttcccgatgatgaaatgatttgtattcatgatgaaaggcttgcccgctaagacagtgtgaaaggaaaactccgtgatcctcagtccctggagctcggggtcagaggctggggtttcttggtctctcttcagctctccatcatcctttttgtttttctgtgttctctccctcctccctccctctttctccccttttcctctctctttccttgtttctttcctcctcccatccccgctccacgcttcccctctccatccctcccttcgttcctctttcccgccatcttttctaacccagtaggctcctatttgccaaactcttttttctggaccactttgaaagccctttgtccgagagctcggagagatggcgaggcctgtggggtggccgaaggggaggcagggaagggggcagttgtgggttgctcagtcggggatggcttcacggggggtgccccaggcccatggctgttccctgcctttttgttgttactgttctacttcagagaagtgaggtttttttagcatcacatttaggaagtgaaagtgggtggtcaggcctcgtggaggggccctgggtggggccctgcgctcatccttcctgggatcctgcccccgcttaacatgcatctacatatgcactcggtggagcatcctcgcacatgggcgcaggcaggagtgcagacctgcccaggcatgtgtgtgtgcacccacaggagagcacccacaggagagcacacacaggagagcacccacaggagagctcacacagcatgggtgcatgtgcatcatacgtgttagtacatgtgtgtacctgcagggacagatacaagtgtgtgtgtgcacatgctcacaggagcactgggcacactcatgcacaggtgcacacgcatagacacgcgtgcaggcacagatgcacacccatgcacgcaggagcacactagtatgcatgcagaggtgaaggcacaagcgcatatgtattctcacgtgagggtatgggcacacagctatacatgcatgcatacagaggcacgtgtgcacgtacagcatgggcaagagagcaggtacacacgtgagaacatgtgttcacacaggcacaggcacctgtgcacatatgcatatacacacgtgcacatgctgcacaggcgagagtacacgtggacatgtgccaggatgtctgaagccgtgtctattgcaagcatggcccctctcccccctgcagtggtcctacggcttctacctaattcaccttcaaggaaagcagggcttccagtttttctgcaaaacagaagatatgaagaggaagtggatggagcagtttgagatggccatgtgagttccagggcggcagcccccaggtccctggcagatgagttgtatggggggtggaagcccaggtggattgtgtctgtggttcctctcagaccaggggcggtggg

SEQ ID NO: 43096 - DNA, 2300 bp, Homo sapien
ttagggactctgctggactcccctgcttcccagctgctctgttctttaccctgcggcattgatcacaccctgctggttccttggagctccagaggtcaccctagcacagtgcttggtacgcagcagctgctcaaagtgtattgcacacctgagtgaggaagcaagagcccccagagggcctcgttacagaggagggcctggggcgcagagagctccggcactgctgcgagtctgcagctgagacggggtccagagccaggttcagcagcacaagcccggcccggtcccctctggaagactatgtcacaggatgcctgggatgggggcggatgatgcctggggaacggggggatcctgaggagacacctccctgcccctgccccaccatgctcctgctccatggagtcaaaggctggatttgttgatctctcgaatggggcgacccgaccctggggaaaaggtttctgcccctgcggaggagcctggcatatgtgcaaaggaggccaggctgcccgggccgagggcgcttccactccgagtgctcagctgctgtccctggcccctgcccccactgcccacagctttgcacacccattggaaacccactggctggatcgggaccccctggtgtgggtggcggggacgtggccactgcttgggggatccccctgcggttgtgacttcctgggaatcctcctcctgagacgggcggcaggtggggtcagcagggatggcctctcaaaggttaagctctgtcctgtgacagacatgcacagaggacttggcggtggtggaggtgggggcttgcatctgcaggaggggcagcaacgatgatggtgactgcagcggggcagccgtgggcagtgtgttgtctcccttactcttgcgggtgccgctgcccccatctcacagctgaggaaaccaagactctgcctcactcaccatgggccacctggctggggatggatggggagctgcgttggccagattctgaacaatcttagtgctcagttcggtcagatcctttcagaaacacacagcctcgatcgtgcttgggtcgcagttggctctgtagtgcgtgtggttcgtgtgaggccttccttgtgtggctcctacggccgcagaggtgccagcaacctgtccctggcctctgagcctcccctggctgccacatgtcagcagaggtgcctgccccgtggtacacccggagcatctgtgagacgcaggccggcggagagtgctgagctcagccctacgctgagactggcaaagagacttcgcctgctgagcctaagggcctgggtgggccccacaccctccttcaccgtcagacagcctaggggagaaatagtggggggtgtcggggggccaagtgctttcccaggcccttccaggcactcctgcgggagttcagagcaggagcaggtgtggagttgacgtcgcagaggagattcacgcaccttcctgtcctgtgttaacgcttgcacttaataaccgagttactaagtcatcgcttcagagataagggtagacactggaaagttattgccgtagtgttagagatacagttattagtccccttcccattaaaatggccattaattagggaggccagtgaagccactggaaacccatcagcccctccaggtgatggctactgtcacctgtccccattagcagactgggaacgtgcagtggatgaccaggccatgagaggggggttctggggtgaggctcagtcgggaggctgaggcctttccttctgggtgctttccctttaagagcttgcatcagaccatctagctgatgtgtgcaggtgaccactctgaccctcagtttcatcatttgacaaggggcatagtaacattgacctcattgggtggttgaggattcatggaggcagtggggtaacttttgagcccagagccgaacgtgtcacccagaacacaagcactggctcttccaagaaggttcctggcagtgtgatggtcccaccctgcttgtgggcagtggctgattttgggcttgtccgcctggccagtggattgctgtgtgtctggggtgtgggtcccagctttgtgggctgcatcttggcatcgttgtgcagagtgtggagtgtgccagttacctgctggggaagaaaggcgctggcaactgtttgagggcggagggagcctctcctcgtacagccagggcatcccgaggccagaggaaggtggcagaagggggtctagcaggccgggcgggggttctgtgggaaacagaaatggggtggtggtggctcagataaccacgtgcct

SEQ ID NO: 43097 - DNA, 2300 bp, Homo sapien
tccgtgaagctcagttcctgccgcttccgctcagcacaaaggcacggcccctgctggaggcccccgctccggggagctctcagacgggcagccagcacctcactgcccatctgctccttccctgcttactcgcagagtcaagacctggagcccacggggccaggaggcacaaagcacagcttcccaggtgacgctggacaagtcgctgaccctcctggagcctcagtttccccaacccagtggctctgaatgaattccctggattcctgagaaggagggagcttcctcactggttcacagggagagagggagggaagggggttctgacaattaaaaacaggtctgcaagtcaggaactcgatgatctccagaggtgccatgatcccctcgtctacccagcctcccctgggccctgcagcccctccctaccctgtgaccctcagcccaagcccctggggagggtctctggttctcagctgtggggttgggcccagcgggtctgggggcctggtggggaaagggtgtctagggtactctgtctttctacctttctgagttgtttcttcttttgctttgttttgtttcgttttgttttttttccaacgagtagacattacttttagaatttcttaaaaagttatctcagctttgggttgggttagggaggagggagtcctgggaatgtataaaaagcacgcagccagttagttcctgagaagtcagaaaatgcgaagatcaactgagaagctgtactttctggaaattccaggcgaaccagcaccaggcccctcggctggtgggcagagcaccagggggcgagggagcgggagggggattccctgctgccaggccaacagctgggccagccaaggtcaggaatgctgcagctgcagcctcgccttccgcccccacccaggcgggagcccagtgggagggaggctgcccctgccagggcctgggacagagccctctgtgggggacaggccaggcaggaaacccggccgtcctcaagcaggaaagctgggccagagctggtacttcagcagggagctgaactccagtcctgggcgcacctgtttgcagtcacaaaaagggcagactgcagcacccacccacctgcccagctccccacccagctccccacctgcccggggtacccaggactctctccaacgccaccagtgtctctctggttcctcactctgtgcaagcctaccctctggtgctctcccggttaggatgatcgtccctgctttaccaggtggggaaactgaggctcggcctggcagttacgggcctcccctgtaccagctgctgcaggtccggtctcatttcaccagggaaggatgtgtgcccaggacgctgctccctgggatgaaacgggtttgtttttttctcccagtatagaaataaccctgcctggatgagggcagggaagtagaataacatgaaaccgacaagaactcccatcctaaaacaccactaaccactgagggcgtttttctgtcgtctcttgactctgggtttttaggggttttttatgtgtgtgtggtgttttctacatatttgactactgggaataatatggcatattgcgtcctggtgccccttcgctgacagcacaggtgtcccagctccctgcctccccggctgcagggcagggcgaggaggggaggccagggacatgcgggcctggtaccttccagggcaagagggacgtcatccccgtgggcagagcaggaaatggaggaatgttgagttccctgcacccgctgtcaccgtcacagctggccccacctcagccgggacaccctgcctgggccactccaagtgactgtcacaacccgagagcctatggccaagatgagctccaccaagtaaaaatggtggagtgtggggaaaagcaagagagatcagagtgtcactgtatctgtgtagaaagaagtagacatggaagactccattttgttatgtactaagaaaaattcttctgccttgagattctgtgaccttacccccaaccccgtgctctctgaaacatgtgctgtgtcaaactcagggttaaatggattaagggcggtgcaggatgtgctttgttaaacagatgcttgaaggcagcatgctcgttaagagtcatcaccactccctaatctcaagtacccagggacacaaacactgcggaaggccgcagggacctctgcctaggaaagccaggtattgtccaaggtttctccccatgtgatagtctgaaatatggcctcgtgggaagggaaagacctgaccgtcccccagcccgacac

SEQ ID NO: 43098 - DNA, 2300 bp, Homo sapien
agtgggtagctcttcttcctctctgagccctttctgtcccagcacagtgggaagcctctgggtaatttatccgtccattcttcacaagcaagtccagtgggagccgggtctccccgctctagagaggaggggatgaggctttgcaggaggagggatcagtgtaggctctcagatggggctggagggccccgctcaggtttcactcctggctttctgatttcttagggagatgctgatgggtccacctgctgccccatcttgcttcggtgaggaaagctctcccccttgccctaaaggtgcccactgctgcttcctcggggaagggcaagagacctgagcccccgcctcaccagccacctggcctgagtttactgctgcaggggccagctccttcctgacctctctctacgggccagaccctaagctgggaccccctgcttccacctcagtggagaaggggtgagtctgactctgcagagaccaatttccaggacaggacccccatcggaggccctgggcccaggggaccctctctgcgctcgcatccccgttccggcccctgcgcagggaagccacggggtaaggggtccgggggctgcagtgcagccccagctcatacaggcccaggattccaccggagtccagggtgggagccctcagacaccgcaccccagcctccgggctgagccagtctcagagaagggcttggacttgcctggtgtcccccagtgaatcagcagtgaaaacccgcggttcccggcagctgagccaggatccatataatttcagttgcagaatctgtttgtccttgaagcccctcctaccgtcacacgttgccagctggacagaccgcgcccccaccacccagggtgtggcctagaagggagatcagggcggatcagcaccggggccggctgcgaccctgggccggagagcaccttcctgccctcactcatgtcacgcattccgccctggacgccaggaactgcccgctgggcagctgcgagtggccaggactttggccaaaagctggggaatcctggcctttatgcagggtcgggggtcttcctatgggcccccggccagggcggaggacaggaagagggctctgggagtcctgggcccgtgtgccttcagcctcagcctcgggtatcccgccggggcggcttgatgggccaagggggctcagtaagcttcggcccagcccggtgccctctcccgagtctgtcgttaccgaacggccatgcgagggcgcccagcgcgacagggaccacctcctgacctccacggaggaccaaaggcacccggggggacgcccggccatcactccacgggcgaggtcgctcccccagggagaagggctccccaaagtccgagcgcccttggagaaagtcggccggacctgggcctgcgccgcaacccccgcccaccgcaactttcgcgggcggtagcggggcaggaagtgggggggcgggggcggcgcttgggacacggggaggtgccaggcgagtgctccggccccgcccctgccccgcccggccgtggccgcgccccctgcgcccccagcgccccggagccgtggagccgccgagccgccgagtcgtcgagtcgcagcgccgggcgtggggactgcgggtggggcgaacaaagcggcggcgacgcgggcggcccaggcccgggacgcgcggagcgagcgaccccgccgggcctttgtctcgggcggggcaggagccgcggcggccgcggggcgccccgagcgcagaatgcggcgcccggcggcgcggattggggagcgctgcggcgactggctgcgtggagcccggcccggggcccgcaggcacttgcgtgtgtgaagcggggagatccggcgcgctgcccgttgcccgccccgcggccgcacgtgggcgggagcggcggcccgagaggagcccgaggagtaggaggaggaagaggaggggacgcacggcggcgcagcgggggacctggggcagcccgcgcgaagccccgccccggccctgagccccgcgcgcgcgcgggcgggatgccccgcggccgctgcactttggctcgagcactgccctgagccggtcgggcccgcgggcgccatggagcagtggcggcagtgcggccgctggctcatcgattgcaaggtcctgccgcccaaccaccgggtggtgtggccctcggccgtggtcttcgacctggcgcaggcgctgcgcgacggggtccttctgtgccagctgctgcacaacctctcccccggctccatcgacctcaaggacatcaacttccggccgcag

SEQ ID NO: 43099 - DNA, 2300 bp, Homo sapien
aaaacaaaacataagtaaatgtttcgaacagaaatataagtcctatttggttttgacaacgacaggaaaaggaagcttacaggtaactaaatattcaaattatttagttcaaggcatagaacaaattatattagcttagaggcaattttttttttttttttttgagatggggtctcactctgtcacccaagctggagtgcaatggtgcaatctcagctcactgcaacctccgcctcctgggttcaagagattctcctgcctcagcctcctgagtagctgggattacaggcgcctgccaccacactgggctaattttttatatttttggtagagacagggtttcatcatgttggctaggctggtctcgaactcctgacctcaagtgatgtgaccgcctaggcctcccaaagtgctgggattacaggcgtgaaaaccgcacccagccagatagaggtaaaagtgttaaatgggtctttgaatacaggcctgttcttgtgtctcttgaaagcagtataacttcggttgctgtcttttcccaggtcggaagactgggagatcatgtaagatttaaacgttttcaaatttgttgaaactgatttatggtccagcatgtgatcagttttgctaaacgtcctgtgtaggtacttgtgaagaaagtgcgaggcaggcggatcacaaggtcaggagttcgagaccagcctggccaatatggtgaaaccctgtctctactaaaaatacaaaaattagctgggcgtggttgccggcgcctgtagtcccagctactcaggaggctgaggcaggagaatcgcttgaacctggggggcggaggttgcagtgagctgagatcgtgccaccacactccaccctgggtgacagagtgagattccctttcaaaaaaaaaaaaaaaaagaatgtgcgttccacagctgtgggcttagtgctcacactaagcatcttccttggatgtctgttatgcttattttctttttttttagagatggggttttgctgtttcgtcccagctgaagtgcagtggcatgattatggctcactgcagcctcgaactcctggctcaagggatcctcctgcctcagcctcccaagtaggtgggactcagaggtgagccaccacaccaggttccattatgctagttttcttaattggcattggagaaaaccataaaattaggggaaaagggtagatactaaaagagtgctattggagtatgattggaggtggagtgagaaaaggaaatagaccttgctttcatggggctgttgaggagtccaaatgagcagtatagaggcctggcttggttggatgagatggagaaattcaagacctatttttgagatagtaagcccggacatttaattaattaaaaataattgtatcaattactgagagtaagaatactaataaaagcagtaacagcagtggcaaaagtaaccacacaagcagaaatacgaaaaccaagatgataagaccatacagtccggcagtgtcttactaacagggttgtgggcgtcccactccttctcttcatcctcctccagctcctcctccacgtcttcctccagctcctgctcctctttcttttccagtacctcctcagccccttctcctctgccagcccctcctcccacctccgctcccagcccctcctcctttcccagcccctcaccatccagcccctcctcctccatctcctcctcctctctcagctcctcctcctcccccagctcctcctcctgctcctccttctcctccactcctccttctgctcctccttctcgttcagctcctcctctcccagcccctcctcctcctccagcccctcctcctcatccagccctttctcctctcccagcccctcctctcccagctcctcctcctcctccctcctcctcctccagcccctcctcctccagcccctcctcctccagcccctcctcctcctcttccagttcctattcggggcgggcccagcccctcctcgcggagcgatcgatggcttgggctcgtcgcacacgcctgcccagcctctgcgctcggctcgccaggcctgcggcgctgccatggagacacggcccagcggccgccggccccgccctgggagccccgcagtgcgtcgcgccgctgcccgcatctccgaggcccgcgacgagcggtgactggggcgggcgacgtgggggacccggggatgcgggcagacgatagggggctggaggatggggcgacccagagcgcgcggggtctggggcgcggggatgggggccgcgggccacgcgacggggacc

SEQ ID NO: 43100 - DNA, 2300 bp, Homo sapien
cagccaagtcgaaagaggagctagctcaggaaaagaagaaggagctggaaaagcgtctgcaggatgtcagcgggcagctgagcagcagcaagaagcccgcccggaaaggtaccgctggcggccgctgtgccacccctctttaggggggtggggggtgtcagcagtaggggtttgagcatcgagcaggcccacgtctgagtgtggcttacctcctgatgagctccatgttcttagacgagctcttgagctcctgaaacctccatttcctggtctgtcactgggggtcataccccaaccctgcagggaggtgtgcacatgtcaagtgtgtgtgaacacagcccattccagggcaccacagacagaggaccccccaggagagggctcttgtggggctggactgggcagcccagccagtgagctgggctcaccgtgagctttctgactgttccctggcagtggcatcagttccatggcaggccgaggtagcagaggcgggaggcccagccccatgccctgcgctttgccaggtcctttgctcaggggagccagcatttgagcccttgcctcctttttctggaccctgttagagcacacatctcttttcctggcttccaggacacacatatgggggggacagtagggtcctatctggactggagcatgttctagctgggggccatggccttgcgacatggtttgcccagtgtcgagacagggcccatgaccctgcccgctgaaggggtctgtctcctgtagtcactctttggacgccccaggcagagtaagcgctccagaaacgccagcagctggtgttcctgtcgctgctggtggccatgtgactggtggatgtttttgatgggcagcctttctcgcatccatcatttcctgttagtagtctgcattcatttttttcctgtctcaagtatattcagatagtcttgttgacctgattaatttcaataaatacttattaaacgactgggtcaggaagtgggtgggtcgtggcacccagtgtgatggtgtcacgctggcatggacgacatgccgccaagcgggtcaagaagcgggtgtgcgagcgcatctccctgcccatgtctccacagagaagcccggctcagcaccctcagggggcccgtccaggctcagcagcagcagctcctccgagtctgggagcagcagctccagcgggtccagctctgacagcagtgactcagaatgaactggcttcggacagaacaggacagatggatgtcgcacacgccgagactctgccgtacccctctgtggttcatattactacttctgttccatggtgtgcaggtctgcttcttaattcagtgttatgatatcttccagtttttgctttcataggtcagagatctatcttgtgtgtgcgttagacttgatgagaaggtgtgaactctgcagaaagtctcttcttcatcactgaattcagtcacttggagatgacaacttcaaatgctaacccgatgaccccagaaaaccgtgtgagattcgtaccgaagaaccttgtggaatccctttgcttaggcccaacctggtcgatagctcgagaaagaattttttccaaggaaatgtctcggatatgggtactgtatttgaaagctgttagctttgtcaacacgcattgtccttgtcatttgggccccgagctctgaccctcgtgtctgacgcggccacctctttctggaggggctgaggacagatgtgcctgcttgtggagaccaggctgggcctaagcgaagggtcatcgcagccccagcccggagcgtggagcccttggggggtggtcgggtgggatgtgcgttctccgctcgtggtgatgtcaggagctcctcggagggaacagagcggctgtgtatgcagcctgcaggtttccatacactgaagcttttacctcaactttaaaaaaaaaaaaagaagaaaagatttaaaaaaaaaaaaaaaggagactttttttgtaaggttcggcaattttctacggaagtccagcccgctgtgagtccccgcctggctagcgctgcccctgctgctgctgccgcgccacccttgggaaccacttcccgagcttatgtgtatataaatagttatttattaacatcattggtcatttttaaaaaaaagaaaataagaaaaaaccgcagaagaaatgcattcacacagtcgcagagatgcaggccttgccagtggtgtgccgggcgcgggtcctgtctggcggcggcctgtcgtctccaggtgctaactcctgccaccgcgcggtgctcacccacgtctgttcg

SEQ ID NO: 43101 - DNA, 2300 bp, Homo sapien
gccaggtgaagcgctttgggcctgcccaagagctgctgcaaagcgcccaggcccactgcgttgcacagcgccccaatccttactgcaagcggcgtgccaggcccgcatcttcttaccttgttataaatgtaacaatttgtaaacatggtgttgaagtcctgcatacattcgcttgcactccaataataattattttctagtctcttcttaatagtccccatatccattgggtttttaattattttatgataatcctaggaaagagattttcagaggcattaccagaagattctacataattattttcacaattcccaagtggacacagcccgaccttcccaagtggactgaggactggggctggcccagaggcactttctggtctctgaaggcagtgggctatggtgacgtgagtacttggccagctccaaactcctgcccaacctctctccagaccccaagcatgtgcagagaggagcccacggagttagggcagaccccaggacaggtctacatactggagatggggccaaaccttccagggaccaaacctgcaggtgaccagggcccagcagagcccagagcccaggccaccaagtgccagcccagggattcctctgcaatgctcagggtttgtctatttgggcccaggtcaaaaatgagcatgcagatgagggcaccatcacctggaaagcaggcctcaacatacactcggcctctaactccaagtgggctcaccaagctggcagatgggccatcctgcaggagccagtgaggcagaagaaggccccagtgagcctcgactcctaagccccatcaccacccactcgctttcctcccggacacgcgtggcttctccctatttcctgcacctggggcagccgccctccactctcccacgcccatgtggcccctgtgcgcctctgtgctgtggacttcctgaggcacaggctgtccccagcttagcagcaaattcccaaggccagaggcagtctttccaggatgggggcagcaggagggggacagaggacggcagcagcagaacgtggctcttggggaggcagcagctacgcaccggcaggttcaatttgattgcgtccacgggctggtagaagggccaggcgaactggtgtttccagagcgtcttcaccaccacattctgcatgtactgcagctggttggtcttgcggccgggcttgctggggttggagacctccggggggggtgggttcacagggcccggggtcgccgggatccccgcgggggcgactgtcgtggcggtggacatcctccggcagctcactcactttctgtcacagcagcggcttggagaggccctggctgcttctacgctccctgagaaagcgcgacgtcccatttccgggcccaaccaggcgacagctgcagaggaggaagcacaacagagaggaaggccagtcaccccggggacccccacctctcccagcctcggcgggctcctgagggcacctgtcgggcctcagcagggcctgctccactcactcacccccattgcccagccacccaggtgagaggctgtcgggaaagctgctcaggcgaagcgcgaccagctcagaacgactctccaaccactgctctcaggcacgggagggaaggcctgggcggtggagggagctcaggcacatgccacttgctcccaggtgggggcttggggaacacactgggaggcaggtgtgccaagggactcagccactggcagccttctgcccaccaaccacccactcgtggggtcgactcgttgctactgggctctgacagcttggccacaacaatgtactgaagagtgacccatgcgtggacagccacggtgcgggcccaacacagccaggggaagtggggccggcacaacacggacgtttgcagacccaaacacggtgcggggaggtggtgcccttgagcgaggccaagcagtgaggttctaccgtaaccaggagaacgggcccaggtttgtgatggcggcgtggttgtgacccggcctggctctcggccaatcagagaggcgggagcggcggctcagaccctgccgacctccacaccccagctgaccacagggagctctgcacacacgagatgctggggcttccctggccccgactggctagccacaggcagggctggcaggaggaggccaccgccaccctgcgtgtcccaggagggcacggacagttgagaacgcccataggaacgctgcacagtggagaacgcatgcaggcctccaaccatggccagggccctgcggcgtggccccgtgtctacctgta

SEQ ID NO: 43102 - DNA, 2300 bp, Homo sapien
tggggtctgtgtaagtggtgaggtggccatcctggtggtcagagtgctcaagatacccaaggagatgagatgcagacagcaggaatgggttgcagcctccaaggtggctaacacagaagcctgtaggttgaggaactgcaccgggggtttggggacacaaccaggatggtagttctaagggaactgcctgcagatcctcacctctcatattccccctccccgaccttcctgcgcctgaggactgcactttgtccattttgccaactagaaaggcaaggctggaacctcgtcctagagccttgccctggagtgtgagaaggtcctgggctcccagcagaaacagagggacaggattgggaaaggtgttggcttcccctgcaaactcttcctaagaccccggggctttgggtctcagccgtcctgcaaattggctctgtgaccttgggcaggaccctttgcctcactgagcctgtttccttacctgtcagcctggaacagaacacctgccttctgggtgagcatggggatgaattgtctctgtgctggcactcactttgtgaatattgcatagatgtgtgcatttcaggcagtggagctgctgctcaacttggaacacacctggggaccccaggggcttggggtgggtgcagcccacacaaggaaactcgaccttgcagttggcaggttcagcaggcaccaaggaacctcgttttgtttttgacgtttttattggggtctaatgtacacaacgtgtaaccaccttaagttacagctggattaaaattgatttatgtggccgggtgcgttggctcacgcttgtaatcccagcactttgggagtccgcggtgggcggatcatctcacgtcaggagtttgagaacagcccagtcaacacggtgaaaccccatctctactaaaaaatacaaaaattagccgggcgtggtggcgggtgcctgtaatctcagctactcgggaggctgagccaggagaatggcttgaacccgggaggcggacgttgcagtgagccgagatcgagccactcactacactacagcactccagcctgggtgacaagagcgaaactaacgtctcaaaaaaaaaaaaaaaaaacaaaaaccaaaaaaacaacaaaacccccccccccacaacttgatttatgtgtaaacccgagtcgtcatcacccaaaacaagatgcaaaacgtgtccacgggctgaacctttcaagatacagaaaaagggccaggggtggccctctcccggaatctcaggctgggaacctggtatctagttcccgcccctcactgggcagatggggaaaccggggcttggggcgagaaggtccccaggcagagctgggagcacccctaactcttcgccagctctggggacttggcgccctctccagcaacagcgaacttgggcgcccgcgccccagcaagtcgggtgggggagatggtgacacggagggcgcggcagagcgcggctcctccccgggcggggccgacctgcccgcgcgcaccgacgccccgccccccgccccgcgcgcgcgctcccgccaggctaattaggcgcgcggtttgtttacaaacacgggctcccggcaggtgcgcgccgccccgcccgtgcgcggccggggttcgagggtggctcccgcgggcctcggggtgcccggacgggggctgcggtgctggctgcgtgcccgcttcttccatgccgtcctggggcaccggaaaatccgccgccaggcgctgtccccgacacggggtgaggagagccgtgcgggcccgggcggggaacggcccacggggtcccagcgttgttgccctgccgggcgggcgccgagccccgcccccgcgcgccccccgggccaggcccgctctcggccgggtcggcggggcgggcgggggcccccggggcggggcgcggcgccggcggggccgggacatgtagtccgcgcgcccgcggcctcccctgggcggccccggcgcgggcccggccgcggactacgactcccgccaggcgccgcggcgcagcgcatgagccctgctcggctccggcgcgtctattatgctgccggggccggcgagccaaagaggagccggccgcgcgggccgggaggggacggccgccggagccgcgaggccaagtacgcctttctcttgcttccttgcgcgcgcggggcggcgggcggcgcgggcggcggcgggccgggctgggccggggagcgcggccccgagcgccccgcgcagtccgccggcgcgtccgggtgaaccgggcgcccggggccgccgccgccgccgc

SEQ ID NO: 43103 - DNA, 2300 bp, Homo sapien
gcctgagcaggaagggagaggatgatgggctgctaggggctggaggggactgcagagccaccccaaatcccttctcaatggcagccctgctggctttcagctgtttgccactgtggcccctaaactagtcttcagagatagtagcacaggggctgagatgctcaaatgagagtttctgtcctgttcccttacagattctgcttcctagagacttctccagcctcgggaaagttggctccatggagccatccgggccactcatgtgtgggtgagcagcgggaagggaaagaaggggaccttggtgcttccatcagagccagtgcccagggagcgcctgggttcctgccatactcctgggggtcaccttagggcagtgggaggcccataagggttgggggcatttggtcagcagcctcagacacgctggctggtcagggcagcctgctgtgtgcatgtacctgggttccttgaggtcaagaccaggcggaaaggctttttgttctagccttgggaggagtgcagtggggtctgtgtaagtggtgaggtggccatcctggtggtcagagtgctcaagatacccaaggagatgagatgcagacagcaggaatgggttgcagcctccaaggtggctaacacagaagcctgtaggttgaggaactgcaccgggggtttggggacacaaccaggatggtagttctaagggaactgcctgcagatcctcacctctcatattccccctccccgaccttcctgcgcctgaggactgcactttgtccattttgccaactagaaaggcaaggctggaacctcgtcctagagccttgccctggagtgtgagaaggtcctgggctcccagcagaaacagagggacaggattgggaaaggtgttggcttcccctgcaaactcttcctaagaccccggggctttgggtctcagccgtcctgcaaattggctctgtgaccttgggcaggaccctttgcctcactgagcctgtttccttacctgtcagcctggaacagaacacctgccttctgggtgagcatggggatgaattgtctctgtgctggcactcactttgtgaatattgcatagatgtgtgcatttcaggcagtggagctgctgctcaacttggaacacacctggggaccccaggggcttggggtgggtgcagcccacacaaggaaactcgaccttgcagttggcaggttcagcaggcaccaaggaacctcgttttgtttttgacgtttttattggggtctaatgtacacaacgtgtaaccaccttaagttacagctggattaaaattgatttatgtggccgggtgcgttggctcacgcttgtaatcccagcactttgggagtccgcggtgggcggatcatctcacgtcaggagtttgagaacagcccagtcaacacggtgaaaccccatctctactaaaaaatacaaaaattagccgggcgtggtggcgggtgcctgtaatctcagctactcgggaggctgagccaggagaatggcttgaacccgggaggcggacgttgcagtgagccgagatcgagccactcactacactacagcactccagcctgggtgacaagagcgaaactaacgtctcaaaaaaaaaaaaaaaaaacaaaaaccaaaaaaacaacaaaacccccccccccacaacttgatttatgtgtaaacccgagtcgtcatcacccaaaacaagatgcaaaacgtgtccacgggctgaacctttcaagatacagaaaaagggccaggggtggccctctcccggaatctcaggctgggaacctggtatctagttcccgcccctcactgggcagatggggaaaccggggcttggggcgagaaggtccccaggcagagctgggagcacccctaactcttcgccagctctggggacttggcgccctctccagcaacagcgaacttgggcgcccgcgccccagcaagtcgggtgggggagatggtgacacggagggcgcggcagagcgcggctcctccccgggcggggccgacctgcccgcgcgcaccgacgccccgccccccgccccgcgcgcgcgctcccgccaggctaattaggcgcgcggtttgtttacaaacacgggctcccggcaggtgcgcgccgccccgcccgtgcgcggccggggttcgagggtggctcccgcgggcctcggggtgcccggacgggggctgcggtgctggctgcgtgcccgcttcttccatgccgtcctggggcaccggaaaatccgccgccaggcgctgtccccgacacggggtgaggagagccgtg

SEQ ID NO: 43104 - DNA, 2300 bp, Homo sapien
tggccccctcagtctcccaagtaactgggattacaggtgtacaccactgcacatttaaaactgagcattggccgggcgctgtggctcacgcctgtaatcccagcactttgggaggccaaggcgggcggatcacgaggtcaggagatcgagaccatcctggctaacgtggtgaaaccccgtctctactaaaaatacaaaaaaatttagccaggcatggtggcaggcgcctgtagtcccagctactcgggaggctgaggcaggacaatagcgtgaacagtgagccgaggtcgtgccactgcactccagcctgggcgacagtgcgagactccgtctcgaaaaaaaaaaaaccaactgagtatcacctgtcctttccagtgaaacagaaggaaatttttaaaataaacaggaagaaaattacaatagaaaatgtcaattccaaataagatcttaccggttctgctgattctcccattgattggcagggctcaagtaatcattaggagataattcatttttaaagtatcatcttaaactgcaaggatatctgttaaatgtcacaattaaacatccattggcaatttttgtcttctttgaaaactgtctatgcaggttctttgcccatttttaactgggatatttgtgggattttttgctattgagttatataagttccttatatattttggatattaatcccttatcaggtgcatggtttgcaaatatttttttcccattccattggctgccttttcattttgtccattgtcacctttgctgtgagaagctttttagttttacgtagtcctatttgtttattcaatgcttttgttgcctgagcttttggtgtgatatctaaaaaatcattgccaaagccaatgtcaaggggccttccccctgtcttcttctaggggatttatggtttcaggtcttacatttaggtctttaattcactttgacttgattttttgtatggtgtaagataagggtttaattgcattctcttgcgcatggatatccagtcttcccaacatcatttattgaggagactatacttccccattgtgtccctcatatggcttggctctgtgtccccacccaaatcccatgttaaattataatccccggtgttggaggtggggcctggtgggaggtgattggatcacgggggtgtttctaatggttgagcaccatcctcccattttgctgtcttgtgatagagttcttacaagatctggttgtttgaaagtgtgtagtgcgtcgcccttcactctctcttcctgctcctgccaggtaaacgtgactgcttctccttcaccttcagccacgattgtaagtttcctgaggtattcccagaagcagaagcctgtacagcctgcagaacagtgagccgattacacctctttagaaattacccagtctcaggttcttgcacatgatagctgtgtatgaacagactaatacagtcctcttggcactcttattgaaaattagttgactgtatctgcttgggtttatttctgggctgactttccactggtctatatgtctgtttttatgctagtaccatcccactttgttcactatagctttactatacaatatatagtaaatacactatagtgtatatagtatatatggtatatagtaaataatagtatatagtatatagtaaatacactgcagtatttatatatacagtatagtatatatatactatatatatattctctctatatatatataacatatgtatatatattttttagacagggccactctgtcacccaggctggagtgctatggcacaatcatggctcgctgcagcctctgtgtcccaggctaaagcagtcttcccgcctcagcctctcgagtagcagagactgctgcggggaaaagcaagagagatcagattgttactgtgtctgtatagaaagaagtagacataggagactccattttgttctgtactaagaaaaattcttctgccttgggatgctgttaatctataaccttacccccaaccccgtgctctctgaaacatgtgctgtgtcaaactcagggttaaatggattaagggcggtgcaagatgtgctttgttaaacagatgcttgaaggcagcatgctccttaagagtcatcaccactccctaatctcaagtacccagggacacaaaaactgcggaaggccgcagggacctctgcctaggaaagccaggtattgtccaaggtttctccccatgtgatagtctgaaatatggcctcgtgggaagggaaagacctgaccgtcccccagcccgacac

SEQ ID NO: 43105 - DNA, 2300 bp, Homo sapien
aaataagaatcacagaagaggaacaaacacgatggagattttcagaacattaactaggctttggccaccagcagtgacttagtaaatggaactgtttctctgaacatcttttttatttttttgagacggagttttgctcttgttgcccaggctggagtgcaatggtgcgatctcggctcactgcaacctctttcctgggttccagcgattctccttgcctcagcctcagcctcaggtgatcccgacctcaggtgatccactcgcctcagcctcccaaagtgctgggattacaggcgtgagccgccgcgcccggccggattttctcatttttactagaaggttctatctcctgggggtggggtgaggtggtgagaccaattcacctggaagtggaagctgggaacttggtttgagttctgagggttctggggtctcgccccttatcttgctttgcctggagggctgaagggctggaaatatttttgttttggggctggaaccaggactgcagtttgggagccggtgctaggttggaagaggaggcggggtctggtaagcactttagccgaattgagcagtgggaattagggaattgagggcagtgggaagctggttctgagttttaaactggggagtgacagatcagagctggatttttaggagtttctctgtttggaggtttagaaaagacccaggtgggaggtagggctggggtggggagggagagaagtggacgatctgagagctgaggtggggtggaaggagagcagcgtgtcacgggctcgggattccggcccaggcggccaggtggacggagataaagatgcgcttcttcatccgaactgggtttgctaacctgtgactgtcaccactccatgctccagggcacctggcccaagggatccggcctcttgggcacacaaatccatatggagccctgaaggaccagacagggaccttgccttctctgtgtccttcctgggaaggggactccagaccaactgccagtcttccggttccacctctctgacaaccgctcacctcaccctccttggcatttttatttcaaatgctctatccctttgtttgcatgggttcctgtgtcatattctgtgttcccatttttaattggagaataagggactgtatgttattctacccacaggcctagctgaggggatagggaggccatgcctacctccaaggctctaagaagtgaagcaggcggcgagaatgtgcagtcgttgaggccagaggaccgggcctcagcttctccttaagcccctgagtcctcctctggggaccacccccttgtacctggaggtgaaaatgcccgcccaggagggaagggctggccccgggagagcccgctgcgaagtgagtttgcgcactgcggagcgggcgcgggtgactccagagcggccctgccagtccgcggggctggcggggagcaggttcgtgcaccgcgggctctgtgcatgcagaggcgggaagagcccccagcccggcagccggccccgcgggaaggcgcagcccgggcttccgaaccctgtgaacgcgcaggttcctggtcttccagatgggcaggaatcgtcctgcccgcccggggtgggaggccacatgggggcactgcgcccgggcgcggccccaggtgctttccaaatgcccactgccgctctcatccgtaccagcgatgatcaagaaggggcctggtcgcccggggaggtgccccggcccgaatcgactccggagacaacgccgggcgacgccacctgcgcaggtcccggagggccgctggtgtctgtgtacagggcgtgctgtctgtggaaacgcgagggcacactagcactttcctgtatgtattattatacttcagtttttaggaagtgcattagaagggcctgcaccagtcaaattcggggattaaagcttttaagcgggaagcgcgcgccccgtgctgtccctttaaagcgttgggccggcccgaggcattctggccgctgtcgctgcccgtagcgctcctccgagaggccggctttgtgagctcgccccgccccccggacaccgccccctcccctcgcgcacgcgcactgcgcccccgccgcctggcgcccgcccgagctgccgccttgtcgagctgagtccgcgctcccgcccaggcggcggccgacgcgacgccccgagcgcccggccccgccgccgcggcccggcaggtaagcgggcagccgcccggcccggggaacacaaggcgggcagcggggcggcgccagaagcttccaaaccgcacccggccgccgcac

SEQ ID NO: 43106 - DNA, 2300 bp, Homo sapien
aaacacgccaagcctagaccccaccgacgtagaaacttggtgggtgtgttgggtcaagaaattgcattccccgccaccccccgacggagtttcactgtttggcccaggctggagtgcagtggcgcaatcttggttctgccttctggtttcaagtgattctcctgcctcagcctcccgagtagctgggattacagggaccgaccaccacacccggctaatttctgtatttttagtagggagggggtttctccatgctggtcaggctggtcttgaacttcctgacctcgtgatctgcccacctcagcctcccaaagtgctgagattacaggcgtcagccactgtgcccagccatcatattcttaaaagtcaagttaaggttgttttgtttgtttcttttacatgttcatgttttttgagcccaaaggttggggcaggttgggcttgagctgggaggggctggacaccttttttgtaagaccgcctatctgttgttcctcctctgagggtgtttccaggcgtctagactcacccaggtgagttgatgctgacaggagctgctcggccttctgagctgcctatttcgccttctgttcctctggtgtttcgcttgggtagggcatgggcacagttcactcagctctggccctggcctggctgtctaacgctaggactgttatagtggactttgcagctttttgcttggatttccttagttcctctctctccctgtatttgtccagcctgccaaggaaaatgcagcagttgggttaaattggcatggctaggttgcactaatgacaagtaccacgtagctggcatttaccgaggaccggttttgtactggcactttgtcccctgggcagcgctacagggcctgcccctcctctccccctctcttgtactgtactcggccctagatgcagcgtgatccatctttgcgcagggaatctttgctgcaggtgaaatggagcggtggccacacctgttctctgcaaagtgggtgttgtaatttctctgccttcctcttggatgaagactttgagacatgctttttaatgccttccatttcgcgttagtgttacaatcagcctgtgcaagatttcagttccaagctccaagctagaatttacagtgtgtaaactcattagattgatggtagtgctagcttctgggattccgatggccagtggtatttgcaagcatgtctcagtggctttcccttttaaaaatgctgtccctcctttccaagtaacctgttgtgcttttatgagatgtattgaagtaatgaatctattcccatggtagaggaaactagctgcttactgtacagatttgggataattttcattgtcaaggtgaaaccgattgaactgcagtcttttttcgttcccctgcagtgtgagtcctgctcgtagaatatcgttggtgtacttgaggctgcttttccagaaggcaggatgtggaaattccagcaggcagagctgcctctggcttgctctcatctctgtgttttgtggctcctcactgagtgcgcgagccctgtgagctgttagcatgctggaaggcagcctcgggccagcagcctgtgcatggaggcactggagcccccccatgaggcgtagaccactgggtgcccgtgcttgtgttttcaaacgtggctgtgaacgtgattgcgtcacttggggtgcattttaggatttggatgtgatcccaaatttctacaccctgaagctcagtcttctgtcatttggcgtgttagctttctgtcaggaaaccttttgctgttctttttttaatgtgtccagggctctttgaagaaaactgcattttgtttgcacaaactgctgcattcttacagacttctggataacaaaataagaagcacgcttgagggtggggtctttcattatgatgacaaaaggggagagcgcaggggtgtcagcggagcagctggaaagtattagcaaggacttaggggaattaatagggtcctcaatttggaatggtttgtttgctacagggctcaatatggtagtcaaatgtttttcttttcatcctttttcttggaaatcaattttttaaaatatagtttgtttcttggctccctgttctgcatctcgctcaacagactgcctctgtcaccgggtccctccacccttgtctcctgtgcggccagcgtcagagccatggcgacggaggagaagaagcccgagaccgaggccgccagagcacagccaaccccttcgtcatccgccactcagagcaaggtgcgtgcccaggggccccttggacaccttccg

SEQ ID NO: 43107 - DNA, 2300 bp, Homo sapien
ctcggctccagcagcgagctcggccacagctcctaaaggggccctgggtatggtgccttaaggagcagtcaccgctgaagaggctggaaaaggggattgaaggcctgaaaagaacatgtcccctgtgactttgtatctgaatccagttcaatagtgaactttgaagcttatcccaacgattcgagaccacaggcgggagggagctccctggttcatgtctttggttttagcatgagcttgctacctaagccttgattgctggtcccagaggaagaccacagagggcaactcactggtgaatgttgatgccaggattccagaggaagtagcagcctcctgagcctaccgtgcacagaaaggaattcccatagccaaggaattcattcattattggataatgaaaggattataacgtaaacatcaggaaacctattatctaattctaccaacagattaaaggcgttaaatgtctctgtctgttattaattagtaggggtcaaaaaggcgcctgattgataatatccagcagccaacccttcagcaagatagagcagtattgttgaccacttactggtaactaataattttcacatgtggcgacatgctgaaactctttctatgaaaatcagaagtgggacaggtgtgcttggttcccatgttactcagcattgttgggagtttctagttagtgtaagaaaatgaaaaaatagtcctatgaaaattgaatagagatacacatctttgtagatatgtttgcatgttttaaaatatttaaaagccaccaacactgcttttcaaatacccatttaaccctgtgacgtgggtactgtcagccttgcttttcaggcagggacagttaccacggtctctcagttgctcagtgcaggaccagaacccgtgtcagctctggagtctgggcctggaaccccctgccctgctagctacgtggtgtgatctcgcgtttagtgccatcagtgcttgaaaatggacttttttctgtatactaggaattgccagttagaagatggggaaaatgtttccattttaacagtgacaaaaatgctaagatgtttaggaatgcggctagtgagaaggagcaggaccaatgcaggaaatgagaaatggaactgaaaggacacacgggggttaggtcttgagggttaggagatgaggcggctccggagaggccctcccgcagtgattgcggagctagaggacatgaatttgagatccatggggcagcaggatggagctgttgctgagagaattgagaagatgcagagttgggaggagagttgctgcttctgggtttgaaaaccctgggtgaagtgtctgaggtccagtgtggtctcgtccctggattattgaagtgtgggcagaacaggaggtgggtgtgcagagcagagagcttcggggccctcccagaggcggcttctccatgggtgagagatgggagggaccgtgcatggcggccatggggtctcgtgcttggggaatgatttgtccacgtgtgacccgagcctgttccccgctgctggcatctgtgcagtagaattgtgggtgctaacacagtgggctctgcttccagaatgcgtctgtattggcagaaatcacagaaaccctgaaattggaacaatgtaaatgcctggcttgtaccttctgggaatagtccagaagactgcttacaatactcttaaatttttgttttgaaagaagccctctcattgcttgcatgtgtttgcatgagcgtgggcagagcctgcgagaagcactgggctgctgctgcccctctccttggccagggagagtggagagagcaacaggcttcccgctctgtgttgggggtcaactgtggcttgtgtaggagagatccagaggtaccccacacatggtctgcacgtgtgtagcatgtgtggactgttgatgtttgtatggacagtgtttagtctttgtccctagaatataagagaatgactgttaaacaggtgaagcataacttttaaaaaaagatagggaaaagcgtgctagtcctaaaatttatatctgactcccagcagcccgcgtgagatcataacttgtctgcttacgcttttttgttctctttgcttcgaagtcgcatctgggacaccgcctcaggccagtgcctgaagacgctcatcggtgagtgtggctctgtgtgggggctgggtctgtggggagggcctcccctgctgggttcactgcccctgttcttcaccagctcctcctccctcctctgccctgggtccgcccctgcaggaggaaccttcctccgtgtccga

SEQ ID NO: 43108 - DNA, 2300 bp, Homo sapien
ccaacatagcaaggacatttggcaggtacacgggacatccgacctgcctcctgacgccgacagcagccttcacagaaggccctgctactggatctggagtggaaggaagaagggtgctgccacggtgctcactttgggcctcatggacgcggatttaacccgaagtgcttagcaggcctcactggttctgcacttcagcacggcccccagcagtgtggggagggctgcctggccccgagagctggctgtctggccaggctgtctgtccagcacctttgcctgctggaccgaaatccagctgagctaggagcaaggctgactgtaaaaggaaaagccattcagagtagctcaggctggtcgtcccggccatgggaggggacttgtgctaattcctcttcagacaccaaagggggtaatcgcaggcgtggcagggccgagaaatcctgttagtcctttgccccccaaggctcccatcgagtggctccctgacaaagcagctccagggcttcctgaggacagcaggctggaggcaggcggtgcggaccccccacagacactaatccttgctccaaagcagattcgagggctgggcggcagcctccctgggctccagagactgctggaagcttctgaggcttggaagggctgcgaggcccagcacacggggtagcatgggcaagctcctcccttcttctggggactcagagtccccatgtgcaaaattggggggaagagcggggtcgggggaagagaagacctccaaggcggttagggtggtcttgggcatccgagtcttgcccagggcgagggctctgcattgctcttggtcctctggaaggcagtcggggcagagtgaggcccttggttcttcttggggatgcagggcaccatggccccagcagctgaactggcctggagggtgcgggggtgggtgtgtgtagcagctccccagctcctcccctgaggaggtcagggcagctttgccctcttggagccaggcctggcggcttcctgggccccagtgacacagcagcgcgaagcaagtcatctccctctcagcaaaacagagccaataattgtaccatctctgctggagaatgaagcgcctcaggggccacactgggacgcgccaccctagtgcatgtccctctgggctcagaaccccctttcagcagcctctcagcctagggatcaaggtccttccaaacctgggccaccccaacctcggagaggctccccactgagcacccaaagcacctgtgaccccataccctgccggtgccctccccccacccatgcagccccatgcccgcccttctccccgtggacctgccaccccgacacctggacagaagccggctctggtccctcatctccttctctccttggccttgtggttcaggcccttgtgtcctgtcccctccctgctctgtgagtgtctggtcactgtggcagccatagggtagcacctagaatctgtgttggacaccggtgcgtcacctgttgcttcccgggcaggggaagcacctggcctgtgttccccccctctgccctccaccccttgcccacaggaggtgctgcaaagcctgcgtggcgttggcggggtgctggggtctggaggagcccagccagtcggttgtgttggcaagagacgggcctgaacaagagccaagtggcttctgcgtcagcttttaaaaccaccaaaaggagctcacttgtcatgctgtggtccaaatattttggccatttagatgcaaccttctgtgcctctgaaattaggtgtattattaatctcatccagcccagtgacagagtgggcagatcagacaaggatccttgcagcgggatgaagggtgagcatgttcttatcggtgcaaagctgacacggggtgtttccagaatgacactgatggagtgcagcctgcctgggggaggggtggctgggaacccccggtgatgaggagggcatgggcacagggcttgcttagggaggagaagagagggctccagagacacggttgctggcttccagggtgtcacatggggtgacgtggcagggggtttctgcaggggtgcttctgagatagggcgatagggccagctggggttggctgcaggctccaggagttaggttccagatggatttcagatgggactttcttgctaaccctactttttttctgattataaaagtaataaagactccttgtagagaaggaggcaaaatacaaagaagagtgtgaagcccccatcactccattaatgttcaccagtcggggggtgggaggtgttttccttca

SEQ ID NO: 43109 - DNA, 2300 bp, Homo sapien
ttctggatgtggagacctctgggctgcatgtgtttgatatctacatgtgggtcctgcctgtcctcctcccaggagttgaatgaccaatagggctggtttgcagtacctgtcttagccagtaggtgccaccaacatctggttctggaattccttaagtctgcatttttagttcaatgaaatggcttattcccaatattgtgaatgatgaaggtttccagtgggtcagacaaggctcatttgctggtggggtctgtaccccgactgcgatggggcactagtggcagccaggcccctgcagtgctggctgaatctgagcagtgctggctgaatcagggcagtgctggcttccaggcctcctttctgcaccttcctccctgggagaggaagcaagagggggtgtgtggagcaggcctgaggctgctggacaagaatgggcaaatgctcctgagcagaggtgggcacagggtggcagaacctctgtgttcctgctgcctctgagctggccttggccaggtgctgggggcagcagagctgtgtgaggtaagaagagtgctggctttggatggggtcaggagtggcccgagtttccacgctgccgagtggtggtggcatcctaaagctcatgccatgtcttcctgagatgcagggtgcacaggaggcagatgcccatgagaggcctggcccagggcttcctcccgctctagcctggcacccagcgagtgagccagtgccctggacacagctgctctgaggcttggggaggtgaagtcttcctggggctggggaggggtggagccaggggtgtcccctgacctggggcatgtgggctcagtcatagccactctatgtgttcatggtcctgctcgactccccagaagtgcctgtgattgccacaggtcaaggcacggagggcctgagagccattctgcagatgggaaggctgaggcccagagagggagagtggcttgccccgtgtgcccagcccgtcggagatagggtgggggcaggcaggcagtgcctccagctcccggcacttgctgccgtctgtgctgccttgggtgggctccgacatttcccagtggtctgctcaggcccatgggcagtggattcgccacctgggagcctcccttctgcagtgccagcctccagggtgcggggcaggggggcacctcctgaagtgtggttggggctttgaaatctctgatttcaaaggcgggagtgtgggaggtcccagcctctcctgcggccctatgggctgccctcttgttcctggcacacaccaaggccttgcacaaagccacccagcagcgtccagcccaccgcccacgtgagaggtgccccattccacccatctggtcccctcaaacagacctcagagcatggagctaggggcctgagcgtccggtgcccgggcgaccactgctgtggcacctgagcaggtccaggcagtgtggcctgctggttagggccacagacatgggagtgggtcagcaggcgccgccagtcctggcttggccacaggtggctctgagtactcagggcctggcttcccgcatctgtaaaatgggagaatcatggtgctcactgctgacctcccaaatccacgaatttacccacgctcagaactgaccaggtcctggtacacggcaggtgctcggcgacatcagcctttctgcctttcatgattattcccagaccttcaccttgagtccctgtggagatgggcagaggggctgactagtcccggccaccagccactcctcccactgctttcccaggtggacgggcctggagtgctgagggttggagcgacccaggcgggcatcctggggctcattcacagcgggttcttcctgcgtctgccgcaggcccagcctaaagccggggtcaggcgcagaacagtaccttggaggggagctctgggcacacctggcccgtagtgagtgtgaatttgcgtcagagagctgtcgagacccacggggccaccttgagggtgccggggtcttcccgcaggtgcgtgcatctgtagctggggggagcaggcatttggtggggcctggagtcacctgcactgaccactctcctgcggcttcttgtcttgcagatttctccacccaggtgaactcctccctcacctccccgacggggcgaggctccatggctgccccctcgctgcacccgtccctggggcctggcatcggctccccgggacagctgcattctcccatcagcaccctgagctcccccatcaacggcatgggcccgcctttctcggtcatcagctcccccatgggccccca

SEQ ID NO: 43110 - DNA, 2300 bp, Homo sapien
tattggtggagtgagttggtgccagcttccacacagcacttctgagtgcccggcatggagctggacttggtgtcaaggcctctgagctctagcaaagcctcctggtgggagggcctgcccagggcctgtggggctgtgatgtgtgcacagggagtgtggacgcgaggctgagcgggcttcacggggtcggaagcagggcagcacaggcgcctacccgccagggactgaggtcggaggggagtgtgcagaggagctggtttgctcctgcctcgatggacagatgaggtccagcaaggtccaggggcctgctcctggcgcagagtgggcctttcccaagtcggggctggtggagagacccttcaggggctcaggaaggaagggtgtggtgggtgtgaggagagagccaagagacgggcaggagacctgggtggggcatcgaggcggcgggaactgaaataagtgccaaggatctgaaaggggaaatgcgatggcccccaccctggccacgcgtggagtcctgaggctccagcgaagcaacaatggcagcctggctctcctgggagcgggagcagggagtgtgggaggagaccctggatagctggggggctgtggagcccactgggggagggacagaccaaggcagacccccggggcggccctgtgctgtgctccgggggctgtgagccaacccgaggcccagcagcctggggctggaagggcggaagaacgcccgcctggcctccccatcctggcacagccttgcttctgtagcctggaccgtcctccaggtgagcccaaagaagcaaggtgggtggccccagggcctgcagcctggatgggcacctcagcccgggctccactcttctcagatgtgcagaggctcaccgggccctgggctcactgggctagccagaccctctgatatcactgaggtctgggggagccagggatgcaggctaagttcagcgcgggagctggcttggccctgacactgagagggagggggaccgtctgccattctgtcctgcctggagtccctttcccggccagggctgctctggtgctccctcagtttacccagggcaggtgctaggcccaagggactgcacatggagggccgggaggcagcaggtggatccctacccacccgaggtggtttgggacagcctagaaagaggaagtgcgtgagttcctttcctttgtgcttccgagcaacctggacctgcagagtcatggcctgtgctcctccagcctctggcccaaggggctcctgctcacacgcctcggtgcctccccagtgctagggcacaaagcgagggtgcccgacacttcctgcttgtggatgcctttgctgcccctgctctgacctgatccccgccctggctgtacctacttctttccttttttcaaacaagccctttgcttccccacctctgaacactggcttgggggcccctgtgcctgggacacccctttcttcctcccaggccctggcccatctcctccaggaagcttgagtgctcactgcagccaccggcctccctgtaagacagtgagttgtctgcgagctctgctctgagccctggcacatggagcgactcagttacacttaatcagctcttagaggcactggctgggcatggtggctcaacgcctgtaatcccagcactttgggaggccgaggcgggaggattgcttgagcctaggagttggagacaagcctgggcaacatagttgagaccccaccactagaaaaaaaaaaaatagctgagtgcagtggcatggacttgtaatcccagctactcaggaggctgaagcaggaggatcaattgggcctggaagtttgaggctgcagtgactgtgattgtgccactgtcctccagcctgggcaacagagtgagaccctgtttcggaaaaaaaaaaaaaaaaaaaagagaaaagaagtaggcactaacatggttccagttttgccgacgaggaaactcaggctcacagtgattaaatcattttccgaatgtcacacgagaacgtaggaggcaggcagaatccggagccagggatccgcctctggggcctccagtgcctccaagcgagacagccactagaccagcgagccctggagggctgggcagggccttgtcccctggtgcctcccggagcccagcacggggcagggccagctgggcacttagtttggacgagctctgtccctccaggggcttcactttcgccttctgcagcgtgggggatcatgtgtgaccttggccagcccctgacctccctgagccgcagcctctgca

SEQ ID NO: 43111 - DNA, 2300 bp, Homo sapien
tgggcggaagtccctcgctcaagccagtgggccatgcaggaaactgttggcacagggtggctgagaggcatccacgtggggctgttacagagctgtggcggcatgaagggaatcagggcaggactggggaccctgggcccgggggtgtgaagggaggggcttgcagagccccgagacggctgctcagtgggagctgtagcttcaggagaaagtggcggctgacaccgtggcgggtaggggcagggagggtgccacaggcacagatatgttctcccaccgtttgccaaacccatctggaagccagagggtgggagggtgggatgggacatggtcagtccatgggtggctggtgcctgtgagtaccccaggtgttctgcccaccatcgagacatcctagaggggctgggatgagccccgccacaggcccagagaggtggcagcttcaggaacccctctgccaggccatacccttgggcccttaggagggcaccatcctaggcctcagaccaggaggagaaggggcctgggtcagggactacccagcccagcacactggcaggagggcacaagggagggaggaactggccccaggtccatgtctgagctcggaggagatacggtgggaagggcatttccagggcgagagtggagaggccttgactggagtaggggcgtggagctgtgctggacagaggtggccgcaggaccccatggtcgctgttgcttttctggctctgcggtttactcacttagaccagtcattttctctctcagccatagttttctcaccggtacaatggggtaatgtgagtgcccgccctgtggggcggtgttggggttgttgggtggtggatggaacagaaggaggtggtggggttggggaccagagccccagctcaggactttcagggaaggggacgtgtctcgggggaaccgcccataagccaagtggactcttctatccaaattccatctgggtcctagcctgtcccccggcacttgggatccccagataggctgacagaggggctgaggtggcttcctcagtgttcaaagtggacagtcgaggaaggcaaatccaggtggaggtaagctgggggcgggaggagcctcatgcgcctgggcagccagggctcatgcctcaggcccctttgctgagcgcccacccccagggctgatgagagtcagctgaccggagcccatgcctggtgcagatcctgctgcctgcaagcatcgctctattttgtcataatgctcggcttctggttccccccgagtggctgcttcctgggacagattgaaaggcatctcggtgccctgcatggggcatggtcggtggagctgggtgggccgtctctgtgtggccagggtggggccgggcgcctgccctccatttctggcagggcccagtgtccttgggaggggcgtggggtctgcaggtgcacggtttcctgattgcccaggtgtctctgagcctgtccctcccccgccccccgccgcaggttccccttgcccaggccctcagccagcacgggtgcccctgtgctgcctcatgagcgtgctctgctctgcttctgggcctttgcagggatcgtgtctccagcctgagccatgattcctctgcaacctcctcttccagtcacattgacacctcttccaggaaggcttcctggttctccctgagtccatagaccgtcaggacctttctcgccccatgttggggtccctgctgcactgtctccttccaggccccaggcaggctcctggtgtgaacattgattggaattaatgagagttggcctctgttctcagagcacacaaccacacggaggccaggcctggggcagagatggggtctccatcacccagtgctggtggggatgctggtgttgtgggtgagttggctgggagctggcaccacccggccaggacagccttccctgggagccactggccgggctgagcgtggggctcacctgcgcctcccgggttgtagccgtgcaggaggagcggcagcgtggcaaggaccggaacgagaatgaggtggagtcgaccagcagcgccaacgaggacatgccggtggagaggatcctggaggctgagctggccgtggagcccaagaccgagacctacgtggaggcaaacatggggctgaaccccagctcggtgagttgcagcctgtgcaggggtgggcagcctcacatgcctcagtttccctcactcactcaccctcccacctgagcagctgatgagccagagaggtcctgggggctgccctgggccctgtggctgcctcagct

SEQ ID NO: 43112 - DNA, 2300 bp, Homo sapien
atagaaactcatctctccacccaactcaaggctcagatgagggtggaaactcacatttgacagctttccaagccaccgcaccacttgctctccaagagaggataaagtgcatctgtcatggctgcttgagctgcaagactgagccatcttaccattgctgagaagtcaacttttgggggaccttggggtggtcacttgagtgtcagctcttaaggcgccagttgtgttaattcagggcaaagtttagatgctggctgtgagttacaggagggcttgctgactggcacggatgtgcacatgggactgtcagaaaggaactccacttgtgcttggggaaaaagaagctggaaccagaaagcctccactctcttctgataaccaggccatggcctgtgtcagcacccctagtcttcaggggtgaagctggccttgctggtaggggcgggggcactccaaggaccaagcacagctggggctggcgcggagtctggggtttgatggaatttctcactcattgaagtccacagggaaagtaaagggccagtggctgcaggttaaccaacgcacagacacgcacacaggcacacacacaaacacacacatgcacacaactcacacacatttttgcctgatcacatatgccttatacaagttgtaaaacaaaataaaatcaacaaggaaacaggtcagaactaacatttgctttactgaatgtatctcaagcacctccccacgtctgtgtgtgaagagcttctcattcttttcctgcgaaatatttgatatctatgcaagcgcatgtggcagatatggagactaaaagcctcatcaccaagttagcaacagcgacctatcacccagctccggagcctgccatggctatcctggcaaacctaacctcggacgcctctctcacctcctgtttccagaatggtgagaattaaagagcatttggggaatttcacgcccagtctggagatgtaactggagaggggagtcccagccctgtctggcatctctggctaaattgtttgttcaaagggaatggggatggcccagggtttgcaaatcgttcttaattcattctgattccctccttttaaaaaactagccctgcagcccttggggaaggggtgtgggtcaggcttcaggaggctgtgcagggaggccaggcctggggaagctggagggagagacgcccacctaccacccagagactggcgggcctcctgctggaggagaccccgaggggcttaaagaagccaggcaggagaatcagggccccagctcttctccgagagcagccgatcaggaatgccttctccctgcgccagctgtcactcccaaggggatgccttctttggtttcctttttattgcagaggggccaccagggagtgggcaggagtgaggggtgagagcctgggggccgcagagccaaacttcgcctgattaataacccagatgttcccgtccaagcacatggaggtcccgggagctcttgggaagtcagaccccagctcggtcccgtgccaatctgcagttaggaggcaggtcctcggtccgggttgacacgtaggccacagtcttgggcgccctgatctggctggatgggaagtttagtctccacccagaagaggagctctgaactcctccacgttaaagaaaaagttaggcggggtaaactgcaactttctttttaacccgaagtgatcaaacctcggggcccctctgcactggttcttggagcatggccaggtgcgggcacctggggtgggaacagtggggggaccagggtgggcccctgggctccgaggccgccccaggcccgcccgcctaccggctctcagagaaagaacagggggccgcgcccgccccacgtccgctccgccccgggccagccccttcctcgctgcgactcgcccgctgtccccaccccctcgcccgcggcgcccagtgggaggcgggggctggcctcgccgagcccagcgccgggctctgatttgctgcgggcgttggggatcgacagcctccgcggctgccttccaggagagagggagggaggaaaagggggaaaaaagtgctccgcgccgaaggcgaggtccgcactctccgtccccgcggctggcgcaggacctcactcgagcggagcgcccacggggagcgggtcgcggggcggcggcggcgaggaggaggcgagaaggagttggaggaggaggaggaggaggcgagggcgagctagcccagcggggtcccggccgccccgcgggccaaagtcgagccctcccgcccgtgggcgagcgc

SEQ ID NO: 43113 - DNA, 2300 bp, Homo sapien
cagctgggtcccagtgcttcagaaggggagccatggccccaggcaacagtgcgtacctgaagcctctgcctcggtttcttcttcttcctttcagatgcataaaaatgcacatcaagcctgggcaccatctggtggcctctttattttttaaataaatgccataaaatgacataaaaacagtgtggcgattcctccaggatctagaaccagaaacaccatttgacccaacaataccattactgggcaccacctctacagaaatttcagaaacaattagccaggtgtggtggttcgtgcttgtggtcccagctacttgagaggctgaggtgggaggatcacttgagccagggaggctgaggctgcagtgagctgtgtttgtgccactgcactgtagcctgggtgacagagtgagaccctgtctaaaaaaaaatgaaaataaaaataaaaatgtacaccagagagcacggtggtctcagcttttccagctgtagtttcgtctttcttctggaggacagaggcccagccatctgcatcctcagcacacaattaggtcagtcactggggcctgttgtgggggtgacaggcaagcctgggtgtggggagagccggcccgttgcccatgggctctgcacagtgggtgggtgcaggtgcgatgacaggcgcgggacagaggggcccctggggggacttttctcgggtcctctgccttcccaccactgtgtccatcagggacattcccaggatctgtctttgctgctggttgtcttcccttgattttttgttttgttttctttctttggggatgatctgaaatcctcttcctgtgctatttctctgctcttcccctggggaaaggagagtgaggagaaagtgtcccgtgtccacgttcctgtggacgttccccttccttctttctaaggagggatggtgactcccagaggtattaaggaaaggagaaagtgacactgactcttctcagagcctttggctacagagtgttcccgcggtcgaggtggggtgaagggcgttctcgagggaagggtagggaacgatttctgactgcgattgtaagagctttctaggtaattattattcatgctatttagggtcataggtctcagtaatggtcgactaggtcaaaaagtactgcttgagcagtggagatactcagctgaaggttgagaacacacagggcgtccttgggccggtgtggcggtaacagtgagctggtgacagcaggcagacccagtgtaacacggctctgctgggtggggcaaggagatgccccaggtggagccatcgggagagggagagggggtgggagggcaggggagcgactgtcctgccagggatgccagtgtcatcctcctgcccctgaaacaggtggacatcatggcttctcagcccaggccatttggggacatgtggcaatgtctggagatgttttctgattgtcgcacctggggtgggggcagggctatcggcctgtagttgggggagtccgaggatgctgctctgcaccccacagtgcacgggacagcccccaccaaaaagactgacccagcccggaggctgcaggaatcgtgggatagaggaagcaaaggtgagattccgtggcctcaccccatggtcttctcatggctcattgtcagacaggagggagggcctcttcttaggccgggtccagcgtttctcctcatggtgtagaccagcagttcccaaactttaccaggccccagaatccccccgaggcctctcttaaggcacagattgtttctgactcaggaggccttgggtgggcccaggaaactgcatttctaacgaagtcagttcccagaccacgcggatgctggagcgtctgggggtgccacactttgcaaaccacgagtcgttctgcgtcctcgagcccagggtcttggatttcagcattaatggtggtcgtggggtggggagggcacctgccaggggagaagcgctggagagaagagaggagggtgtggctgttcctccacccatctcaggaacctcccgctttctttatggtggtccccgcttcacaaagcacccatggtgctgttcccctgcacacctggcagcggcactcactcatctccaaagcaaagaccccactatccggcaggtcttagggagcagggagaccctgggggtgggggtgagcttccagagaaggggtttcccatgggtttggccatgagattctgctgttgttgatgttcttattatgggaaggctcagacacagcgcagcaaaggtcgtgttctgcctggggccacagggac

SEQ ID NO: 43114 - DNA, 2300 bp, Homo sapien
tctgtgttagaatgaacaggaagcatccaccggttttgcgaaattaaataaatggagtgtttctgtcctagagggcttgggttctgcagacacacccattgccctctgaggtgagggaaccagaatgctccggcagagacagcaccattgaccaaatgcctgttcatttttccccttttggttttttcatctgttcagaaatcctagtgggttcttgcaaaaaccccatgactctgctaccagctccctcccgatgagtgacatgtcttcttatcctgtacagccaggcctttcccccagtatgttgattcctaggcaagcaggatccgtgctcctgggaggcctgccacagaggctgtgtccttcttccagccgtgggttgggctaccagggccaagggcactgtaccctccttgcttgcctccttcccatggtcccatgcgggaggtctcttgaggatggcacagcaggggacatggtgctgggcgcaagggctccagaggagcttgtgatcctggaccctcactgttgaagggggcctcacgtgcccctgttgtgggtgcatgatgggagctgagatgacacacggtggtctcgagagacattgggggcagctctttgccatccagaaatgggctcagggtggaaccaagatcctcatctgcttcccagagcctgcagcaggcttgcatcgtggtgcaaggaacgacacatttggagactgaactgacgacgttggatgcatcagtccccgggctcaggatgcggtccacccctccctcagccttatccacgatccaagaagctacctatgtctctgtcttgttccccgcagggtcctcctgggcctacaggtcctcaaggccccatcggacagccaggcccctctgtgagtatccatggtcaatgaccttcgaaaagccccacgcccccccagagctgctggcattgccagcatcctcacccatggccggttatttccctgcagggagctgacggcgagccggggcctcggggccagcagggccttttcgggcagaaaggtgatgaaggtcccagaggctttcctggaccccctgggccagtggggctgcaggtaactgtggggttctcaccacaccgggctcctccgcttctgacgccccctgtgtcttcattgtgctctctcctcttgtctttttaagaatggaaaactaaagccaggctgcagggggcctcctgggcctcctcattccaactggaagtgctgtagcttcccagaattccagacatgcccgcatttaccacacttcagcagtggcatttatttctgtgctcattgtggaaactgatgattcgtgagaaacatagtaacagtgacttctaaatgcacctcctagagatgacaacgataaacatttgggcatgtttcatggccatgccttttaaatgtgtgtattctcatgcacagaggcgcatatgtaattgtatttggtgtttgacaatgaatcatgtcataagtcagagagaaagtttgttcccagctttccccattttccatcctccattcccgttttatgttacgagtgtgttgaatgccattacacatgactttctatttatttggaaaacatgatttttagtcactgcacagtaagccagcatctggtggtgacataatttacccaggcgtcccctgctggctccttaggctttattgttttatgggttcctgccataatcacctttgtcgtaaatctttgcaatcttctctgcttatttcctcgggccgattctgagactgggaaccccgggacgtcctcgtgggtagctatgcacagagaagcaccttcccggggcttcgggggctcagtggtgctgtgtgggtggaggtcgtgaaagctgtgtgtgtgtttgacatacacatgacagaacagcgcttaactgggaagtttcctgttctcagggtttgccaggacctccaggcgagaagggtgagacaggagacgtgggccagatggtaagtgtgcctgagactccaaggccttgccgtactagcggctcatgttttggggaaacatttgcgtttcctctgggctcagtggtctctcccttttcctagggccccccgggtccccctggcccccgaggaccctccggagctccaggtgctgatggcccacaaggtcccccaggtggaataggaaaccctggtgcagtgggagagaaggtgaggctcgtgcctgctctggtggcagatttgcggttgtttgaggagtgtgtgtgtgtgtctgtgtgtgtgtgtctgtgtgtatgtgtat

SEQ ID NO: 43115 - DNA, 2300 bp, Homo sapien
aactggtaaggtggcctctggcgtctttgcggttgtcactttaaacccgcccatctcgtatcttacagagtaaaatggcccgctggcccaaagagcagccttccacctggtatagtcagtacaagcgggggtccctggtaagtggccacctcggcccggccacctcggcactgcctgcttgcggcacggctggctcgcggctctgcatggcacccatcgctgccatgtgtgccacaccgctcttgccaaaccgctccacatcacgtgacagcaagactcagctaggtgtggagtcctctccccagcccccgccaccctgacaagagtgtgtttctgcctggagtaggcagatggttttccgtttctgtgtagggcgcgcagagctgggtgtgggccccagcctgagctgatcctctgcccacagacggtgcagccccaggcacctgagcactgaggtcagacgctccagaagcaggagcgctttcactgtgtctgatggcagggcagaggacacagatcccagaccacttaagccattcagagctccttctaggacctgcaccacggatcccctctccccagctgctcagggctgagggctgtctctctgcccaccgggctgcagattcccagttacactgcacaccactgtacgagtcacgttttcacttttggggatcgagtcttacagaatccatccctgaaaggaaacgacattggcctcccaggaaagaaccacataggaggttcttctggccggtgtagtgcccaagagccagtttggacacattgatgtgaggacagcggctgcttctgccgcgtggagtgcccctaggaaccccaccggagtttgatttgggccctctcctggaatgaagagcagagttctgtcttttctcccagcaagttaaaggaccaaggttccagaacacaagacgggttccgggtgtcatttatggcccagattctcctttccctcccttcttgggatccagtggccccactcccaggtggtcctcaaaggagggccttgctctcagaaggcagcccgtgggttctgcggcttgtagcctgaccacttgccatgggttgctgcaccctggcaccagccccagcctccctgggtggacacagagcactggccctgagccgcctttgccctgtctgcacctctgaagcccctcgtctcataacctgaaggcattcacagctgattattcatctctcgtgccctcattgttgttggtttgaaatcatataccagctcctttgcagacactccgagggtctgtgctcaccgtggctgtgtttctggaggcttcccgttttgtggtttgccgtggacttgcagtcctctcctcctttcctctcctgcttttccttttccccgcctcctctgtgctgtgttccaaaaagagctgctggcatacagaaggacctgaaacacccggggacagggagggcccgggaccagggctgcttggcccggagggacagagcgtaggggatgctgatgtgtgggatcaggcaaggaaggggccctgggggtgaagctgctgggggccgaggtggcagggtccattctgcagtcttgcgggtagttaccgcctgcgcttggcactgccctctccccgcaatgacagctctcagcctccaaaaagagcctctcacagcatcctccaaaatgggaaaagcagaaagagcctattttcctcgcttggaggaaatggctgtgaaacctcatttgcagccttcagcccgagtagcccatttccacctctcgtcctgttccacagagagttaatgaaggttggggtgaagggacgacccagggaacacatcagcttactttaggatctttccacggccttatttctagctctgtgaatatcatacgtggacaagaggtagatgggggcctctcaaagatacccagatttttcagccaggtgcaggggctcatgcttataatcccagcactttgggaggctcaggcgggcagattgcttgagcccaggagtttgagaccagcctgggcaacataccaagactccatctctattaaaaaacaaaatgcaaaaatgggctgggcaggttggctcacacctgtaatcccagcactttgggaggctgaggcggatggatcacctgaggtcaggagtttaagaccagcctggccaacgtggcaaaaccccatctctactaaaaatacaaaaattagctgggcatagtggtgtgcacctgtaattccagctactcgggaggctgaggcaggagaatctcttgaacccaggaggcag

SEQ ID NO: 43116 - DNA, 2300 bp, Homo sapien
ctaaaatttatatggaaaaacacaggatgtagaataccaaaacatcttttaaaaaaaacaaatttgggaggtcaatactatctaatttcaagaattattataaagcatcactatcaagaaaatggttgtttggatgtaaaagcagacaaatagaacaatgacacagaatagagattttagaaatagacctacgtggatgtggaaattgatatttgataaaagcacaaaggaaatgtagtggagaaaagctagacttttcattaagtggtgctggactaattgaatatgtaacaaaaagaacattggtccctacctcacactatatagaaaaatgaatttgaaatagatcatagctctcagtgggaaatagaaaagtataaaacttccagaagaaaacattggaattaggcaatgatttcttggataggatactaaaagcataatctccaaaagcaaaatattgattaacggattgtatcaaaattaaaatattctgttgtttgggctgggcacagtggctcctaactgtactcccaggactttgggaggccaagctgggcaaatcacttgaggccaagagtttgagaccagcctggccaacacggtgaaaccctgtctctatttaaaatacaaaaaattagccgcgtgtggtggcacacacctgtaactactgccaactacttaggaagctgaggcatgagcatcacttgaacccgggaggtggaggttgcagtgagctaagattgggccacagcactccaccctgggtgacagagcaagatcctatatcaaaaaacaaaaaacaaaaacaaaaaaaaacaaaaaacaaaacaaacaaacaaacaaaaaaaaagttctgccatttaaaagactgtgttaagggaataaaaagaaagccacagttcaaatgaaaatcccagcagctctgttttattacaaattgaagctgatttgtacccagggctgctgggattttcatttagactgcattgcatctgcagatcaatgtcaggagaataggcagcttaacatcgtcgactcttcctagccacagactcagagaatatatttgcaaatcatatgttgtaggctgaagaatggcccccaaggccatcaaccgtacatggcaaaatgcaaatgagatgaagggtcgtgacacggggagatgatcctggcctctctgagtgggcctggtgtaatcccaagggtccttctaaatggggagcagtagagttagggtcagggaggaaaaggaggcaatgaggacagaagccaagattggagacatactctttgcagatgaagggaggggccatgagttgttacgcagcagcctctaaaagctggaaaagacaacgaagcagattctccccagaagcctccagaaggaacccagccctatcaacaacttgattttaggcttctgacttccacaactgtaaaataataattttgtgtgattgtaagcctctaagtttgtggtaattatcttacagcagcaataggctctcatgcatcacatacatttgataaaggggtggtactcggaacacagagataactcttcaaactcagtaaaaaaaaaaactaaccctccaattaaaaaaaaacaggcacacaatgtgaaaggatgcttcactgaagaagatgtgcggatatagcaaataagcccatgaaaagatgctcaacgtcatcagtcataaggaaaacgggaacaaaacgtgatgagacgtcaccacacccctgtgaaattggttcaacctaagaggactgacggtacccagtgctgacaaggatgtggaggacccgcttctcttgcactgctggattaagcggtgcagcctttttggaaaactgctttgcaatttggaaaaagttaaaaacatacccactgatatggtttggctgtgtccccacccaaatctcacattgtagctcccataattcccatgtgtcatgggagggacccggtaggaggtaactgaatcacgagggcgggtcttctcgtgctgttctcgtgatggtgaacaagtctcacgagatctgatggttttataaaggggagttcccccgcaccacgctctctcttgtctgctgcccggcgagacgtgactttgttcctcctttgccttctgcgatgatggtgaggcctccccagccacgtggaactgtgagtccattaaacctctttcctttataaattacccaatctttacgagcagtgtgagaacgggctaatacacctatcgtacaatccagccatttccaagcctggatattaacccgagagaaatgaaacc

SEQ ID NO: 43117 - DNA, 2300 bp, Homo sapien
gcctgcctgtaattccagctactcgggaggctgaggcaggagaatcgcttgaacccaggaggcggaggttgtggtgagccaagattgtgccattacactccagcccgggcaacaagagcgaaactccgtctcaaaaaaaaaagtgtactttaaaagctgcattctgccttcattttaaaagtgtgacttataaaccttattattctatcttttaataaccacctataaggagcctgtgaataattcttggtccattccttaacttagccaactaaacaccttcaaacattgttactgcatttatacatttaatagaaccacatttatcctttagtaccttgtctaactttaaaaaatccttctgaatatgaactgctagaaatgtaatcatttaaattcagcatgtgataaactcagagttccaataaagtgattcaatagtttatatgaattcggtaagttttccgcataaatgcactctgccaaatcaattactcaattggccattttctgttgaagttatcctgcacccactccaataggccagattctcttgattattgcaagtactttaaatagcatatttttttagatttctgaacactaaaatattaatataatgtctttgggcttttaaagccttctagacttaattttaagtcatctaggtttgaaagatgcttctattaggaaggacaaatagcatgcagtaaaggaacctgcctaaggactcggaattttggctgctggggtttcactgggcagctctggggacctggctcctctgcaggtgacttcaggactttgaggaagatgcccccaagccatctttctaggttccatatctgcatctccatggagcctgtgtcttccccaggttcatccctggacctcatctgcatctggcatagccttaattaagtcttgagaggtctgccctaaacaccacggaacccgaggggggtcttaactagtcatagtctcaggaccacacatctccatgggcattgaaggaaaatccgatgggattttgtttctcgcgtggctttgctgggctggggtcacagtttaaaatccttctactgatcttgccaaggaagaaggcacctcggcatcccgatggcagcaggtggcagggtgcggtggtggtagtgggaggtgcagtgctggttccgtctctgggggctttaggtatacggcctctggggccccacctgctactgtctctgtctctaacctggctcagtccaaggcgagagtgcaccttcaggccagctcttctccaaaaggcgaacacaaccactgaagtaagtccacagccatcctacaggtgggatgtctggcctcagggctcagggggttccctgggccctaggagtgaaattcacctactctcatcctccctacaggctaagcccctgcattcacactcaaggtctccccttcagatgtgtacctgggtcatagtcccccaggctccccactcttctctcctttccctcctgttcatgtgcccctgtgctctacatactgccccaggaaacagtggacacacacgcattttcctctccttttcaccctggcagcctgcctggacctcatagtggcagtttccaagcctcctgaggagagtcccaagtctgctcatgatgtggtgagggttactgtgtaaggcccacaccagtggcccatgaccagccctggccatgaggactctaggtattcggataagggagagagacctctttgaagcagaacatctttagcaaacccttccttgttccccgttctcagctcatggtgacatctgctcaccgctgaacaaaggtgggaggatgggcctgggctctttgcccaaggccacaagcaagtcagcctgttccctggaaggagaccgtccccctgcagggatgacagtcgccatgggatccccaaggggcggggggtagggagcagccctggagatgatctcgcacctcctgctggcgtcaccaagcccgcggagaggaagcggctgtcactcggaagatgagaaattggagtctgagggaggctggcttctctagccctataagagggcaggcaccttttgaagcaaagaccagaagagatggagctggacagagctgtgggggtcctgggcgctgccaccctgctgctctctttcctgggcatggcctgggctctccaggcggcagacacctgtccaggtaagggcactccagggcctcctcctggaaacttctcgtccctgaaagctggcagcttcgtgattggtggcttcctggcttccaggcctt

SEQ ID NO: 43118 - DNA, 2300 bp, Homo sapien
gcactggacagtgacatgcaatacaatgttgaccacagtggtgatgacaagcatccttatttgttctcagtctctgaggatggttttccatttttcctgttaattatgttgtaacttctgtatccacagcttccaaagacctctttctatattctgttgtttctgttggtccttatacacattgtcttttattcccatgagcctggttatcgttgattgtgttttaacatttcatttgaaaaaaataaaacactttgcagaaataatgacctgggatgatgtcattctccttcagagaagatttttgtttctttcagcaaggagcctgggggcatgagcaataattccaggagttgagattcctttcctgggacacttagatgtctcaaaaccagtttgcagcccttgtgaatgttggttgttgctcactcatcctattgctagggtgcagcccttctgaaagccaaccccaaacccatacctttggcaggccgtaggccccagtctttgaccttcagctctgcaagatggtgaaatcactgcccaacttctcacctctcttttggagattggcaaatccctgtgcaaaaagaggtccccactactagtttcacttctctaagatttctgtggctcctgagagcttggcaaagtaatcctttactacatagctagcttgacggtgccttcgagcaaatctctttttaaaggttttgtctgtttgtccttaataggatgcccccaaatacctaaactgccattgccaggaatcaaatgacttttgttgatccaatgttaagatattttaacttgccagaatcttgcattctttcatactcttgggaacattgacttgatatctgaaggtggtgttgacttctcacctgaaataaacctattgatgttgcaaggaagaggaggtcccctcacacccagggggcagctggcaaatggaattgaggggcacagacctgctggctttctccctgttctgacccaatcccaggtgagtgctgctcctgaattggatcctctccaagaaaggaggccgcaccactgacacccagacctctcccgcctgggccagtagctcagggacactaagcggtgtctgaggcaatgaagcctcctgccgttgtctctcaacaggctggagccaacacacacaaacacacacagtcgagagtcgttgtggtgcccagagagcctggacacaaggtcctgtgtctcctggatcccccacccctgggccgcccctccacttctctcccacctggggagcccttgagtttggaaacccagtctacacacgctggctcagagaagttgcaaaccacaaaacaacacctctccctgctccttagtcctgctaccatctgactctcgttagtgactatttctatacgttctaaaaatcccgcacaaagtgtccacagcgtggcctggctaagcatgattcacagcacgagatgcggagtaggaacatggcctcagggatttgggggaacaagaggcatccccaccttcaggtgaaatgagcaatcccagtgatctacaaggcgttagacagaattgagtccaatgcctggctcttactagtggagtgacttcaatttctccagctgtaactttcaaataatttactccaccgaatggggctggtgcaagatgatatgatggaaatagtatttgggacataacaagtgctcaacatttttttcctctccatccatgataagtgcctgatgacggacaaaccctgaattttctgggaacagatgaggcaaggaagcgtcttcagcaaaaccttccttatcccccaaggttaaggtcaaggtttccgagtattgcttggggacagctggggaatggaaagggggtgtgggggctgtgttctccttaagccacaagcaaagccgatgctttccagcagaggagtctcaggagctctctggactgggagcagggtgtctttgctgggggaagagagcccaatggggtgggcatcttgctggagcctagtggaaggaaacatcctttgagatgacctcatacctcctgttggtgcaactaagcagcccataggaagtgggtgtcccccagggagttgagaaactgtggcacaaggcgagagctggtttcctctgccctgttagagctgggggactcttcagagtcaaaggccagagagcatggagctgagtggagccaccatggcccgggggctcgctgtcctgctagtcttgttcctgcatatcaagaacctgcctgcccaggctgcggacacatgtccaggtgag

SEQ ID NO: 43119 - DNA, 2300 bp, Homo sapien
caaagacgggggtcgcactccagctctatggccatgtcacaggtctcccagagcccagacatttattagcggccacttggagcatcaatgtgaaggctgaaggagaaacttgggtcgaggcctggggtgctgcgcgtgccccatgcacgtagagttcttaagcatatagagtgtgtttattcctgcactggatctcctcagtagccccgagacctgcagtatatggaccattcattcccattcgacagatgtggggactgaggctcagacagccactacccggagatcccttcagctccaaacacagggtccactccggcccctggctgcctctctcaacgatccccaaggggcttacaaacagctttcctccattctaggacaacaaagacactgggggtagtaacatgaggggggcagagagaaaagaagcctccacagctgcaccccccccccaatttcttcccagcaccatctcctcacagagtcttgggggccaccctgcctcaggggccgtggcatatcaccaggaatgccactgcttaaactcgtctgaggctgggaagcccacccagaccaacaggcgggccctctggcttccctggagggagctctgtccccagcactcagagaacagagtccccacagcaaaggccctcagggtgcaacggccgtgtcggagggccccttcccatcttctcttcttcagcacatgtgcccagctcctgcacccaatgcccaggggatgcctcccagatgccagcagcatggtgacaggggcaggaggtggcattgtccttgttctggatatccctgggtgaccccggtacgtgactcccctgaactccagcggcctcatctgtgacacagggggccgggccacatcatcctgggcagtgctgctctctgcaattattgagtctggagtctcttcttgtcagagattctctttagggagtttattttccatagactaaagactaaacaatagagaacagagagaggcttctagatacctactgcaaccttagcttctcagaaaatacaggtgcttgggactcttccacaaaatcaggaatttaaatggaaaacgtgggccccaagacagctcctttagtcaacgggtctgagtacacattaaaggagggtggagggagaggggacatagagagggaggaaaggggaggagggcaccaggaagggcggagccaagggagtcctgggggtggatacgcacctgcctgtaaggggccctgtggtcctggcacgtgcctataagaggccctgtcatcgtgtgttaggttgtgacacagctctgccctccccaggtgccttttctgaaccaggaacctaagaggagctctcccaccagggccagggaaggagggcaccaggacgggcagagccaagggggttctggaagtccccggccctggtgggagagctcctctcttaggttcctggttcagaaaaggcacctggggagggcagagctgtgtcacaacctaacacacgatgacagggccccttacaggcacgtcgtatccacccccaggagcacacagacagactctcgtccacatgccctgtctggggacaggagcccagcacccaatgcttgttcctgcttccacccctttgctgacctccccactcatcagggctgcgtgccaggtgaccagggttctaaccctggcttcctccctgacccctcctcctggaaacatccttcctgacccagcctcagtttacctcattgaagggtgaattttaaggacccattcagcttttatctcctgtcactccatagacatcaagacttaacatcccatccctcccactcccagctgtcattccccccccccaatcttcggcccactccctgtccaggggcccaggtccccagcgcgggcaacccctctgtccccattcccgggacctggagcccgcgagggctcaggccggccaggatggagttctctatcccagttcaatttcccccgcctttttgatgtcacatcctgtcccagcctgcttccccgccggccgccgccctcctccccgggagagagcgaggcgcgcgggtccctctgcgccacccccgcccccgccccttccgagcaaacttttggcacccaccgcagcccagcgcgcgttcgtgctccgcagggcgcgcctctctccgccaatgccaggcgcgcgggggagccattaggaggcgaggagagaggagggcgcagctcccgcccagcccagccctgcccagccctgcccggaggcagacgcgccggaaccgggac

SEQ ID NO: 43120 - DNA, 2300 bp, Homo sapien
tcatgacagggagggtggtgcaggctcgtgccaggactcagaaaggggtgggcaacctcctgtccttcccacgagcgtggaaggcaagggcccatgaaatgtcttctggcggcctctgtggctcgtggaactgtgcggacagccagggctgctgtggccatgcaactcatgccacttctggggctcgtgagatttaactatggccatgacatttataagacgaggatgccaccatgtgtatgggcttagccctggaaataggctgtcaccatatgaccttggacaggtcttatcatctttctaggcctgagattcctcatctatacagtggagtcaatgccaccacaccatgcacttcagtaaggattgggtgccaggcatggcaaagccccagtgccaccaggggcgcagcacctgccccatcagcatccgtatgattgttcagagctgcaggtgtgatgagccctggctttaagagaagtcgtgaagaaattgggattgaaagtcctctttaggaacacttggtattgcctggcgccatggatcccctaatccaaatgccttcattcttcaacgatccatactttccttctggaatgctccatggccttctaaatccaattacacttactcaagccttatctgacgaccctttcaaaaccattatgcccactgaatcacagattttagaaactggacaggacagtttggagcaggtgcaggttggagccgctcaggtgcaggttggagccgctcaggtgcaggttagagcagtccaagtgcaggttaatcttttacttcgttaaataaataaatgtctatggcttctgagatggcctgacagttttgtggattggattgggttgcatttgaatttgttcccgcagaacaagtggtccttgtccttccgcagcgggaagcggcgtgagtgatctggacagacacggcttgtggccttgaatcggtgttaaacatgcatggccagaggaggggggcgaagccagcccaaccggacttgtgtctccgcctgggcccagtctgtgagccgggcctgcagtcccagcttacactgggagatggcgcccttccccaacagttggaatttcctggcatccgacccagcccggctgcctgagattacagcattaatcagaaaagcagatctgaggggctcatttaactagcgggtctcacacccagcactcaggccaggatcatcttggctgcagctgaagtctcttcagccgaggactgcgcacacagagagaaaagccccaggaaggcgttgttcctctcaggcgggcgccagggaggcgcgctccttccggcccggcgtccgtctttcaaatcccatccaggaagggagattaattttcgcccaggcagagaagagtgtagtgagtgatctggaggattctttccttcccaaatggctgggaaagcttaatggaaggccccggaggaagtggctttcatctccgattagaagccttctgtaaatgcaaaagccctattaacgtgtttgacccagtcaggcctgcgcttcaggtgggactgacacgcgtgagtcctgctgcggtcgccgcagagggccgggaagaggggcagcgtgcgccacttgccctgcctctgtgcctgggcgccatgactcgagcgccacccctgagtcagtaaggacaccccccaacccacacccctccaccacagaccccagtccccgccccacacacccacctccccaacaccaggttcatgggcgtggtcccttcagctcctgaggtccaggcctgagccccagaccttatgcagctcctgccgggtgtgcgccctcccagggccctcactgcgcaccgcgggccacggcagaccaccccagcccccgccttgctgtgcaggtgtcaggagtgccggttggctcccttcctcccaagcaaggccttagggcaccgcggctgccctgggatcgcaggggcgcctttagctctccaccgatgccccgacgcccccctggcgctggaggccctcgcgagtctggctgcttttcggagcctgccctgcctgctgggtttcaggcgacggcccaggctggctgggaccctcgaatcaccgcggaaaagggctccagtaggcaggacggcgccgtctctctgccggcaacctttgccccaaagcggaccctctgcggggatcggagagggatgccccggcgtgaggatgggagaagccccgggacgggagggccgcgggccgtgcccccagctggagtccccgcgccgccgccgggtattttatgatctggg

SEQ ID NO: 43121 - DNA, 2300 bp, Homo sapien
ctgccccatcagcatccgtatgattgttcagagctgcaggtgtgatgagccctggctttaagagaagtcgtgaagaaattgggattgaaagtcctctttaggaacacttggtattgcctggcgccatggatcccctaatccaaatgccttcattcttcaacgatccatactttccttctggaatgctccatggccttctaaatccaattacacttactcaagccttatctgacgaccctttcaaaaccattatgcccactgaatcacagattttagaaactggacaggacagtttggagcaggtgcaggttggagccgctcaggtgcaggttggagccgctcaggtgcaggttagagcagtccaagtgcaggttaatcttttacttcgttaaataaataaatgtctatggcttctgagatggcctgacagttttgtggattggattgggttgcatttgaatttgttcccgcagaacaagtggtccttgtccttccgcagcgggaagcggcgtgagtgatctggacagacacggcttgtggccttgaatcggtgttaaacatgcatggccagaggaggggggcgaagccagcccaaccggacttgtgtctccgcctgggcccagtctgtgagccgggcctgcagtcccagcttacactgggagatggcgcccttccccaacagttggaatttcctggcatccgacccagcccggctgcctgagattacagcattaatcagaaaagcagatctgaggggctcatttaactagcgggtctcacacccagcactcaggccaggatcatcttggctgcagctgaagtctcttcagccgaggactgcgcacacagagagaaaagccccaggaaggcgttgttcctctcaggcgggcgccagggaggcgcgctccttccggcccggcgtccgtctttcaaatcccatccaggaagggagattaattttcgcccaggcagagaagagtgtagtgagtgatctggaggattctttccttcccaaatggctgggaaagcttaatggaaggccccggaggaagtggctttcatctccgattagaagccttctgtaaatgcaaaagccctattaacgtgtttgacccagtcaggcctgcgcttcaggtgggactgacacgcgtgagtcctgctgcggtcgccgcagagggccgggaagaggggcagcgtgcgccacttgccctgcctctgtgcctgggcgccatgactcgagcgccacccctgagtcagtaaggacaccccccaacccacacccctccaccacagaccccagtccccgccccacacacccacctccccaacaccaggttcatgggcgtggtcccttcagctcctgaggtccaggcctgagccccagaccttatgcagctcctgccgggtgtgcgccctcccagggccctcactgcgcaccgcgggccacggcagaccaccccagcccccgccttgctgtgcaggtgtcaggagtgccggttggctcccttcctcccaagcaaggccttagggcaccgcggctgccctgggatcgcaggggcgcctttagctctccaccgatgccccgacgcccccctggcgctggaggccctcgcgagtctggctgcttttcggagcctgccctgcctgctgggtttcaggcgacggcccaggctggctgggaccctcgaatcaccgcggaaaagggctccagtaggcaggacggcgccgtctctctgccggcaacctttgccccaaagcggaccctctgcggggatcggagagggatgccccggcgtgaggatgggagaagccccgggacgggagggccgcgggccgtgcccccagctggagtccccgcgccgccgccgggtattttatgatctgggggtggtggtgtgtccgtctcctcatgtcaccctgatcccaactcctgggcggactggagtttgcagacctcgctgccagcagccagggggcggcggggagccgagcgagaggaaaaatccacccatttcctgggcggattgcgtcggtcccgcccggccgagccccgcctcccggccgcggcccccgcgcgcagcccgcgcagcgctcagagccggacggcgcttcccggtggcggcggaggagcccggagggacgcagccgggcaaggcagggcgcagggcgggcggcgcgaggcgcagggcgcggcgggcagaggccacctggccaccttccctggcgcccggggaaggcgcggcgatggccggggcgcgcggggcggcggcggcggcgggcgggcggcggcgggccgaggg

SEQ ID NO: 43122 - DNA, 2300 bp, Homo sapien
cctcctcttccccctcatcctcttcatcctccttttcctcctccctctccttcttctcctcctcttcctcctccctctccttcttctcctcctctgaggctgggtgtgctttcccttcatgctctccctttccctacagaaatggtcatttggggcagggagaagcatagcaaaggttgttctgtgccttgaaaggactgttgcccttggcagtagggaggccaccactggccctggcttggcagaagccaccttgacaggggcggcctgagtggtggcagcagcatacactcgcccccaagcccccgtcagtgtggtttggaagccaggggtctgagatcctgcgctgcccgagccaagtcgaatattagctgggaagggacatcgttattggcccttgtcattctgcagctgctgcaggtaaatcacattagccaaagattagctgaattgatgagggccattctggagcaggaatctctcagggcagttttcacatctgacctaatctagccatgacaaagcataccatagacttgcagggaaaaaagagagagatgccagcctcctttccacctcgtgggaagtgttctgcttctccgggtaactctggacattaaaactggtgtttgtttgacctaaaatcatagatacagatgtgcagccaggtagagagatgcccacagttgactccatctcagtgcgattcgactgaaacgttatatgccgccttaatgaaggtatacatgcattttaattagaaatccagcccagatgtaaatgaacaggtcaaattacacagcctcgcccgactagaaactgctggtgtactctgtctctgtcttcccgtcctttttatgctaatgtttttcttcgatgtgctccctgcatgaggcaagaactaattctcttttaaaaatgatacattaaatagatgaaatggcaagctaatgaaattataaatctatattataaataaaataatagcaggcccaatcctgttgaggtgaaatgagccgattgtgctcatcagaggcagttggacatttttgtcctcgcatctggctggtcatcatgaattactctggagggagagatgttgacctgtctaaccaaaaaagcatttatgtctctgagccagcactcccttctctgcggccagcagactcctctaacgaggggggtgtcttcagcaactgggaggtagctcatcttggcaaacgttgttgacacaggcatctctccgagtttccaattttggggtgctgtggctctgggggaagaaaagcaagcgcttgcctatactgtgctaaaccgcattaaaaaaattccaacagaaattgtgacgagggaatctcaataactcttaaagcagtttgttttgactaactcgagcattacagtgggatttttctaactgaccatgcaaatatgtgtttcctgatggctgtctgtttcaggcaggctagtgagctagttcttcaacggtatttcattttcttacttgcagggctaacttaaaagagttttttcaatgctgcagtgactgaagaagcagtccactcccatgtaaccatgaaagagagccagagagctttttgcaccatgcatttttactattattttccaatacttagcaccatttcactaaggaaccttgaatacaaccaggatcctcctttgcatgcgactgtagctgcatttcatgaatagtttgaacccttgtcaatgcattttttgaaaaagaaagaaaaaaaaaacttcgtgtatgtgactcaaagcatgtaaccttaagatgttgcattctaaactgacaataaagacctttcccaaatatgctggtgttctgaggactgtttaatatgctcttctaactcatttggaccagaacaaataagcctgtaaataaagcgggaatatacacactttccctcacctagggagaagccaggccaaggcagggtgtgagagttcttgcatgcatcgcactgaaccagcttattttaaccttgcaggcgataaaagcgaaaatggatgaacttaggcctttgatacctgtgttggaagagtacaaggccgatgccaaattggtattgcagtttaaagaggaggtccagaatctgacgtcagtgcttaacgagctgcaagaggaaattggcgcctatgactacgatgaacttcagagcagagtgtccaatcttgaagaaaggctccgtgcatgcatgcaaaaactaggtaggcccagtaccctgcgggacgtggcgctgcactgcccacctccggcacacgcacaggcttag

SEQ ID NO: 43123 - DNA, 2300 bp, Homo sapien
gagctggagagggtgatgctcagctctgagccagtggggcccatgcaggagggaagagggagcccttggcccacggcagggtgggcctggggcagagccgccctctggagagcagaactgcaaggtccagggtgggcgggatgaagtgggaggggtgaagaccacgtccacttgggctcgccttttctgcacatcctcaggctgaatccccagtgatgcctcctgacctctgtggagctctgactctgtggcaggtgctgtcccaaaagctctctggtggtccctgccctaattctcacagcagccttccgagggggcactgttgttattagcccatctatagagaaggagagggagtacacagcagcccccagggaagagggtcaccctccctccttcactgagacagagagtgaagccttcgacttgggaggcttttctgagcaatgagtcattcgttcattcattaattcattccatacaaatccccaggctgagttttggaggaaacagggtgagtgcaggaagcttcttccctggggcagtaagacccagacattccttggcagccccatgagatgtacggtgggaagctggctccggctgcagtgaggacaggcagaccaggcaaagtgaaggaagggcacgtctttagggcagaggtgtcagtttggggcaagccagtgaaggtgggtgggaaggtggggctggggccggcacaccaggtggagggacagctggagcaaagctgcgtgaaccagcagggcggggctctggccaggcggcggagaggagcccagcactgacttgctgcctctggcctctgccggctgcctgcaaggtggagggcagacacctggtctccttccggtaggtcatgcgaccgggatgagtctgctgcgggtgtggttccgggcgttagtgtgggccagcgtcacggaaggcccggcgtgttgactgaggaggctgaagtggccagagcccgtgtgcgctgctggatggaaacccagcatggggccgccactcctctaggcttctccttccggacaactaacagaaccacggcgtggaaagtcctcacgggatgttcacagggccaaggcactgtcttaggggacaccagcctctggatggcagggagggctggagaggggctgtgaagggcttctcccagcgcccacccagtgcagagggagctgctgtctcccccgaagcccagggccccccagcagccggagggtgagcccagccatggctcctccctcccacctcctgcctcctgctcctccagggccttagtgaagccgccctgagctccacctctccgccagcgagttgcactggggtgaaaatctgggccgggctctcctggaagaggagtctcttgtgagacttctcagaccccccacatcttcttacttctcgtccccatagacgccggtcagctgtggccatctcctctccatccctttcttctgctgcttctcctcccacagatggggagcatggcctggcccagagcccgtgtggaccacggccgagaagaccctggcagcctctcacccggccccactgccaggaagcctccagccatgaggggacaatatttacttgggaaagcacataattcctcctgaaagtaggaatggggaactacgcacggaggaggaagggagggaagggctgtgacatttcttcttccaatcggggcagaggcggcagcccgggagccaggttgccggggccttggagcaatgcagcccgactcgatgggaatttgggggcaaacccagtctttttctgtgggcagtgggctcctcgtccctctgaaagccctggtgcccggatgcacgctctcccaccaacccacagaatcggagacgcctccatgccggcagggccgggagcgttcctctttctggtcttgtgtgatgccagtaacaggccacttccagttgggagagagtgggaggcaccctgagacccgcgctgagcatgggagtggccaggccgcgtcctcccgggggccagcctggagcctgccccaccctgcttgccgacaggattatcctggctgagccgaggtccgggcgcactcacccgcagtcttcccccacacgtggatggcctctgaactcgtgtgctcgtgcaagcccaccgagggtgccacgcagacctaggaggtcacaggcgggcttggccgggagggacagggcagggtgcggggacttgtggtggaggggcccttcctctaccctccccaggaaagccacccacttcccatccagggtccctgttag

SEQ ID NO: 43124 - DNA, 2300 bp, Homo sapien
gactgccctcgctctcgatagcaccccgtgcttacatcacagccctgtggacaactatgagcaggacctggggcccacgggaggatcacacagcaggctgggtggagggacagttctgtccagccctttgggactctctgtaatcccagcccacaaacctgccaggcacagctgcctcggacttgggtgttgagacccagctcctccatatggatcctggcccctgcactgccccctgtgtctctggacaagttctcacccctccaagcctctgttttctcatctacaaaaaagacatgtcaccacatggttgtggaattaaaggagaaggtggcacccagcgctgggcaagtccctcactggtggcatggcctgagcagggccagggctcgtacattcatagttttctcagagggcaaggatagctttccccagcgggcagtccctccggatgtccagccacctgccccatcccagcactgggcctcagctctcaagaagccacagcagaggatgctgctggcagtgctgaagttagaggtctcggggccatagtcaaacgttctcacctgtccttcctactggtgttcctattcctcggagggaagtgtccatgtccttggcaagcccggccttgggccatctggctctcagtgacaacaggaggagtgaggtgagaagccgccactggacacgctgaactgcattctggcctttgtcacagcctgaggcctctggaggccgatgtccctgggattacacggtgctaattattctggagctgactggagcccagaaagctgaaggcaggaccctgagtctcacatatgggtggaaggcttggctatccttacattccgctgggagggaagattccagaatgaggctgtggttgtgttgcctgggtcaagtccatttgaaagtcccccagaaggaagtgggcttctcttccaaagagaagccctcctgctggtgaggaagcagccaagttccaagagccctgcttagggctaagcctgtcccaacacaacggcaatgagcagacccccccaggcaggaggttgggagggggtggcccatttccactcctttgtctccaaggcctaagagtgaccatcctgtgaccccacagaccttgtgtcgacctccacccccaggatccccatagctttccacgccttggcatacccggtcagcagcacacaggctgagaagggtgtggaccatcttcaaggtcagctgtttcagcccttccctcagggagcagaaggccaccccccggctggcacacccactctgcccttcccactgtggggctggacagctggttggctctctgaatgtcaaccctggagcagggctaatgacagccacctgcagcttcttctccagaataaagaatgggactcagcaagtgcttggcccataagtgtgtgataaataacagctatcactattatctagttataaaagcaaatgccaagaaaattagcaggtgcctggtgccacaatgccgctgatatgagggccattccaggatgcagctgaatcatcagagtccagttgacccaaaggccgagccactgggcaggaagggtccccgtgggctggagggacagggtgggtctcagtggggtttgatgacgtcctcaaggaagcaatggagtgacagatgagggacttgggggctaagagaacagagaggcctggagactgtggtactttgaacatggtgggggtgctggtgcaccagaaggtgggggcaaatgagggcccaaccctgtgggaagccgagggctggctgagttcatcctgctgcaggctgcgtgccccagcgttgggttaaccctgccatgccccaccctccccggtgtccaagagctctgtgcatggccgctcagcagcccagccctgcctgtcctcccacagcccgaccaaattcaggtctgagtgggttctgggggctgtgtagaaggaatgcaagagtcacacttggggttcctggctgcatcccagacctcactggcgcacgaacaccatccacaggtgcacacacgtgacgctcctccactgtgttgggcagagcaggcacaggcatccgtacgattcaaccaccaagcaagccagaaacgagtgctctcaaaacactggcactgttgcagcagggttggttggaggctgaacattgatggcaacagttggtgtgatggttaatactgagtgtcaactggagtggattgaaggatgcaaagtactattcctaggtctgtctgtgagggtgttgtcaaaggagattcaca

SEQ ID NO: 43125 - DNA, 2300 bp, Homo sapien
tgagattctggaaattcctttctattttgcaaaaagaggagccaaggaccagcaccagaggggtggcccggggcccaggcacccacccaactgagctgcggcagagggcagcgggctctctgcaaactgtaacaagttggctctgtggccctgtctgtcagaggaggaggctgttcccaggagacgtgggctccacgggagacgcgccggctgcgctcagcggggagaggttgtcgctccagtccctagtggaggtctgtttgtgcaggaagccgtcatcagcagagaggcttttatagaaagcctcaccattccccctgcacctaatttgagatgaaggaactcatttgctacggaaggctctagaaagtggctgctggcatggtggcaggtgtgtggggatgggagaggtggcaagaggtccagggacccaggcaggatggccacttatgggtgtccaggcacccacagctgacccatggggcccaagcaagaaggacgccaaggccacagcgggtggaagggacctggtgggagacccagctgaggacagcagaggctgaggacagcagaggctcagccccacttcccctgtggtccctcacaaagcccctccctctttccagactcctcccctcagaaccttctccgtccgcccaccggccaaggctcagagggctctggggaaggcgtgcggggtggcagggcccacccagggtccgggtgcacctgcagggcaggccccgagctgctcacctccctgctttcctcagcctcgaagcagccagggctcctgggcagggcgccacagcagcctctatttacccctctgtaaaatgggaagaaagttctccccaggtgaggctgtctcatgactaaatcagacactccaagctgatgctctgaagccacaggtgtccctgcatccccatcactaatactgtcctctttcctaccatggacagggggctcagcgcccaggaaaagagctccacacttttctagcatcccctcgggagctctggttccatagaagggggctcccagtgtccgatggggctgagcacagcatgcagctggggcccccgtgtcctagggatccgagagcacactgttgggcagcagctcctggacggggcccaccagcctttgtgcaaaccaagaaggagctcgtcccctggtaccagggcacccagctggcaagcacaggtggctggaccctggctccctcattggcacctgcggggccacatcgtgacctttgtgggccccagacaccattccccctgcacctgatggatccatcgctttgcccagccttggctctcgaggtgaccttcaaggactgctgcaaggactgccccgccaaggagcctggcacaggctgttggacacaaccccaattactgacaggttcgcaaagacacccaagctgcagggccttggcagacgggtaagcagcctgatctcgtccagaaatcttgtccacgtgcacctcccgggagccctccttcggagatggccgaggcctgatgccccagaagtcactgtgtccagctcccacctctcctgcccctcaacccctcagttcctccctgggaaccacctgtcagctgccccagcctggatttgtgttttcacccgggagtgactcggggcctctggtggcctggggagatgggggagcttcctgggtccaggcaccagcagtcacctctgtccccaaggaaggccctgccaaagggccgggcaccaggtgctccacgtttaggccaggactagttgatggctgcccaggctcccaatgacacattcccctcctccggggttgtccctgctgggcctctgtgccagctgacagccagaagtctggtgatcgagcccggtggggtctctgcctggggagggatccctgggttttgtccccatgcagtgggggctcaggaagtgccccccagcttcctcctgcctctcagcattcccagctgccagcacagagaggctgggctcaagtcttctccaaggccagtgccaccctccaccaggtcccactgagcctcatggggctggtggagccacctgcccacctcagcactgcatctccagccagggctgagtggcagtgtgggcaccgcggcccgggacgacagcctgggctcagagtcaggcttgtggcttcgcctctcagcttgcgtctcctcccctgtgggatgggggattccgtggcacccccatgatgaacaggatgccatgggcctcagcccagggcagacctcagtgtccttcctgtggccgctgct

SEQ ID NO: 43126 - DNA, 2300 bp, Homo sapien
caagcggtcacacggccacgatggaggcttcggctgattctcggggggccctggagcatggcagcccctcagatggcccctgtcaaggaaattggccggacatttacacctctaaaccccctgcacggccattggacgtgggctgcccctggggaacctcagcccgggactgtcatttgggctgggcagccggggaccatggagtgctcctgccctgaagggggcccagacagctgccctgtgtcaccccaagttccccaggaccctccttcctggggaagcagcaactggaatcttttacttcagaaactctgctaggagctcactttctccatctcttaggcaaagagttagttcacttgttaagtctctctgagaaatgttatctcaaccatgttcagtggaagaggctgctgaagccgtatcagaaatgataagctgataagacttagctatacaactctgaaatagaatgttggcaatcaaggttaaaacaatggtgaatgtgacgaggggaacagattctggtaaaacctctcacgaggaggtttctgcactcttgttaaatgaacgtggtgcagagtaaaaatgagaaaggtcacgattttcttgagtctcaaaaatttcccctagatccatggaaatgattctatttcagttttcctttggcagaaagaagagggactctaccgcacgttctgtgagtcttggaaaggcattacagaacgtttgatatttttgtataaaaacctactcatgatgtcctgaatcactttattctgaggtaggggagggtaaggagcctccgcaagtcttgatacagatttgtagtttctggccgggcacagtggctcacacatgtaatctcagcactttggaaggctgaggcaggcagactgcttgggcccagaagtttgagaccagcctgggcaacatagcgagactctgtctctaaaaaaaaggaaaaaaaatatgtatacgtatatttatatctacgtttgtagacccagctactcgggaggctgaggtgggaggatcgcttgagcccaggaaattgaggctgcagtgagctgtgattgtgccactgtgctgtagcctgggcaacagagcaagaccctgtctgcaatatatatctatagttgtttttgtatgtagcagtttggcactgtacagaaaagtagggctgcatggaagctgtacctttcaccagcccaggaccatccaaggccagaaggcattgagggctgagcatcgggaagaggcaggtgtcccaggcccctctgtgccccagaagactctgcctagcttcaacctaaggcagccttcaaaaccactcctgccacagtgcagcagtatttcccggggagaaacacctgcccacttttctctcagcctggtggtcatgaagggagatggtaaggtccgctttgacggatcatgacaccccgagctcatgttagaaagggaagggagatggcctggggtctatctgtggccacacacaaagttggaccttaggatgggctccctttgccacctatggccttcagaaggtcccatctgtgatggtggctccagtgaggagggagtccccatttccaagggtctcccttgcagagatggccaggaaccgagggtgagcacaaattgggggtgggcacagcctgacgagggcagctgctttgggtttttttcctcccttgaatcagaagttcagatgcagcgtttccctgggaatctgggcttttaatttttctcttttcctttttaagttttttatcagcagtgttttgtttcactgccccaagtggaaccgatgagcggggtgctactgtgtggttgcccccacatctgactcacctcagtgcccaggatgggagcaaagcacaggtgagctgccccgccaggcccctgcggagggggtgcatgcatggagacagctgtgggtgtggaggtaaagcactcccattccaagcccattgcccagaggggagagctgggggacagaggtgaaagcacttccagaccaagcccgttgcccggagaccccttcttgtttccgtggcagcagctgctgacctttccgacctttccacctgcgttctgaaaccagcgtctctggttacaaccaaagaggttgctcagtcacactcctgaaaggcaaaaggaggttggccagtaaaaaagatgtaaaccctagatgtagttcttagtgtggaagccacaggagaacttccaatgtggccacggggatcgccgaggcttttatgcaggtaactgagctgggtgaccagctgcct

SEQ ID NO: 43127 - DNA, 2300 bp, Homo sapien
atgtacaagagtatattgtactactgtacaatattctgtgttattgtactgttgtacaatacactttttttctgagacagagtctcgctctgtcacccaggctggagtgctgtggcaccgtctcggttcactgcaacctccacctcctgggttcaagcaattctcctgcctcagcctcccgattatctgggattacaggcacccgctaccacacccggttaatttttgtattttttagtagagacgaggtttcatcatgttagccaggctggtctcaaactcctgacttcaggtgatctgcccaacttggcctcccaaagtgctgggattacaggggtgagccgccgcgcccgaccatacattgcatttacgctcttgtacagagtagcatacagcacagagaagagctaaattccttacggtaacaagctcttagaatccctaagaaaaagacacacagcccaacagaaaaataaaaaatgggcaaagaacacagacaggcaatattccaaatggccaataataaaatgaaaagatgttcaacatcaccagcagtcaaagaaattaggattcaagtgatgaaaagggctgtttcgcctatcagactgccaaagacataacgcaatgacatatctcagggctggcaagaggacaggcaagcgggcatgcccgctcaccagtgggtggacggcaggctggccccgcatttctggagggcattttggcaaaatgcagcatagtctttggcccgccggcctcttctagggatttgcccgcaggaaatgctcagagccgctctaaggaggcatcatgaaagctgttcaccacagcactgttttaaaaactgtgaagcagcatgccaaaaccttaacagcccatgtctctgggaagtcaccttattaattagatcatctccccaaagtttggtaatgaaagagtattatttcatgagaaaaaaaaaattgctttttgaaaaaattcacgaaggcattaaaacaattctttaatgggtttcctgacccaaaactggccctccagcttcccaggctggcatgactagaagcacccctccaaggcaagtctctgattttgatcctatcaaatctctgacactttctagacaggaaccgaacccacaaattcatctcccagacacgtgtggatcagggcccagggggcttacagaagcagcgcggtgcccctgcgcaccatctgccccttccacgagtgggcgctgagggaggatccagtcgggtctgcccgttccccgccgcccggggatgctgagcacacccgggccaccgccagcctcgggcacacaccctggaccttttataaaacaaaactgggaagactttcaaggtcacatggtcagtgcacagcagaagcagaaacagcagcggcctcaaggtccggggcagttcctagaaactgttccctcccccgaacctggcggcaggtgtgctcgaggagccgccgccccgggcaggtcgtgcgtccactccccgccgcaagctcgggtggggcagccgcggggacacgcgggggccgcccccgaccccggcccaaggctgtggggctggaggggcgggcgggccggtctcagcccggagccccgcgtgaacttcggggaggaactcggttggcgccggggccccgcacgctcccttcccgcggctccgagcgctttcccacggccacgccccccgcgcccagaacttcccggcgaccccgcgccccctgcgcgccccccggaggtggccgcggtacgggaggcgggcagcacggggctcggcccggcccaagcgccttcgccccgcaccccgcggagggggccgcgtccgaaccgggcggggcggggcgggggcgtccccggggcgcgggcgcggcggcaggtgggcgcgctctcgcgggcgggggtccggccgggccgcgcgcctcccccggaactcggccgtgccattcccatgatgcccagccacgggcacggcttccggagtgcggccgccgccgccaccgtccggtaggtcgcggggagggggcggcttgggggggtcgccccgccccccgccccgcccctcccctcccgcgcttcccacggcgcggcccgggcgcggggcggcggcagcggcggcgcgcggggaggcggggaggcggggggcccggccggacgcccctgcgccccctccccgcgccccggccgagggcggagcgcgctggccctgcagcctccggcccgcccccggcccgccgcctcccccgggacgtgggacgcgggcgcaggcggggtccgcgcggcg

SEQ ID NO: 43128 - DNA, 2300 bp, Homo sapien
tacttgaaattctgtgagtccaggttgactgtgatgaaatggcagccagtgttcccacacggcccagagatcaggtcctcatcactccacttacacaccgaggcattctctctctgctttttcaatagacttttgactaccagaatcaaagagaatcagaggcatctaattacaggctgaagctacagttgataaattttttttttttggaaagaaatatcattaacttaagggctcaaaattaacttttgaaggaacttactctaagacatttaaccacaagtacaaatatatttaacttaatgtattaagacaaatacatttaaccacaagtaatgtatagctatcctggacagcagatctgatgctggctgaagtgatggggatggggcacgtatgtgacgttatctgctagttctcaaattctggccacccactgcagcccatgacatcccccataaagtcaccttctggagagattccccactgacacagagcactgggggaccaacaatgcgagaggagctctttcactggctagcaaacccacgcctgccttactgtaggtgttattcaaattgcctctgcaaaatgacataaatgacaaaacatttgcattagccttgggctgaggagcgtctaaattaagactattgactccttaaacagcaatactaccttaagaatactaccttaaatactaccttaagaaaaccggcccaagtcagtgtctttacactagatgacaaggtcggggaggggagttttcctggggaaatagtctgttctccactagccacatttacagcttctgactggttgcagagaaggcctggacacccagtgaacagttttctaagttgtcaaatcacctagttcaagaatggtattaaaaaatctggccaggtgcagtggctgacgcctgtaatcccagcactttgggaggctgaggcaggtggatcacctgaggtcaggagtttgagaccagcctggccaatatggtgaaacccctcctctgctaaaaatacaaaaattagctgggcgtggtggcgtgtgcccgtaatcccagctactggggaggctgagacaggagaattgcttgaacccaggaggcagaggttgcagtgagccgagatcgcgccactgcactccagcctaggagacagaacgagactccatctcagaaagaaaaaaaaaaatcgaggggggtcgtctccccaggacagcttgtggctttaaaacattatgcgagatgaatcattcttgaaaagccccctgggtcggggatagtggctcacacctgtaatcccagcactctgggaggtggaggcaggtggatcacttgaggccaggagttcgagaccagcctggccaacatggcgaaaccccatctctactaaaaacacataaattagctgggcgtgggagcccacgtctgtagttccagctactccaggggctgaggcacgagaatcgcttgaaccagggaggcggagattacagtgagccgagatcagccattgcactccagcctgggcgacaaagcgagactctggctctaaaaaaaaaaaaaaaaaaaaaacaagaaaagccccctaatcagtccttagagataggtgtgggcccaagccagaggtgcaggctttgtcaaattgctgcctcaggatacggtcttgagggtggctgtggggacacccagcacctgcaccccaaggccacacggtgtcagattttaggaagcggtggagaacactcgggtaccttctcggtccagacatcaaccttctggagagaaccaaagcacccacactgggccctcgccatcctaacagtctgcccacctgtgagaaacgcccccaaatactctacatttctcggttggccgaaaagcagctcagccagcggtcttacctcccaggtggggtttccccccagggtagggaggccagggtctgcaggccagggagaggagccccggtgcaggagcgggcggggcagcaggaggacccgctccagccacccagaagtgggcgtgggctagaattcagctcccagccttccagaagctgcaattttacaacctcactacaagcgtcccccagcaaagctgcaccgccatttcctgtgcttgggaactgaaggcaaggtgagcccctcccggctgccccggcccgacctcccctgactcccaagcttgggctactcacggcctgcgggctgggcagggtcccccaagggagctcccctccccgagggcgcgctcaccctagccgctgggatcggcgacctggtcctcggcc

SEQ ID NO: 43129 - DNA, 2300 bp, Homo sapien
agccccttggcggagacaccgccgctggtgctcctgggcggcaccggatcccctcgggcaggagcagcagggagccccttcccgccctggctgaacagaccagctgtgccctgtgctcctgcgctctctgtgcctcgaagcccttcggccagatgtgggacccccctggccctctggctgcgtgtgcacacgccaggcggtggggcaggctccttcctgcacagcacctctggcctggctgggccccctgtcccaagagcggtggggccctctgcctgaacttctgaactgctcactgactccttggccttttccgccaaaaacttcctaatctccagttcgatgctgtcgttgctgtccactgaactgctgtcatcagacagggagccggggctgggagctgggccctgggactccctggggaatggattcccttcggaggcagaggcggaggcgggtctcctcacccggaaggccagggccgcgtcctggctcgcggcaccctcctgcctcatcctctctgccgtgctgccaaagacactggggggtttcttcccaggaccctcgccactgtctctcttggacttggagaggcagctcttcagcactggcgggcccctgtctttccagtctctccggagcccgcccagctgctccaagaagtgcgtctgggctgtgctgaacctgaccttcttcctgcacgcagccctgggctccctgcacctcttcttgagctttcgcttggaccttaacaagtccttgatggctgtgtccaggtcctcgtcactgtccagggagctgcttttgtcttcagagctctctttctcgtctaggcgccttgcctcgtctgtcttaccctggccctgtgacatgcgagtgtcgccagggcccctggcggtgccctcccctcccagggcctcactggctttgccctggatgggcaggtctcgcctctcatggccgggctcagctctcccctggctgtggtcggcatcctggctaccgtctttcaccacctcctgcattttcttgggcgtggatggcctcacatggccaccacctctacgcttccttttgcagcccagcagtgggtctggtgttttagagagaggggtcttgtggccgccggtctggctgttgaggccaggcggcaaaagtggaccctgggcagcctgcgggcagctctcacctctggccagcaaactccctgactgcgcctttagggccaaaaatgtccggatttcctgctcgatgctgtcatcgctgtccacggagctactgtcgccgtcagagcgggaaggcacgttcggggagtagaagagtgggcttgcggacagggacccgtcactgccctctacaggggccggcaggatcgtcttggagatgtccaggattgcttctgcacacatcagctcagcagatgtgtccgcccggcacgaggaccgttccacaaactcactcctggaagcagggctcgctggaggtggagctttggtttccttcaggagcttgggggcatggtcagtgtccaggccccctggaccagggtccatggtcttggtggccactagcttcttcttgctgggtgttttcctgtgggtctcgggcaaggcactttttgtggcactgcttgtgctgtgtgcgggagggtcaggcgctctctcctctcggagttggaccctctggggcaggtccccgtcggcctccttgcgtgttttctgcagctggtacagctggatggcctcctcaatgccatcgtcgctgctggagtcggacgcctcggacgcctgtgccgcactcatgactcgctttcccctccttgcagcgctggcgctccttttgatcccacctttattctgtgctgcttctgaagggcggcagggggttgccggcttcgtgctgccctcgttctcctgcgtggttgtgaccttggacctgaggcttctgggctggacgttcatcttcgctaaccggggaggtttgcggaaggcaaactccttctggacgcccagcaggccctgccgatgcaccacctttgtaggcggctcttggtgggatttcaagagtgacttggcggaattttcatttgtgtctggtttcttctccactgacccatcacatttttgggtctcatgctgtctcttctcattcagaaactgttctatttccgccctgatgctctgctcgaaggagtcatcgctgctcacactgaccggggaggcggagccctggtccttgctggatcccacctggctgccggggccaccacctgatccaggtacaagttttgggggacacag

SEQ ID NO: 43130 - DNA, 2300 bp, Homo sapien
aggccacccaccccctgccccccatgcccggtcttgcatcccacttacaggcatctcgtgcacggtgggggctctgctcccgtaagcctggttactggtcctgtacacggagacagccttctgggtcctggtagatgagaaacactctattttcattcatttactctaattctgcacaagccacagccttgtatttggttgacggcactcccctggaaatgcccccatggaaagagcaatatgcccgggctggtgatgtggcctcgaaggcagcctctgggagtacctggctgatgaccgttctgaatggcccggcctccccggccccctctgcttgccactgtccctgctcttccaaggcaggccaaagccctaaagagcaggcagccagcaagtgctgatccccagccctggcagggcctcggcacatgctgcaatttctgggtaacctagcttgtcaggagcggaggcttggcctccagaccctgccacccagagggtccctctgcctctgagcccccaccctcactgaggctatgcttctactggtaccactgcccctacctgtcagtaggacaggctactgagaggctgcaggcccacgacatagctttactttatactcctagatcttggccaagttgttccttctacatcccagtcatctcaatgcgagaatgaggatactaacagaccctgccctagaggactgttgagggaccaaatgtgtgatgagcacggcaagatgtttgcacctgcctacaggaattgagtttcttactacttcttagcctgcaatgccctgtggcagctcagagctggctgagtctacagcaagacagtggaggtgctgctgtgctcacgccccgcagcggagtttcagggtagagaggagaggagactcacccgacacaaatcagtggagctgagaccacaactgggctttctccccccacggccctgccccccactgcccttatccccacttccttgtatgaggctctagggagcacggtcgccgctcactggcgggcgatgacagcgcgggccccggatgaccactcgatcttcttgatttctgtagctaggaccttgggggtcttgcggggtctctcacacacggggctatcgagcagtggacgccaggaccaggcgggccccagcttcctcacctgtagccccggaaccaccccgggttgttgaacctgcccggcaggtccgcgctcacgcggtagtagtcgctggtcctctccggcggggccgtggccttgggcgccacaggctccgcgcacgctctggggcattcctcagccattgtgcctggaggagaagcgggactcggcggcgtcctgttgccaagcgacggccaggtcacgtgactggggagcgagcggaggggccttaaaggcgccgcgcgtgggccgggttcctctgcgggtgggtccggaacctgccgggcgactccccaagggccgggaaggtcgggacggcgagagattccctgctgggaccgtcgtgtgaggcagccccaggcccccagccacccgcggggggaccgggccaccccagcatcagggcgtggactcccgggcgaaagaaaccccagggcctgggaccccgccagccgggtgacggggtttaagcactgcaggtccactcggcaggcaacgattggacttttgctgtccaatgtactccagggatgctatgccccccagcaccccgagtctaaattgagacccgagatctggctaactttatgaaattctcctaagccaaatatcgtttaaatattacaaacagttttggagagcgagaggttgcgcaggacgtggttcacagctcacttggcgggaggcgagggtccccatcgcccagcgggcttccccaagggtcaggggcctcccgggctggccggtcccattagcagggcggggcgagctgcagggcgaggaccgtggctccactccccgcccgagactctcaagcccaggaccccgggccctgacccctcgcgtgccccgcccccgcagggaggtcccagccgcctggggacagcgctgtggctcctccgggcctgtaggcggcactgcggccccgcgcggatggcgacggaaggggaggccgctcggcctggcctggagggagacctcgctctgccccgcgtcccagccatggcgacatcctcggccgcgctgccccgaatactcggcgcgggtgagcgcgcgcttgcgggaccctggggaggagcatgcgaggaggatgcggaggggcgcggggacccgatggagcggcgggga

SEQ ID NO: 43131 - DNA, 2300 bp, Homo sapien
tgatgtcccccaggtctcccctggttttcaccatctcagtaaccagtaccaggctccacccgaagagcaggtgtttgatcccttcggccccagccacctcccaccccagcccaaggcccactggctctgccctgctgcctcatgtccacctgctgctccagctcttccgctactgcgatttaagccccgccaccttcaccctgaacgcccacaccaacctcctccctggcctcccacctgcccctcccatcccctccccccacagcagtcaaaatgaccatgtgagaatacaggaccagtcattcctcctccccgcagcccagaaggcccagcccgatccggggggaccaaccttacaggttctgccctcagcctttccatttctgaacccgtggagtcctgcaacccccagcaggcctgccctatcaagggctgtgagcgccacaccaaggcacacaagagcgtccgccaagctgaggaataaactcctgcttctctgtggggctctgtattcccatgtggaggaggatggggctgtaatcacctaaaactgacataggccagttcaaaagtggccctagaaccagagcaggtcccaggttcctcctgggaaccgccccgggctcagatgggggtgtcacctacctgtgccgacagccagctttgtgtcccagatggactcgggcatcgaagaggcttctcacggaaaacagttccttgacattgaagaagtcagagtgcttgaggggctcattcaaaatcttgtcgttgaaatctacggcagggaggaggagcgacgctgcgtctcccaccggtggcagcagagacaggcagagcgcagttcccgcccacccctgctcccaagtgccttctgtgacaccgaggtggggagccgggagcccagcagccccaggaaagacctggaagcacagggaccttttcaggaaacagagggctggagccaggttctgatcccgaccttgctcctgggtaagcctggtcgaacctggtcaaccccgtcccttggtcttacttggaagacagaggagaaaaagagaggggcccagcgggttgctcaggtctttctggcacctccccgccttgtggtctcaggtggccagccagaaagtccccatcaggagtccagcaaggtgggcagactccaagcccagtgcccccaggtcacttgggcccgcctgggcgagctcggggctccgggcctcggtggtccagtgacacccccctagggagcgaagcctgtgctaaccactggcccgcccgctccctctcaccctatccatggtgaggcggtggcctcagcccgctgtgctacgtcaggcaggaccgagcggcggcgagcacgggagtgggaggagcccagcggagcgcgcagtttcgaccgcgtgcagcgcccaggcccctctagggttcgcatcccccgcggctgccggcctctcctcgttcccacccaactcggctgggcgcccagtgttaccggtgctgtcctccgactcgcggatcataagggccgtcgcgcttccaagcgtcctgcggctcggccgagcaggccggggggtcgccttcccgagaaagcccaaccagcgcgacggggcccgggcacctggggggaagtagatagaggtcctggcgccgagtcccgaatgcaccacgcccgctccccaccgcatccccaacgggcccctccgcgtccctaacgggtcccctccgcgtccccgcgccctccccgagtcccctccgcgctcgccccgggtcccctccacgtccccgccgctccatcgggtccccgcgcccctccgcatcctcctcgcatgctcctccccagggtcccgcaagcgcgcgctcacccgcgccgagtattcggggcagcgcggccgaggatgtcgccatggctgggacgcggggcagagcgaggtctccctccaggccaggccgagcggcctccccttccgtcgccatccgcgcggggccgcagtgccgcctacaggcccggaggagccacagcgctgtccccaggcggctgggacctccctgcgggggcggggcacgcgaggggtcagggcccggggtcctgggcttgagagtctcgggcggggagtggagccacggtcctcgccctgcagctcgccccgccctgctaatgggaccggccagcccgggaggcccctgacccttggggaagcccgctgggcgatggggaccctcgcctcccgccaagtgagctgtgaaccacgtcctgcgcaacctctcgctctccaaaactgtttgtaatatttaaacga

SEQ ID NO: 43132 - DNA, 2300 bp, Homo sapien
tgtgcaggaagatgatgaggtccggcaggcggaccgtggggccaaagaggaggcgcgcgttggtcagcatgccgcccctgaagtagcgagtgtgggcgtactcgccacagtcacgggccatgttctcaatcaggtacgagaactgccggttgcggcttataaacaagatgatgcccttgcggtaggccatgtgggcggtgaagttcaaggccagctggaggtgcgtggctgtctgttccaggtcgatgatgtcgtggtccaggcggctcccaaagatgtacggctccataaacctgccagagaccccaccaaggcaagggggatgagagttcacggggccatctccactggctccttgcaggaacacagacgcccaccagggactcccgggctcctctgtgggggcactatgggctgggaagcacaatttgcaacgctccccgtgtgcatggacagcagtgcagacccatccaggccacccctctgcatgcctcgtctcgtggcttaacccctcctaccctctacctcttcccgaaggaatcctaatagaactgaccccatatggatgtgtggacatccaacatgacgccaaaaggacattctgccccgtgcagctcacagggcagccgcctccgtcactgtcctcttcccgaggctttgcggatgaggcccctctggggttggacttagcggggtgctctgggccaaaagcattaagggatcagggcaggagtggccaagcctgggcggggaaccctgatccaaagcactggaccactgctggcctgggctgagaaaagcggggcatgggagacacccccgcctctcggtgcgtgacaggcgagtcatccacatttgcggttcccaggtcctcacctccagtctactcccactgggttctgtcccttcctctcaagcaaccctgcccatcaaggcactggcgacctccatcttgccaaggtcacagccttgaattcacttctcagcagcatcaacagagaaccacatctcccctacccccggctgtccctcttcactgactccaaacactggagcacccagggctccaccttggacctccttttccgatgctctggaaacacctgccagcccccgatgctgatggctccctgggcccaggcccatccctcctggtaaccgtgtgacctctccactggggcagcaaagggttcatacctggtaggaaccaagcttgtgatgtcccccaggtctcccctggttttcaccatctcagtaaccagtaccaggctccacccgaagagcaggtgtttgatcccttcggccccagccacctcccaccccagcccaaggcccactggctctgccctgctgcctcatgtccacctgctgctccagctcttccgctactgcgatttaagccccgccaccttcaccctgaacgcccacaccaacctcctccctggcctcccacctgcccctcccatcccctccccccacagcagtcaaaatgaccatgtgagaatacaggaccagtcattcctcctccccgcagcccagaaggcccagcccgatccggggggaccaaccttacaggttctgccctcagcctttccatttctgaacccgtggagtcctgcaacccccagcaggcctgccctatcaagggctgtgagcgccacaccaaggcacacaagagcgtccgccaagctgaggaataaactcctgcttctctgtggggctctgtattcccatgtggaggaggatggggctgtaatcacctaaaactgacataggccagttcaaaagtggccctagaaccagagcaggtcccaggttcctcctgggaaccgccccgggctcagatgggggtgtcacctacctgtgccgacagccagctttgtgtcccagatggactcgggcatcgaagaggcttctcacggaaaacagttccttgacattgaagaagtcagagtgcttgaggggctcattcaaaatcttgtcgttgaaatctacggcagggaggaggagcgacgctgcgtctcccaccggtggcagcagagacaggcagagcgcagttcccgcccacccctgctcccaagtgccttctgtgacaccgaggtggggagccgggagcccagcagccccaggaaagacctggaagcacagggaccttttcaggaaacagagggctggagccaggttctgatcccgaccttgctcctgggtaagcctggtcgaacctggtcaaccccgtcccttggtcttacttggaagacagaggagaaaaagagaggggcccagcgggttgctcaggtctt

SEQ ID NO: 43133 - DNA, 2300 bp, Homo sapien
agggataaccctccactcatggggacagagcccatccaggtgggacctggactccctgtgaggctgagtggggtccccacttgcagggtttgctcaaggccactcaccggcttcccacctccaggcctaccttcccaggtcctccctcaggcttcctgggatcagctgcagcaaacaacatgtccccgaatccctgtctgctttcagagacccaaactctgccaaggttccacactggctgtgactggagcagatgtctccaccttctggatacgagtgtcctcatctgtaagattttccttgtgctaaatcatggaaatctttcaagaaaatccgggctttaaacactttcaatagaacaaaagtcgtcctaaacatttgcctctgtgcctctccacattctgttccttatttccacactgtttaatcagtgcgtacacgctgttgtgggttcagggaggtccgggagggcagcttcatgtttgttgattgaatgagccccaaccagctccttcccagatatctgagtggcccttgggctcttcagccctccccagagggtcctgctctgctatacctaggatgggaacctcccacatggaatctggaatgttctctacaggtgggaaaactgctttgcacatacaagtgaggcctagggcagacagcttccccatggaggggagaggaaaatcataaataagaacactacagcccgggcagcccattccccagggccaggcgtgagcagagcgctttccacggcccgtcccacccaggcttgacagcagcctcacgaggtccccttagctcccagttctcacacaaaccaaccgaggctcagaggggtgaaggggcattgccaagacccacagttggtgggtgtgggagcgaggagcccctgtgcggtggagcgggacacgctcgcctgtggaacagcaggtccagcatctgtggggtgggggcaaagcttccacacgtgcccaggaaagcaggaacgaggaacggtcgctgctctgcccccaggtgacgctctagcttctctgtgcagcctgcgtggggactcccaccctgcaggtctcatccaggaacagggctgactcattttcactctggggtgagccaaagggaggacggcccaaacatatgaacatgaacaaaatgcagtcgctcatcgccatcatgtgaattggagaagttcaggaagaatttctgggctattccttcctataggaatatgaaaagtcactttgcacctggccaagctggggctggacggtggtggggtgagggcgggaggaggcctagggtgctgggattgggacttgggggctgctggagaggcagaactctagcaggaccctgggagccacctggtgacatctgggcaggaggccttcccagccatccaggggccctggttgtggagacctcccctgcacacttgcacccccagccagcactggcccttgttggtgtcgaggagtccctgtccctcacttggggagagagtgggggtcgcccccttggccagtctcctgcgtggagctctgcagagacagcgacctaggaacatcagagcccggcccggcccttgtcacttctgcccacctgaccttctgctctccggatcaggcacagagccgtgtctgtgtagacctccagccaggatgacatgagatccatctcaagggctggggcccacatcagcagaggcccacatcagcagagggcccacatcagcagagggcccacatcagcagagggcccacatcagtagctggcccagctggcctcaatcctcatgggccgctaggctcctgccccaacaccctgctcttgcccagggcaggctctcccctcttgtcccctccccccacacacccagggagggttgcgggggatcagagcggaagcctggcctgtgctgacctcagggctgccctgagctcctccaggcaaatagggatcttccgggcctcaggagtgggagtggcccagcctcggcagggctggaaaggctccttggccctccccaccccaccctgccctgagccagctctgccaggcccatcctctggtggctgcctctggtcttccccaccatctgggacaccagctggtccaggcacagccttgccacagtccagagaaggccacctctaatggggcctgcaggcattgtggccacaggaggaaagggccggggggcccctctccccactcctggggcagctcccttgcccttccccagcctcaggcactctcatcatctccgttggcctcttctgggggctctt

SEQ ID NO: 43134 - DNA, 2300 bp, Homo sapien
gtcttccggaaggcagcgttgctattgagaggtctgccatcagtccacatccgcttttatggtatgtagtgtggctcttctttctggtcattttgactttttttctcctttcctggatgatctgcatttcactgtaatattctaggagtggatttctcaattttgatcattccttggtaatttagatctggggtgtcatcttcatgtcttttcaattctgaagaattctgagctattctgttgctttgttgccattttagaaaatgtttttctttcagaactcctattctgtttatattggaacctcctgatctattctccatgtgtgttaactttgtgcatgtgtgtgcatgtgtgtatgtgtgtgagtgtgcatgtgtgtgtgtatgtgtgcatgtatgtgcatgtatgtatgaatgaatggtgtgtgcacgcgtgtatgtctgcgtgtgtatgtgggtgtgcatgtgtatgggtttgtgtgcatttgtatgtgtgcacatgtgtgtgtgtgcatgtgtgtgtgcgtgtgtgtgcatgtgtgtgtgtatatctctgtgtgttgtgttttcagagctgctgcactctagttggtttcctccactcattttattactagctccaggctggagactgaatctatctgtaacacctcaatttctcttttgaatttttctgctttcattgattttgttagtactatcttccatgacactaagtctcttttctactatgtcaagtctggaatttaacctgtctattgagttttttattcactttattattcatcttcaagatttgtaattatttctatttcgtctctccttatttcttatattctggccagttctaattttatactttatatatttttaaatcactaggcatcttgatcatactcctgcagttttaaagtgtgtgtcagactttccttggctggtgtaagttcctgtaccaattgctcatttttagcctgcctttcttagtgtggtgtttccttgggtaatttggaacctggcctttctagcttatttcaaggtgaggatattgtgtctctgcatttctgcctttctctgccatcttgttgtcactgtcctctgtctagcagtgttttgtagcctctgctcccatcccgggtcccaggcttctgctctgcagtgatgcagagcatgtcacagataaagtcatcctttccaaggacggcttgtctcagcttctgcccttgaggctgtgttgatgtcctcttgccttcctatgcccacagtgctccactaagttatacgaagttacagccctgggatgtgtcaaggagggtttctcagccttctttctggagtcagggaagcccctcccatcactcccaggagccggacctaggccctctctgcctgccttgggacttggagctgacaggcccctgcctctgccccatcaccagcctgtgcttctcctccattccttgttttatgtgagtgtgtgtgcgtttgtgcatgtatatatgtacacacatgcatacacacacacacacctgtcttggtcttctgtctgtctgacctattgctgctctgtgtgtggagcagagagggtcgttactgcacaccttgctcaggacagtggacaccgtctttaaatgcacacgggatcgtgttcacacaggagggtccctttttttccatgatgaatctgaggccaagtaacctgcccagagatgcaggaagctcagctgagccccaagcccacggccctcggactccaaccccaaacccccttgacagtgtgcacgtcagcaagtgtgggatggctggggggcatctgttacggctgcacacgtccccaggaggcctgcacacccttcactcccttcagtttcccttcaggtgaaatctgcaaatctgctcctctggacctggtcctgtccaagtgatcctctgggattaacaagctgttattcaccagcctccaacaataatggcaggttatctgctccattgcagaactggcagtggtttacatccaggaagggattggtcagtctcctgtgccaggtccctgggggaccctgagcccagcggtataaagggcggctgtgggaggactggtacagcctctcccagccccagcaagcgacctgtcaggcggccgtggactcagactccggagatgaagcccctgctcctggccgtcagccttggcctcattgctgccctgcaggcccaccacctcctggcctcagacgaggagattcaggatgtgaggcccggatgggaaggctgggctggagggggcaaggggcgaggctg

SEQ ID NO: 43135 - DNA, 2300 bp, Homo sapien
gttatcccgaatgagtgttgaattttgttaaatacttttaacaacccaacaggaaccaccatcagaagccatccagagaaacgcaccaggccacaaagcactgggggccagggatcttgcccctgctgtctgccatgggttgacccccagcctccaaccctaccatcccctgacggtgtctgcagcagttgaacccaaccagcatctaaaagaacacagttggtgaacgagactgggacacagggcaagatgggtggacaatgggaggctcctggagagcacccgtaccagcgagcatagaattcatgggggtgacctgttccctgaagcatctgcgcgtgttgttccagcattttcttcaaggattgagccagcagcaccagtgtcatacggtgcttaaatcaatgattcacaaccaaccaatgaaatacaaggtgccggctgggcgcggtggctcacgcctgtaatcccagcactttgggaggccgaggcgggcggatcacaaggtcaggagatcgagaccatcccggctaaaacggtgaaaccccgtctctactaaaaatacaaaaaaaaattagccgggcgtagtggcgggcgcctgtagtcccagctacttgggaggctgaggcaggagaatggcgtgaacccgggaggcggagcttgcagtgagccgagatcccgccactgcactccagcctgggcgacagagcgagattccgtctcaaaaaaaaaaaaaaaaaaaaaaaaagaaatacaaggtgcctggggtacaggcaacaaaaatggggaacggagaaatcttcccgttgaggtagagactccagcctgtttgctcatctctggtcctgaagagcccagtccccgccctaaggatggggtttctgctcggcagcacttgccgtgagaggggtgaggcactgggtcacgccagccctttctttatagcccccagggtttattagagtgtgcattagtattatttagcaagcacttgagggtgtctgatcttgggccagagaggcacaaagattgtgtgggcccagcacctgcctgcagagcgtgggtcagccttgggtcccagggcagatgacgcaggcccgggaactacagggtccaggagggagaaggcaaagttctggctcaggttggctggggatgaggccagcggagccaggtgcccaagggagctcagccacaaactctgagcacaggctggcaggtggctcttgatgctcatgccacccatttatctaaagggatgagattcaaggcctgtcccggtggctgggggccgtcgaagctgacgagagaggggatgtagagtgaatgtatattccactctaccacttgtatttaacagggagatggatgatgaacacgtgcaggaagaaacaggcaggacaatccagagagatcacgtgttctgaggacagcacagccaggctccggtacggagtgaagcggggtggggcaggcggcggggtccctcatatggcccgaggaggccgtatatatactgaccttgaaccacacaatagtgcccttctctgcccctaggaagctcgagtgcagggtccaggtggggaaaatcaatgcagagtgggtcccagagtgggcggaagcttgggctctagggcgtgcgggactcagctggcagcagccccacgtctctatggttctaaagcccagtccatttctgctcagcagggagatggccagttccccagaggacttgcccagggtcccagccgtggccctgggagggctcaggggtgagggaggaagaattccgagccgtgggccctccctctgtggctcggggtgcagacgtgcactaccctgccctgtcctctggagtcctccgggctcatccaagtgggcgcatttggatgcaaaccctggacagcatcgtgtgtcttttcttctctggctggcactgaattgctgttcaccagatgccagcaatgaggacactccccctcccggatgcaggactggttgccaccatggggaggggtgcaccgtgccacgtgctcccaggacactggccagggggctataaagaacatctcgagaggagccagcacagccttgttcagacgcccagtgacctgccgaggtcggcagcacagagctctggagatgaagaccctgttcctgggtgtcacgctcggcctggccgctgccctgtccttcaccctggaggaggaggatgtgagctgggttggcgtgggcggatggaggagccaggtggactcctgggcagggggcagtgccaggggccctgctttaggaggtgt

SEQ ID NO: 43136 - DNA, 2300 bp, Homo sapien
cgagtaggctgaggctgaagggcaaatggtcattgatcacactaggagcccctatctttagcgagtgcatctgcatgatccaggtttcactgtagctcattacagcttcttacaaacagaggcactcacagaggacgggcgttcctcctgctcgctgaggttgcccggctctggcacagagtcatttcccataaacttgctttcactgtgctctgtgagtcaccttgaattctttcccgtgtgagatctaagaacccattcttggggtctggactgggaccctcttttccgacaacacttcccccacgcactgttcttgcagctttgttaaaggtctgttgttgttgtgtgtgagtccatgtttggactctctatttcccattgatctatgtgtccatttctctgccaataccacaatctcttggtgactattgataatagtgcttgtaaacttgggtagactaactctttatactttattcttcttcaaaatggctttagcaattgtagctcctttgccttgacatgtaaattttagaaaaaaaaatttctctatatatctacatatggtggggtgtggtggctcacacctataattccagcactttgggaggccgaggtgagcagatcacttgaggtcagcagttcgagaccagcttggccaaaatagtgaaaacccctctctactaaaaatacaaacattagccaggtgtggtggtgggcgcctataatcccagctactctggaggctgaagcagcaggattacttgaacctgggatgcagaggttgcagtgagtcaagatcgtaccactgcactccaccctgggcaacagagcaagacttggcctcaaaaaaatgtatatatgtatatatgtgtgtgtgtgtgtcacacacatgtctatagctacctacaaaatatcttgctgagaatttgataggaattgcattaaatctctaggttgagttgaggagagctaacacctttgctgtgttgaagcttccagcccatgaacacattgtgcctgtcctttaccttaggtctttgatttcccttccttgggttcagagtttaagtcctgtccatatttggtgagatttttgcctacatgctgtgtgtgtgattacaaatcctgaatttccagtttcgggttctgtctactccttgacactgtgtgggaacacggtggatttttgtgcgattgaccttgctgacctcactcggttctaggaggggttttgtagagttcttgcaattttgtacctgggcaatgatgttatatgcgaatagagacaggtatacctcccccttcccaatctgcctgcctttagttaccatttcttgcctagctgctctggccggaatgacctgctctgatggatgggggagtgggagtggacacccgtgtcttgcctcaggactcaagtgctctccagggagtgagatgcgggctcgattgtaagttacaaagtgatgcttccctgtgggaaaaagtacatccaatatagactgtaggacaaagtctgaaagtccactgcctcccatttccacccagtcttgcctgtgagtcagagagaaacagtgctaacaggcagtgtgcacctgtccagaggctggctgtttgagggacacaggtgtgcacacctggggatgtctgagtggaaggtacaggtcaggattatgaccgtgcagtcagtcacccactggcatgatgtctgtggcatcctggggcagccatggggctctcaggccctctgcctgccccacaggccatacccctgccctggacacagctgtcctcagtgctggcctctgacccaacattgtccaggagccccaacccagaaggtgctcccgccgctgccagcctggacccgacccaggcccctcccgcctgaggccctgccaagaactgcccagcccggacacagaggaggttcccgcgtggacgcagggaagagcctcccattgccccagtggaggaagctgcccaggggccaaggatgagtcacaggttcgaggaatcacatggcgaggctgtgggcggggatcttgtctgccctcctcctacataaggccccctgagcccacactgcctcagcatccctctggctccagagctcagagccacccacagccgcagccatgctgtgcctcctgctcaccctgggcgtggccctggtctgtggtgtcccggccatggacatcccccagaccaagcaggacctggagctcccaaaggtttgaggctgggggagcgggcactttactgtgggaggcctggggcgggtgggagctgcg

SEQ ID NO: 43137 - DNA, 2300 bp, Homo sapien
gcttgttgcctctatcccaaaattttaagtacataaatgatatgcagtccatatgcatgagctttaatgagctgattataatacggggtcatgataaggatactttttctctctactgtgcatgcctatctttgaggagctgccccttactggtttggtccagatcttgctagccatagagtttctttacttgcttttttatcttacttttgtttggctgctcagtttctgtctcctgtcttgcttcttgctcacccatccctttgcctagcttctgctctctgcttttactcattctgccttttatccaacttccaattccttttattactttcctgcctcaattccacacagtcatctgtccattgacccatccatccatccatccactcattcattcattccatctaatcatctggctacccatccattcatctacccatccatccatccacccacccatccacccatccatccatccatccatccatccacccacccatccatccatccatccatccatccatccgtttattttatctgatcatccatacatctacccatccatccattcatccatttattcattccatccaatcattcatgcatctacccattcatccatcccatccaattatcaatccatttacccatttaaccacccatccatccactgcatatccagaatctgtaagagttcaacagatggggctgaaggggagcccactaggaggtgcatcaagcaatgtacctttttttttctttttctttttctttttctttttctttttcttttttttttttttttgagatggagtctcgctctgtcgtccaggctggagtgcagtggtgccatctcggctcactgcaagctccgcctcctggcctcacgccattctcctgccacagcctaccaagtacctgggactacaggtgcccaccaccacccatggctacttttttgtatttttagtagagacggggtttcaccatgttagccaggatggtctcaatctcctgacctcgtgatccacccaccttggcctcccagagtgctggcattacaggcgtgagccaccactcccggccgcagtgtacctatttttaaaacactaatgaagttggggaatagagaaatggcagggagattggacaggaggacttaggtctgaaagatgagtcataagttacaggcaaaatggaaaggccaactggaggaagatggaaatattgttggtgacacccaggggtatttgtagaggtgtggccttgttcagaggtgtcctgaaggtcagagctgtggggcatcaggagggaggtgtccatttggcagctacatacaagaacctagaatttaggagatgcacatccaggatgaagctttggaagtcaagaaagggtgcccaagacaccaggagaggctgagatcccccagaagaggaacaaaaacaggagccattttggcatggagagagatggagggcgggaaagggagatagtcagaatcgggggaggaaggtgagagaggaaagcagaatccaagaaaagccttccctgggaagcacagacgtggccttggggcctggggctgagaagccggtcaggaaggggcaggcggacacggggcctcggggcctggggctgagaagccggtcaggaaggggcaggcagacactgcctctgctggttgtgggttcagggctgacgtggctgtgacgcactctgctcagggttcagcgggtcctgggtgcagtggtggagctgtcactgctcacatcctcatggaaccacgtgccagtgacggggatagatttgcagccagcagcacagccagacacgaggggctgaggaggagtcagcagaccatgtatttgttgttgttctaagaaaccttttcactcgtcctgctttggtgacattctctcttgaggtgaagctttaggaaaacagggtccaagatggacaaacaggatgctttacggaatggtcagtgtttttccagcatggccccacccctgctgggatggtccgcggccattgtgaaaaacaagtgagttggaaactcacccagttcccagtcagcccagagtcagggaataaatggacaaccagagagagccagagtcgctacagccagcctggcagtgcaagcccggagctgacacagggccacagccacgatgcagccactaatgcggacccttgggctgagcctgctttccatgctgtgagcccaggggacccagatggttcctgtccccgctgagaaggtgagagcttcgggagggtgaggtgggcac

SEQ ID NO: 43138 - DNA, 2300 bp, Homo sapien
gagatggattctcgctctgttgcccgggctggagtgcaatggcatgatcttggctcactgcaacctctgcctcctgggtttaagcgattctcctgttctcagcctcccaagtagctgggatacaggcacccaccaccatgcccggctaattttttgtatttttagtagagacaaggtttcaccatgttggccaggctggttttgaactcctgacctcagatgatctgcccaccttggcctcccaaaatgctgggattacaggcatgagccaccgcacccggcctaccctttaatttttcaaatgggacaaagtcttgtcctcataaccatgggaagaacctgtgggcagaggcatcactgtgacgcttgcatcatcaaaggtgcccagtgacgtcagcaccaacggaagactccagcgctaggagagcagtagatggcagctggtttgtgacacgacacagaccaaaagatatgcttagaagatccctgtccctgtggaacatctttggccatctctttgcatcactctaacccaaggtaaaggacttttaaagagggatctaggaaagtttggatgattgtggtaaaatcagggtttgggtcatcctctaaccttgacctcagaaagatattgacagacaggcagctcatcaacatacagctagtagcatgcccagggatgatgtcatggaggagggcacactgctgtagagaacctggctagatgggcctgtcttaccccatccacatggcatttctagtgatcttgaacttaaaaggtggtcagtttccaattgcagaggtacaagaactgggcccaaccgaagcctgcccaggaagggattatatgaagaactgccccatagaaatataatgtgagccacattttctttctttctctcctttttttctttttttttttagatggagtcttgctctgtcacccaggctggagtgcagtggtgcgatcttggctcactgcaacctccgcctcttgggttcaagcgattctgctgcctcagcctcctgagtagctgggattacaggcgtgagccaccacacctggctaatttttgtatttttagtagagacgggggtctcaccatgttggtcctgctggtcttgaactcctgacctcgtgatcctcccccttcgacctcccaaagtgctgggattacaggtgtgagccaccacgcccagcctgtgagccacattatcaatgtccggtttcctagtagccacattacaaacagtaagaagaaacaggtgaattaattttcataatttatttctcatttaactcattctttccagactatgacacccagactgttaccgtttcacctgtgatcgatgtgaagttatgagtgagatggtaaattattttctttcgcactgtgtttgactttgagaccccatgtgttttgtacacttgcagctcacctcatttcacagcagctgcatttcacacactcgggaccacatgtggcaagtggctactctatggctatcagtgcagagctaaagtgtcatgtttgttaaatgagtgttcaaaattgaaaatcactggaaggctgaggtgggcggatcacctgaggtcagcagtttgagaccagcctggccaacatgatgaaaccccgtctccactaaaaatacaaaaattagctggatgtggtggctgaggcaggagaactgtttgaacccaggaggcggaggttgcagtgagccaagattgtgccactgcactccagcctggcagacagaatgagactccatctcaaaaaaaaaaaaaaaaaaagtgaaaatcagagaatcagagacctgcattttgtgtggacacacagcgcagtggcgtgttccctatgggcttgtaaaccaaatcccacgtgaagcctccaacacaagctcaggcactggtgagagtccagacttccattgtaaagtctaatgcctttaatgtagacttcattctccgtttacaagatctacctttgagagcacttgtaaatttttagactggcatagtcttggaacaaattattcatcttactatcttagtgaggaagaaagaataaaaagtcgacttcgggggcagaatacattctcctagatcaagaagacttcctcatcaagacctcattctatttgcacagccctgcagtggagagatttattgcgtttctttcatgcaatcaacgcagactttgatgtgaacacggggagagacagtgcacgtgcagctgacccacggggaacagtcagccccgggcacttgaaggagaacagaggcttccctaact

SEQ ID NO: 43139 - DNA, 2300 bp, Homo sapien
accatccaaaatccagtcaatctcccacatatgcgtaacagatggacaaggccagtctttcacaggtacggtcatctggccgtaatatttatgccctcaatgggcttagaaatggtcatatggcacacagaggcactcgctagttttacgcagtgaggcttaaacgacagtctccaaagtgtttcccgtgtgaatgctgaaacataccataggtggaaagctatcctgcaaaatcaaatggccctagacattctaacagcggcctagcagggaccctgcaccctcatcagaaccgaatattgcatgtatgtacctgacaattccgggaatatttctctggcattaaaagctatcatccaccgggcgcggtggctcacgcctgtaatcccagcactttgggaggccgaggcaggcggatcacgaggtcagcagatagagaccatcctggctaacacggtgaaaccccgtctctactaaaaatacaaaaaattagccgggcatggtggcgggctcctgtagtcccagctacttgaggggctgaggcaggagaatggcatgaacccgggaggcggagcttgcggtgagccgagatggcaccactgtactccagcctgggcgacagagcaagactcaaaaaaaaaaaaaaaaagggctatcgtccacagatgcaggtcatctccagccctaggttatcggttaatgaccgaaccacatcatggcttagcagagggtctccctcggggctgaacgtcctcgcagtccaggccgtccttgcaggcaccggcatcatgttacattgtggaatgtattgctgttgcacattgttccaaaacatccctccagctcatactatttcaacaggcgctttctctaggcccccaaaacagagagtactactgggaacaaatcaacatctttcactccaacactgcgtttggtgccccgtaacaatgacctcctatcagcaggaagtagccagaaagattataatgccccatccccccatgattctcataagaaataaatatacaagcatgatagcaatcatgcataatttgacagtggggattgtggcaggccaggtctcactaacggctgaataggccggcctccacgacaactgtttcagcactgaccgggtggtgaagtcaaatattaaaagctgagagggccagcgcccttcaacagaggctggaatgtaacaaaagcccaccaagagttttgcccaggcctctcctgggccttgaagcatgacaagataacaaaggaattcttaacaggacccgtttaggattaaacaagttttactggggtctaaaggaacgccccaaacctccatgatttagcaggagaaaagataaggggaatcaccccagcacctggacccctccagattaagtaaatttactgaggctccagaggaagttcttcaggactcaggccttaattatagattagaagaagttcatcactgtgtctttagctgaatgcacacttacacgtagacctacagcttcgaagatatataagctctggaaaactgcaattttgagctggtctagtgctattttcccgggcttctgcctgtacccggtgacagaagcaaactctcttatttcccagctcgtctgcatctcgttactgggctgagagaataaggagcgaataagcgcccggccgtcggttgagtctggggacgctgtgactcaccattggctccggccccagacgctgtgctggggaaggagcgggaggggatgggaggggaacagggacaccctgtactccacagacacagccaccatgggtcctcttgcaggctgagagagaggctgtcccctgcatttgggacaaggtgcctgcctccagtgaggggacagcaggttcctttgcccatggatccaggaagctcccacaagggagtggggtgatcttccccaaggtagagagggcagcagcctcggggcctttggctgcatgcccagtgggcacaggatgtgtgtggacgggccacagagtgggccgccctgcagggctggaagccgcagggcagcagggtataaagggggtgggccgagggctgaggcgtccacggcaaagatggctctgcttctgctgagcctggggctgagcctcatcgcagcccaggagttcgatccccacaccgttatgcagaggaactacaacgtggccagggtgtgtctgcgttggggtctgtggggaaggggccaggcttcaaggcacctgtcttcccccagcctggggtctctgacctgtgaccagggcaactggtccaaggg

SEQ ID NO: 43140 - DNA, 2300 bp, Homo sapien
tctcacccagacgggcacacacagcacctttagacgggtggggaggggccccaacttaagatgctgcaggccaaagactaggaagcagagggtccccctgcgggccccctttcccgtgcacgtgctcacactgttacacatgcgtcaccctggctcagcctcacacagagctctggagaactgcgatttctgtccccagagctttgttggtttgcagggtggaccaggcccctcactaagccaggactgtgcccacgagggccagggggagggccaggtccatttggagggcgcatgccatgtactttgtggtccctggcctccccagtgtctctccagagggtccttccctgtttctccaggaggcagcaggctgaacacagatgcttttgaggggtgggtggggaacactcggggaagtctaggatgctaagtccccagcagaggttcagcctgtgcccccgccacacagctcgtgggcatcttgggggtttttcctcaggtccctagattggccggtgctgctgccggggtcccaccacccctgggcgggtgccgccggggcaagatggtggcctttctgccaacgccctcctgcctggggaactcagaaaaaactgagaggccgcaccatctgcatctgtgattaattagcagtaattacacgtgttgtcaacggcaggagagtcacaggtttgatgacattccgagggctttagggaaacaaaaacttggccccactctgccactgaggagccccagatcgccagcccgtccatccctccctggccaggggcagggccgggagaggggcccaggtccccgagagcttttgccctcctctccaaccccgtcctcctccatgtctgacctgcagccaaggctgggcggagcagggatggagacaccaccttatattacataacctccctctgctccaaacacccttcacccatctttggcccaaagtccaggatgccagcccgaggcccagagccgcgccttctccacaggagactggggcaccccggacagacgtccccgtgtggtggcacctgcccgggctccttcttgcctcccctctcgggaggagagcccctgccacccaccccacctcctcccgctacgacctcagcacgagccaggccagggatgtcctcccaacagtccagcctcaccccccaccctcgtcccctctgcttccctgagggccccccgcaacctccgtgaaagaggaagggtctccacctcccccttccctccgtcatccccccaaaagtatgtactgggggactcaagcccagcgcagggcggctcctggagttcagcggggaggtgagcaaacacctggcgccggagctttctgaatttggatgggcaggacccccgcgatcccgcagaaacctgttgagagtgtgaggtgaggggtcgagctggggccccagggcataaagcggggatggtgcttgggcagggccaggtgaagggacagacggttccgagggtgcccggcagagctcagcgggaggaagagcacggacgatggtggcctggggtggggacaagatgcccctggttctgggcgacccagaagtgtggatggtgaccctaccctgaggcgcagcgtctgcaagcgtactagatttgggggaaaatggaggcgtgggcgactggggagcaggcgggtacccttccccctccctgtgtccctgggtcccccaggcctgggctaaacaactcagcccagcccgcccactcccaccaggggctgggctcctaagggcagagcccgcatctccaaagtgcccaagggcaccgagaccaccgcataagtgggaaccgaggcgacccccgggaaggtaagggtagaggcagggccacctgggctggggccccttcccctggcgtcctgcgggggcatagagtgggtggaccccccgagtccctttccagcaccttctttgcaggaacgcgggtcacgtgggccccgggctggctgcgtggggagggctagagcgcatgcgctatgggggcggattgcaagtgggggtggggtgggctaggtggaaagcacgtggcaggtgggcagagcacacgtgagggggcggggctgcctgcggaaggggccgtgcgcgtggggtcgctccgcagctgcgagttcatggcgtcccggtgctccgagccctacccggaggtctccagaatccctaccgtcaggggatgcaagtgaggaattgggctggcggccaaggggttgggggcccaaggcctgtacccaggggttcttccgcaagttgctg

SEQ ID NO: 43141 - DNA, 2300 bp, Homo sapien
atcgtccgtgctcttcctcccgctgagctctgccgggcaccctcggaaccgtctgtcccttcacctggccctgcccaagcaccatccccgctttatgccctggggccccagctcgacccctcacctcacactctcaacaggtttctgcgggatcgcgggggtcctgcccatccaaattcagaaagctccggcgccaggtgtttgctcacctccccgctgaactccaggagccgccctgcgctgggcttgagtcccccagtacatacttttggggggatgacggagggaagggggaggtggagacccttcctctttcacggaggttgcggggggccctcagggaagcagaggggacgagggtggggggtgaggctggactgttgggaggacatccctggcctggctcgtgctgaggtcgtagcgggaggaggtggggtgggtggcaggggctctcctcccgagaggggaggcaagaaggagcccgggcaggtgccaccacacggggacgtctgtccggggtgccccagtctcctgtggagaaggcgcggctctgggcctcgggctggcatcctggactttgggccaaagatgggtgaagggtgtttggagcagagggaggttatgtaatataaggtggtgtctccatccctgctccgcccagccttggctgcaggtcagacatggaggaggacggggttggagaggagggcaaaagctctcggggacctgggcccctctcccggccctgcccctggccagggagggatggacgggctggcgatctggggctcctcagtggcagagtggggccaagtttttgtttccctaaagccctcggaatgtcatcaaacctgtgactctcctgccgttgacaacacgtgtaattactgctaattaatcacagatgcagatggtgcggcctctcagttttttctgagttccccaggcaggagggcgttggcagaaaggccaccatcttgccccggcggcacccgcccaggggtggtgggaccccggcagcagcaccggccaatctagggacctgaggaaaaacccccaagatgcccacgagctgtgtggcgggggcacaggctgaacctctgctggggacttagcatcctagacttccccgagtgttccccacccacccctcaaaagcatctgtgttcagcctgctgcctcctggagaaacagggaaggaccctctggagagacactggggaggccagggaccacaaagtacatggcatgcgccctccaaatggacctggccctccccctggccctcgtgggcacagtcctggcttagtgaggggcctggtccaccctgcaaaccaacaaagctctggggacagaaatcgcagttctccagagctctgtgtgaggctgagccagggtgacgcatgtgtaacagtgtgagcacgtgcacgggaaagggggcccgcagggggaccctctgcttcctagtctttggcctgcagcatcttaagttggggcccctccccacccgtctaaaggtgctgtgtgtgcccgtctgggtgagagcacagggcggggtgcagtcatccccctcccccaggccaagcccaggatgtggcgcccacccacagatgccgcagcctgcggggggtgtgggggcgggggggcggggagtcgtcttgaatctggcttgtgttcaatgaccagtgttgaccacggcagagcagcacaagcgggaggtgctgacggtccctgggcgcagcggctggacgctggcggtccgagcagcgcatgtgccctgctgcccgccaaggacccagagccccctgagcccccgcccaccacggagccctcccaggggtgtagggcccggtggcggcgcgcttgggcttttctagccattgacgaaccccgtcctgtttttcggagttttgagggctcagagggccgcggcgggagcggatcgccctccctaccccgcacccccgtcccagcctgggccagagccgccgcgggtcccggcgcggccggcagggggcgcgcgcggacagacgcctgcacccgaccctggaactggcgtcttttcctcgctaatctgcgaggaaaaaaaaaatgtttttcagggcaacgcgagggaagaaggtggcggctcccactcgcttctccctcgggtcgggtccgagctgccaggccgcatgccactccctgacggggcgcggaccccggggggcgtctgccgggaggcgcgcggcgggggctacaccaaccggaccttcgagtttgacgacggccaatgcgcccccaggtacagtctgctgcgc

SEQ ID NO: 43142 - DNA, 2300 bp, Homo sapien
cggtcacatcagagctcatcgtaaacagcaaagcaggagaagcagcaccagggtgagcccgagagctgggcagtcgccactctgcctggcggccaacagcaccttgactagcacaagccccagacctcagcctcaggcccgtcctcaacgcccagccaggggacactctgtcggcatgcgaggccttgcccaacagggccgcctgggctgacacctgggacgtgctctcacagctcctgtccacctgcctggccgggatggcgcagcaaggctgccggcggtgaagggttggcgagccccgttgtgcggtggtcggcacccgccagggcagaattaccttgcaaatatcccaggtttacccgattcatgacatcactggctgttaaatttgctacgtcctctacagaacacacagaaagaggcacagacagaaagagagagagagagaatatcagcaagcgaggtgcgggcggccggcacagtgggcgggtgcaggggcagctgcacgggaggccggccaccagaagcgagtcggtcaccagaaaggcagttgctccttccttgccaagctctgggggcaggcagcggtcgcagaggcaggcaccagctctgggggtggccagaccgggcgggatcatcctctgccagcagtcacaggggaccacaaacatgaatgctgggcacccccctcagcctcgtgagccccacctgaaagggcgtgaagtccctcccgggacagggacactgtggggatggagggaagcttcaaggcggggacagggggacaccttccccagcgcccacagggctgggggccgggaaaggtcttcacaggccacctgttccccaaaccctggcctctgagtctccttcgggcccgcaggccagcccagcccagtcacccgtgagcagctcctgggccagccgtgagctcctgactctgctcaggggactcaagaccccgacccaggtgacagacgcaggaagcagggttgggagacggggcactccgacgggacagaggcagccctgagcatcaggcaagtccctgagatggaacaaagggaaggtggagcctcgacccggctcaggggtgggtgtcactgggtagcggcccggtgctggggagctggggcccatggcttcatcaacggaggtagcatctctagagtgagggaggggatgagcttctctccacgccaggcagggcatgtagggccccgaagcccaagcacacttcccaccacaaggcgcagagagagggggctgcacggatctgttgctgaagacggacgccgggctccctgaagcggcaggagggggctgtgccgtgggagtggcaacaggcccatggtggacagaggcatgtcctggcatgggcctttcccccaactgttcccccaaagtctcccccctaccctggctgctgggagggctgggggctctgggagggggtccccaccagtcttgttctctgcgagaactcagggaccctgggtatccgctgtccagcaggcctggctgcagctggctggcccaactctagctgatgccctcgacttggggagcccagcctggccctctccaccccacagctgcctcccctggccaaagggctcagccagctcctgtctctaatttggcagagagggaaactgaggccccagagcagtggaagcgagcacctccctacggggctcacaccagggatgcccaagggtcctgtggcctcccagcaccagggtgggccatggccacttccctcctctgcacggggcctctgctgggccgtggtggtgcccacagctggccccacagtagaggcaggcagagggtggccagaaaggctgacagacagacagatgacagacaggaggacggcccgggccccgggacgccgtggccgactgttcttggctgtggcccgaccctggcccagtccgtccgtccggcccccacccgcgccgtgtgcccttaccgtagccggtggtgggcagccccaggtgcttcatgcggttcttcaccagctcggagagctcctggcgctcagagcgccggtacaggctgaggcgctgctggctgatccactccgcggccgccgcccggcctgcctgcttgggcgccttgcggctcagcctccgggcccactgcaggctcttgcgccgtagcagtgggtgctctgcggggtcaccgccgcccgtgtggcggccctgggagctgcctccggtgccagcgcgggagccccagggccccttcacttcccgtgtgtcctcacagtcctccacgttcaccgagatctg

SEQ ID NO: 43143 - DNA, 2300 bp, Homo sapien
tcagtaattttgaagggtatcaagaggtcctgggactagagtgtttgagaatcacaaagctgaaattatctctgattttcttctgctctgtggaagagtgagtttaaatctcctgcatatgagaggcgtattctctttgtgtggccggcattctcaccccctggtccatgttgggggtctttggtgtataccgcagcgcacccagtgggccttccctgtgtttcaggcctgcgtcccagccaacaccttttgctctacatcacgctgcgagttgtgaagtggatcccagctctggcgacagcatcagcttggcccgctccatcagcaaagacagtttggcatccaacattgttaatctgaccccacagaaccagccacaccccacggccacgaagagccacgggaagagcctcctgagcaatgtcagtattgaggatgaggaagaggagcttgtggctattgttagagcagacgtggttccccagcaggctgacccggagttccccagggcctcaccccgggccttaggccttacagcaaatgcccggtctccccaaggacagctggacacctcggaaagtaagcctgacagttttttcttggagcctttgatgccagcagttcttaagccagcgaaagagaagcaggtgatcaccaaggaggatgaacggggggaagggagaccgaggagcatcgtgtctaggaggcccagcgagggcccccagcctttggtacgaaggaaaatgactggcagtcgcgacttgaataggacttttaccccgattccatgctcagaattccccatgggcatcgaccccaccgagacaggaccactgtcagtggaaaccgcaggagaggtctgtggtgggcctctggcccttggcggattcgatccgttcccccagggaccatccacggatggcttcttccttcatgtaggcagggccgatgaagacaccgagggaaggttatatgttagttgttcaaaaagccccaactcccacgattcagagccgtggactctcctcaggcaggattctgactcggatgtggtggacatagaggaagccgagcacgatttcatgggtgaggcccatcctgtggttttcagcagatacattggggaggaagagtcggccaaactgcaggaggacatgaaggtgaaggaacatgaagacaaagatgacgccagcggccgctcgagcccctgcctgagcacagcctctcagatgagcagtgtctccatggcgagtgggagcgtgaagatgaccagctttgcggagaggaagctccagagactcaacagctgtgagaccaagtccagcaccagcagctcccagaagaccacgccagatgcgtctgagagctgcccagcccctctgacgacgtggaggcagaagagggagcagagtccgagccagcatggcaaggatcccgccagcctcctggcatctgagctggtacagctgcacatgcagctggaggagaagcgcagggccatcgaggcccagaagaagaagatggaggcgctgtcggcaaggcagcgcctgaagctcggcaaggctgcattcctgcatgtggtgaagaagggcaaggccgaggctgccccacccctcaggccggagcactttgcaaaggagtactctcagcacaacggggaggactgtggggacgctgtttccaaaaccgaagactttctcgtgaaggaggagcagagagaggagctccttcacgagccacaggatgtggacaaagagagcctggcctttgctcagcaacataaagcaaaagaccctgtggctctgcacgagctggagagaaataaggtgatctccgctgccctcctggaggacactgttggggaggttgtcgacgtgaatgaatgtgacctttccatcgagaagcttaacgaaaccatcagtacgctgcagcaggccatcctgaaaatctctcagcagcaagagcagcttctgatgaagtcccccacagtcccagtgccaggctctaagaataactcgcaggaccacaaagtgaaggcaccagtccacttcgtggagccactctctcccacgggcgtggctggccaccgcaaagccccccggctgggtcaaggccggaattcccgttccggaaggccggcggagctgaaggtcccaaaagacaggccacagggctcctcccgaagtaaaaccccaacgcccagtgtagagacgctcccgcacttgagacccttccctgccagcagccaccctcggacgcccacggaccctggcctggacagtgccctggagcccagtggt

SEQ ID NO: 43144 - DNA, 2300 bp, Homo sapien
ttaatttctccttactatagattagtaaaatcatatttctcaaaattaaatcattttatctgatgtagtgatttttttgtttgtttgtttgttttttgagatggagtcttgctctgtcaccaggctgaagtgctgtggcgcgatctcggctcactgcagcctctgactccctggttcaagcaattctcctgcctcagcctcccacatagctgggattataggcgcatgccaccatgctcagttaatttttgtatttttagtagagacagggtttcatcatgtcggccaggatggtctcgatctcctagcctcatgatctgcccacctcggcctcccagagtgctggaattacaggtgtgagccactgtgcccggctgatgtagtgattttagttaagactgtagccaaataaattttaacttgtgttgtcaaaatgtatagtcttgcagtgaaaatatcgttgagagcaattaccttctgtgtagtagacacagagtaactgcgacataagcagggctcacacatgctgaagctctctcacagttctgaactgtgtgttaccatcaaaatgtgggacaactgtatggttttgcctctctgctttccatgcggcccttctggtgtactgacttgagaggcatttttctggacaaatggtcatattgaaagaatttcaagtgatagaaaattggttacttaacactatctaattcctctgtactgcagatcagcgacatcgatcgaattctttgacccgagttgatggtcagcctcgaggagcagcaatagcctggccagaaaaaaaaaccaggtgagtctgtgtttcagcagtgtttctgtttggaatgttttttatactaaacagcagttcttaagatgtcaccccaaccccctgaggatcaccgagacccttttatagggagtgcctgaaatcagaattatttttataacaacactaggaagttactgcctctctgcagcctcactcttgcgagtgtgccgtgggatttttcagaggctgcataccatgtggtgtggcagcaggtggagtcaggtatgagggtccagccagatcccagaactatacaggtgtcaaatagtgcctgcccttaacactaggaacttcttccgttctggcgaatatagtcatttgtcatggagtgggctaattactgtaattttaatcagtgtttagaaaatgtctgagctttaatttgtaggatgataaatagagattaatactgataaatagaaacaaaagctctttgaggtcctcagtaattttgaagggtatcaagaggtcctgggactagagtgtttgagaatcacaaagctgaaattatctctgattttcttctgctctgtggaagagtgagtttaaatctcctgcatatgagaggcgtattctctttgtgtggccggcattctcaccccctggtccatgttgggggtctttggtgtataccgcagcgcacccagtgggccttccctgtgtttcaggcctgcgtcccagccaacaccttttgctctacatcacgctgcgagttgtgaagtggatcccagctctggcgacagcatcagcttggcccgctccatcagcaaagacagtttggcatccaacattgttaatctgaccccacagaaccagccacaccccacggccacgaagagccacgggaagagcctcctgagcaatgtcagtattgaggatgaggaagaggagcttgtggctattgttagagcagacgtggttccccagcaggctgacccggagttccccagggcctcaccccgggccttaggccttacagcaaatgcccggtctccccaaggacagctggacacctcggaaagtaagcctgacagttttttcttggagcctttgatgccagcagttcttaagccagcgaaagagaagcaggtgatcaccaaggaggatgaacggggggaagggagaccgaggagcatcgtgtctaggaggcccagcgagggcccccagcctttggtacgaaggaaaatgactggcagtcgcgacttgaataggacttttaccccgattccatgctcagaattccccatgggcatcgaccccaccgagacaggaccactgtcagtggaaaccgcaggagaggtctgtggtgggcctctggcccttggcggattcgatccgttcccccagggaccatccacggatggcttcttccttcatgtaggcagggccgatgaagacaccgagggaaggttatatgttagttgttcaaaaagccccaactcccacgattcagagccgtggactctcc

SEQ ID NO: 43145 - DNA, 2300 bp, Homo sapien
ttcgtaccaaaggctgggggccctcgctgggcctcctagacacgatgctcctcggtctcccttccccccgttcatcctccttggtgatcacctgcttctctttcgctggcttaagaactgctggcatcaaaggctccaagaaaaaactgtcaggcttactttccgaggtgtccagctgtccttggggagaccgggcatttgctgtaaggcctaaggcccggggtgaggccctggggaactccgggtcagcctgctggggaaccacgtctgctctaacaatagccacaagctcctcttcctcatcctcaatactgacattgctcaggaggctcttcccgtggctcttcgtggccgtggggtgtggctggttctgtggggtcagattaacaatgttggatgccaaactgtctttgctgatggagcgggccaagctgatgctgtcgccagagctgggatccacttcacaactcgcagcgtgatgtagagcaaaaggtgttggctgggacgcaggcctgaaacacagggaaggcccactgggtgcgctgcggtatacaccaaagacccccaacatggaccagggggtgagaatgccggccacacaaagagaatacgcctctcatatgcaggagatttaaactcactcttccacagagcagaagaaaatcagagataatttcagctttgtgattctcaaacactctagtcccaggacctcttgatacccttcaaaattactgaggacctcaaagagcttttgtttctatttatcagtattaatctctatttatcatcctacaaattaaagctcagacattttctaaacactgattaaaattacagtaattagcccactccatgacaaatgactatattcgccagaacggaagaagttcctagtgttaagggcaggcactatttgacacctgtatagttctgggatctggctggaccctcatacctgactccacctgctgccacaccacatggtatgcagcctctgaaaaatcccacggcacactcgcaagagtgaggctgcagagaggcagtaacttcctagtgttgttataaaaataattctgatttcaggcactccctataaaagggtctcggtgatcctcagggggttggggtgacatcttaagaactgctgtttagtataaaaaacattccaaacagaaacactgctgaaacacagactcacctggtttttttttctggccaggctattgctgctcctcgaggctgaccatcaactcgggtcaaagaattcgatcgatgtcgctgatctgcagtacagaggaattagatagtgttaagtaaccaattttctatcacttgaaattctttcaatatgaccatttgtccagaaaaatgcctctcaagtcagtacaccagaagggccgcatggaaagcagagaggcaaaaccatacagttgtcccacattttgatggtaacacacagttcagaactgtgagagagcttcagcatgtgtgagccctgcttatgtcgcagttactctgtgtctactacacagaaggtaattgctctcaacgatattttcactgcaagactatacattttgacaacacaagttaaaatttatttggctacagtcttaactaaaatcactacatcagccgggcacagtggctcacacctgtaattccagcactctgggaggccgaggtgggcagatcatgaggctaggagatcgagaccatcctggccgacatgatgaaaccctgtctctactaaaaatacaaaaattaactgagcatggtggcatgcgcctataatcccagctatgtgggaggctgaggcaggagaattgcttgaaccagggagtcagaggctgcagtgagccgagatcgcgccacagcacttcagcctggtgacagagcaagactccatctcaaaaaacaaacaaacaaacaaaaaaatcactacatcagataaaatgatttaattttgagaaatatgattttactaatctatagtaaggagaaattaaggaaaaaaggaggaaacaacattcttaccagggatgtcctctccctgtatggatttctgctgtttctgtctcagtggcaataaaggatgggatgggctgaaggcagcagttcctttcccgctaaatggaaaaagaattacagggaaaatcattcctttatcaaacttcaaggtcaacagcaaatgcacaagtgtacaggaccatcctgaattcacaccaagttttgagaaactcggactgtttgggaaaaaaatgacaataaaaatgagccaagagtatcaggaactt

SEQ ID NO: 43146 - DNA, 2300 bp, Homo sapien
ccggcagccattcatttctggtcctggcccctggctgtaggagagcacagcttggtgcccttggcttttggtcacatgttgctgcctcttagccctctttatcttttccctagaccgtctgcagagctcagtgcagccgccacccgctcgtccttacttccctcctccatgttcacaacacatcacctagtgggtgccctcccactggtccccaccatatggccccacctcttgccttcttgagctgctcctggcaccacctcccataggttagttctctgggaagcagccttagatacagagtcactgtttggggctgaccctttgggagagaggcgggtgagcaggcgtgggccaagaaagggaatggcgccccagccaggctcagcacctcacctgacccccaggggctggagctgaagggacccaccagagcagctgcccacatgctgggtctagagaagcgcccttctgaccctgcctcggtccctcactggctgggctgagcgaggtggctctctggagctgagccccaagccttctcccaggagcctgggtggtgggcatcttgtctaggaccaggcttggtgaaggtggcacgtggttttggaagcagcccaccagtggagggcttttgtgcgggtgctagacggtgaccaagacagagcccatcagctgggcttacatttcctctcagttcttcttctcatctgtgttgtgtcttttaatgttagtatttacttcggtataatatttgtagtacttgttattacagaatacatttgttaaacttgaaaccagttttttttggcagaagtttggtttcaataaaaggttgagttagtgcttataaaagctgcaggttaggttttctgtgcttccagttagtgttgtaagtaacgatgcaaaaacgctatttctgcagcgaaaacagtgttacaccagaagagcagccggcctcctgtaccgatctccaacgcgaccaaacgcagtttcctaggcagccctgctgcagggaccctggctgagctgcagccccccgtgcagctgccggcggaaggctgtcacaggcactacctgcacccggaagaacctgaatacctgtaagtctgtctttctgctttcagaatcagttcaccatcttgtgtccctttttgtgttagtttaaaatattaattgaagttaccttttttaaaataagcaatttgtattcgcttatgaaagattttccttctgtccctgcccttctggccattcggtcccctttccagaggccgggaatgatactagcaggaagttccttcagggatgtgtacctaattctgacattgtttatggaacaggtgtttttctgttctcttttccaccatgtgttacactgtttaagaaacgatctaaagattagaaagttgaattgacagtttaggtgtgctctttatggtctgatagacataaagagtgaaatcctcttgcatttcaagtattgtgaagtcttcaaagaagagaatttgtttgctctttggggaagaattaatttgattcgagtgaaaaagtgtatagagctgcttaaaggctaaactactctagaaaaagagttgtttaaaaaacgttttttctaaaatgaattttcatcatgaagacctaatttggataaccatatctggggtagaattgactgtgccagaattgggggagggggtgaaggaagcttcccttggagtaagagtgagctttgtgctgtgtgtggtaggaggacccacagctgatgccagcctggagccagttagcacaccgaaagtggagaaacatttttaacatgtggcgatttaagttgggatttaagatgaagacgctatttaaaagtggttttaaataattcacataagtgaatggttcagtgagacagcatggcatagaacgaactcagttgtttcaggttgtttgagaggagctaaaaccggtgaccatgttgagggatgggatgcgggggctgccggagtcaggaggaaggagttgagaggcccttgtgatacaggcagtggtgggggggtacacacccaggggtggggcatagctgagggaggggtttggatgtgttctgtgttgggcggctttgagactggggtgtctgtccccagagctcagagcagaggtggggcggtaactccatgcccgcgggcacaggcggggtcactgagtgaggagaatggctcgaggctgagccgtccctcacatggggccagcgtggacacttggcgtcctcccttcggtctttgcgtgtctgttgttgagccgtgtgt

SEQ ID NO: 43147 - DNA, 2300 bp, Homo sapien
tccccgcagccggtgtgaactgctgcaaacgttttcaggttatgggatcccttgctcagtgccctcccctgacttccctccacggcccatgggtggagggaacttggacaaacatgggcccacaggccgcctgtttgtccctggccaccttgctcttgtttcctgggacgtctcactccggcgtgtgcggggtggctctgtgctcacctctgcaggtcagctttccttgagcagtttgtaaggacagcagaagtcttcccgttgtgcttggcattggggcctgttccttgtgttactgctgtgctctgttgtatttcaaaagttccaatgatttcagattagggggctactcgatgtggtcagcaagtataggatttgagtctgttaacatccactaagccagccttccatagctggagccctggctgcccttgggttgccgtgatgacctaatcattgtgtacaaccatgcttaaaacaaaaatgctgtgtaaacggtgactgctgccgtttagaagtaaaccagctatgaggtgctcagattgtggggaaatgaccagactccatgggaccataatgaagtgactcagggctcaggaaaatagtgaaggaagccagaagagatggcagcagagagagaggggtgctgtggggaaccatcgccacagctggttcttcccctggggaagagcttaggagagcttggctcggaacacaagacaggtttgttagtgtccccatgaatgtctctagtgttactggttgtctgaacgctaggagtcagtggggtttcttcatgagctgttctgtggaggtggtagtcctttctaaactctgtggaggtgggagtatctgcacctcctagcagagtgttgggcgcggggcacattaaagacctgggggtcacgtgtttccgaaatgtgtctgactgcagacatccctcgtcctccgtctttagtgggacagccgttgatgtcttgtgagacagtgtgaggggcatagtggcaaggctagaaaagtgggtgaggccagctgtgacacattcggtgtcccgtgtgtatgctgctcctgcgctgtttgtgtgggaggcggcgtatgttgcagccggaagtatacagtaggctctctggatcagattgtgtgggttcaggctggtctctgcctcctgtggccttgagcacttactttctctgtgcctcaatttctcatttgtaatgtgcagatggtagtcctcatttgagggaactgcagtggcaagattaagtagcgtggttcatgtcaagagtttgatgctgcctggtccaaaaatggataaaggctgattgctgctgctgctgctgtgtcgtcatggttacagtggcaccacgcctgcctggctccctcttctgtaaagaccatgggtgttcaccctctgttatcacttctgattttcatgtcagaaagaggatgctgggctccctccccgggctgatgccagccctgcccacatgctgtctccgctggtgtccccaggcactacatggtcctagcctgtgctggtttcccctcagccccattaacacactcagggctcccatgtctaccttcttactgctgttaagttaggacagtcatcctttgaggtcacggtggaggtcacgaaatgatttcagttgtctgtgttcacagagtagtctgagatgctacagttagttgcctttgtaagtacagaagacagtagaattattgaaaagcctagagccttttcacgttgttagttgctcatttaatcaatcaatcaattattttttttgacacttggtctccctgtgttgcccaggctggagtacagtggcacagtcatagttcactgcagccttgaactccttcctttgggtcttgtgtgtggcactcacctggtcatcccctccctgtcttagataacatccctgaggacctcagagaccctttctacgttgaccagtatgagcaggagcacattaagccgcctgttatcaagcttctcctgtccagcgagctgtactgccgtgtctgcagcctcatcctgaaaggggaccaggtggccgccttacagggacaccagtctgtcatccaggccctgtcccggaaagggatctatgtgatggagagtgatgacacccccgtgacagagtccgacctcagtcgcgcacccataaaaatggtgagtggtctgcggtggccgcccccaggggccatcctctggagccgtgggctctcgtgtggcgcacctggtgcatggatggtgtgaacacggtgtgcggcgaggtggtggagacccg

SEQ ID NO: 43148 - DNA, 2300 bp, Homo sapien
ctgggctcaggtgatcctcccacctcagccttctgagtagctgggaccacaggtgtgcaccaccacgcccagctcattaattttttttattttttgtagagggtcttgctacgtggcccaggccggctgcccagtgtttgtctccagcccaggcctctctcctcaacttcagtcctgtaggtccagctgcctccaggccacctccgtgtgaatgcccccagcacatccaggtccccgtgtccaaaactacccaacaccttcctggccaatggctcctcctcctgcctcctacttcaaaaggtggcactgccctgcactctgccacccacactggaagtcttcaagtcatccttgatttcactcttgggcccacaccctccaatcctgctggcctcccctcccacaggccactggaagcccccttctcctcttcctctccctccgcattgctcccccgcaaggatgccctgccctcttccctgtcccctccacagtcaccaccattcattctgccacctggtcacaccgttagtggctctcacagcaacgtcttaatgctctgacccggctcctccaagccctctagcttcccccactctccactcaccaccttggtgttcctcccctttctcctccaccagcttccacgatactaccaccacctccactgcggtctctaacagtcggtacttctgcttcctgcgttaaaaatgccccattccaggactgtatcctggtgtctggtcttaatcactaccatattttcattgagtagcagaggctcccacctgtgagaggcaattagtaagtgctgaactggacacatggaatctggacgaggttggaattatcacaggagaaaaatgaggatgtgtgtgcaaaatggtgtggacagaataaaagcctgcaggcaggaggcagagacagcctccccggttagattgctaacctctgagaacgggaactgtgccttattcatctctgcgcagtaaagtttttttaaatgaatgggatgaatgagtacagatcagtcaatgtgtcaggtctaacctgaactacaaaattcatatttaggagcatggtaagtaagacgttatccaggactgttgagctaggtacagagaccactgccaagggggcttgcagtggggagagaggtcaggctcaactcccaatacagcaagggcaagtgggtggggtcagtgaatggaaaattaataggagaaaacatcagggatgtgggcggttctggctaaaccgacctgacagggttcttgctgaagagaggctggagatatcagacagcacctgggggacgaggaacctgaccagacgtccagggtgatctgatattgaggctgggagttcttgctaaactcacttatcaaggctcttcgctaaaactggattttacaaggaagtgtacagatgatgtagaaggttcaggagcctgcttaagtttggccaagcaaagactctttgtcacaccccacagaaaatgagtctgcctggcatcacctgcaccaagggcggcttccctcccctctgggtgccccgcaaacctaggcttcgcaggaacagtgactctctgatctgcgtgtgaattagaaagacctaggcttgttaaagccaagttctttggagagcctccgttctacagcagtgcagtgcaaaagaaatatcacagcagccatgtaggcaatttaaaattctatcttaaaaaggttaaaagaaacaggtgaaattaattttaatgacatatttttcttaactcaatagatacaaaatattatttcaacatgtaatcaatatgaaaacattatcgagatgccttacattcctttttcccgttacttctttgggatccagcgtgtattttacctttagaacccatgaggtcccacgtggtgagtgccccgggtgggaaccgcctgcagctcggggaggaacgaagctaccagagaactacagctcccggcatgctccgggcgcgccccgtgacgcacttcctttgcggtggccacagcgcgcccccggcggcgggagcgaggcgcctgtccgagaaccacatctcccggcatgcgccagacgcgcccgtgacgcacttccggtgcggccgcgacggcgcgcccccggcggctgctgcggcggcgggagcgaggcgaccgctgaggccgcggagagtgacggcggcccggccgacgggagccggggcggggcggcggcccagcgaaggagcgcgcgggcggtctggccccgccccctccccgcccgccttcccggtgaccttcaggggcccg

SEQ ID NO: 43149 - DNA, 2300 bp, Homo sapien
caatctggcttcaggatccaggcacacagcgttttgagcccggtccccatctgtggcatgggcctcctgctagggcgtctgggagaacctagaccctgggggccagcagggactcagctgcaggcggtggtggcctgtcccaaccttgggctatgtggagggcagtcctgggtctgcagaccaccccaggcaggggtagacatacctgcccttcctccagggacacccagggaggcccggcacccagggaacacccatggctgaaccagcacagccggagcctcccagcaggcaatgcaggaccacggccctcactgcctcctcctctggccccaaagcccagctagtgatgggggtcatccccatctccatctccacggccggcccccgtgctgagttcacggccagcccccgtgctgaggccatgcaggtccctgtgctgagtccacagccgtcccccgtcctgaggccacccaggcctggcccaggagggtggacatttcctttgtgttttttttgagacggagtcttgttctgttgcccaggctggagtgcagtggcgcgatccctcactgcaacctctgcctcccgggttcaagcgattctcctgcctcagcctccagagtagctgggattacagtcgcccgccaccacacctggctaatattttttgtatttttagtagagatggggtttcgctgttggccaggctggcctccaactcctggcctcaagtgatctgcctgcccaggctcccaaagtgctgggattataggggtgagcccccgtgtcaggccagggtgggtgtttccatctacgtttgtgggtgaggactgtcccggtcacacagtccctgtgtcatggaggcaggacacgcacctgggtcccgcacccctctttagacagcatatggggcaacccagcaaggctgggaagaggagtgggctgcagactcggggagagtgctgggggggggttccctagagctgtgggtggcctcactcccacagtggctgcagcacctgcccacctggctgtgccggccactgggaccccacctctggctggcagcacaagctctaggtagtcaccactcctgctaagagatggggaaactgaggcacagagaaggctggtgactggctgcgctgggtggttcctggaaattaatcggctccctcctcccacctctacccctatccccatccctccagcaagaccagaacttcccagaggagcagggtctgagaggtgccccctcagtcagctgactttgctgtgcagggccccccagcacagttttggggctcaggttgggggtggtccctgagcctagtgcctcattcccattcctcctctggcctctcccctccccccatggccaggctggcatcagcggcctgggcaccatggctaggcctggacacacgagctgcattcagatctggtccctgacgaggaggcggcgggaacacagcgttctcttggtgcctggccagacagcctggcccctaccctcctccgctcaggcactttcagcagtggcagcggagtctcaggccctgcccactcccagacacacactgtctgcagcccagggcccgtgggtgccccctgccaggctgagggacagtgacacaggtgagggaggtaatgggggagccctgctgccctgggagaggggacgaggaccccacaggggccaggcctggccaccactcgccccaggctgggaaaccaggacatgaccctcccccaccctgctcgcaggttgtcgcaggacacgtgttcgtgtccaggtgcgctgggaagggtcctggcggtgctcctctcagcgcaggtcccgaggagctacaggcatgacgctgccttcagaactcccccgagcctgctccttcccagccttggctcgtgaggctcctccgaggaccacgggccttccacggcgtagccctgccacgaagcctccccatgtcttgcctccagcatcacctggccgagacggacctagggcgtccttctccagcatcatctggccgagacggacctagggcgtccttctccagcatcacctggccgagacgggcctagggcgtccttctccagcatcacctggccgagacgggcctagggcgtccttctccagcatcacctggccgagacgggcctagggcgtccttctccagcatcacctggccgagacgggcctagggcgtccttctccagcatcacctggccgagacgggcctagggcgtccttctccagcatcacctggccgagacgggcctagggcgtcctt

SEQ ID NO: 43150 - DNA, 2300 bp, Homo sapien
aatacaaaaattagctgggcgtggtggcacgtgccgataatgccagctactcgggaggctgaggcaggagaatcgcttgaacccgggaggcagaggttacagtgagctgagatcgcgccactgcaccccagcctgggcaacagtgtgagactcggactcaaaaaaaaaaaaaaaaaaaggaataaacagagctcacctcatggtactgttgtgaacgttaaatgcggtaaggtgtacatactcagtagcacgggcctggaattcagtagggatgcagggtttgctttaaaaggtgcaaatatatgttggtgtacatacgtataggcacacagaaattggggaattgatttctgcttatccgctatcttctaaacacttttcaatgctttccaaatatccttcactaaggaagaatgtctttaatatttagaaaataaaagtgattaaaacaatcattcccatccctggagggccacgggtcctagtgggtagccccttgaggcctgccccagggctggaagcagctccaggcatctgtctctgggattcacgattctcaggggcttggggtagctatgctcactgagagatcctgcagagattgtaaagtcaggcctaggaagcaccagaaccctgaggctgctgagctcatgccctgggtgtaggaggcactcagaaccctcctaccccacctccttcccacagtagactgcggggcgggtttggaagtggcagtggtggggggaggggggttggggtgtgggacctgggactgcatttaggtctagatgggactctgtggggagagcccagagtccctgcggggttccatactcacccccatacaaggcaagccagggagtgaagtgtgtgtgtgtgtgtgtgtgtgtgttctggacgcagagctgaatagaacctaaagttggggtcaagggccagtctgtggccaagatcaagggcctagcttgaggttggggtgacaagaacctggccaagcttctgatgatttgtccagggaatgaccttggctgactgtgccagaagggctgtagccccaggtttctgatccccagagccccaaaggcgttctctgggatgctggtggccatctccttctcaacccttctcccagcgccctcgctcgggaccactgaggcggtatcactccattctcctgcaaggacccttgagcgtgctgtgggagtgaggctggcttagcctctgaggaccactgcagcctgtcctgacctcaggccccaggttagggggcagctgaggaggggtctctgggtctttccgggtgtgtggccgttttatttccgtgcccttgttttaaaactgcacctctgtcctcaggagcgtggccttgggcagatggagagctgcgtggccggtgccggaatgactgtcaacgccccagtgcgcccggatcacaccaggcctgaaggcagcgccaggcccagtccaggcagcttgcagttcccgggccgcagggacgggcgccggagccccgcagacgttcgcccaagggcgctcccgtatcctcgtctttcacggcccgcctgagcgtccagggcggctgcggatgcgcgcacttcccccgcccggatcccggaggctgcaccgtgcggacgcgactgccgcgggcagggcgcgcgccgggggcggggtaggggggcccgggggctctcccgggcttagcgagtccggccgaggccggggcccggggagggcggagggcggcgctccaggtcctttcccgacccggccgccgagctccgtcctctgcgccgcggcgtccggctcccgccgggtgtcccgcgcagggtcgaccgccggcagctccggaaggaggacgcgcgaggggcgaggagctgccgcctcccctccccagcgctcggggttccccacgccccgccggcccccactggggaccctcccggcccccggaccccagccccgaccccgggagcccacctggctgccagtgcgcgcgcgcgcgcggccggcgcgctgtccctttaacggcccgcgggcacctcccccgccgccgccccgcccccgccgcggtgcggccgccggtgctgggcgaggtcggagaaagtccatgggagccggagcgccgggacgccaagcacttcctgccgcgggcggcgcgccgcagctgcccaggccggaccgggccgggcgcccgcaggtaccgccaacttggcgcgcgcggccgcccccgggttacgccgccgggcggggtcgtcccacgggccgggcccgcacttcccgcaaactccgcggccgcccaa

SEQ ID NO: 43151 - DNA, 2300 bp, Homo sapien
atgagaggcccccagtgacagcagtgggtttgggagtcatgggtttggcagtgaggagcctggcaccagaggtcagtgttcggcctgggggatgggggagggtgggcggccctggaccaatccctgagcctggaccacagagaaggtgtccagcccaaggcaggcgcgaagctgagggggagctgggcgggccggggagggaggaatcagaggggctctggggagggcggcccctgggtggagacgggtgggagggaggcctggaggtggggagcggctccatctcaggctgaacagagtgctgagtcaggaagtcacagccgggcgcggggtgtggaggaagccaccaaagccagcccggggctgttgacttagtggggtctgattttcagtctgtgcctggcccagggggattgtgccgagtggctcccagagcccccctttccccgtcgtccaccacacggggacaccagcttgggcaccagaccgggggtctctgttgctgaaaagtggaatccaagctgaggagccagcagagggcaggcagtggctggaagggggtggtgctggggatttcaagatctaagatgctcggtcaagatgggccacgtgctgtcccatccccagcacagggtggcctcggaaggctgccccgtcagagcccccatgtgcagcctccacaggcaaaaccaccccaaacgcacacacacaggaatgtcctccacctcccgcccctccgcagggggcaggacaggacagcaggggctgagggggaaggtgcccggctccaaacacagcccccagcaggaaggacggcagggccaggcgcggcccccactccagaccagagcatgactcccccggtgccgctgcgtcgatggtgatattgatgctccgtgatcttggaagggcctgtcccctccagcgtgcgatcggaggagggcgcgggccctggcagtgctgtgagtgctgattcagcgttttctgggggagacaaacgtgcttcgatctgcagaggccagtgcgtttctcttcttccttatgggtctcctttggaaagggcccctctctgcccaggccctccctgcaggcctccgctcatgccctcggaggcgggggctgccctgcacccagccccggtgagccgcacttcccatgcagcaggctgcagaggccgcagtccagaaacaccccccaccccaccgcctggcgcgcctcctgacggttcccaaaagagagagcgccccgccgcaccagcatccttgcccaggcggggccgtccgggtgcagctgattcagcggctcctggcccggcgcccctcccccagcccagctgggcagcgtgcccgggcatgccggcagctgtgtcacacgggctctggcagggctgctgtggcgcgcactgcgcctgggggcggggttgcaggctgctgcggcgggcgggctgccaggcgccccctccctgcggggccgctccccttccgtgcagtccttgtatggcctcctgcagaggagaggccccgtgggaggcggaaggcagagctgggtcttggtgctcctgggctaccgtcagcccccaggaaataatcacatcccaaagccccgtcagcggatccaccgccacatccagagtctccccatagcccgggtcggggccgcgttcctccatctcaggccagccctgctggggccacctgccgtcctgacctgggcggagactggaaggggcaggtggggcggggcccaagagtcctacccgactaatggggacagccggagccaaggggctctcagggcagcaggagggccatgcaggggtgagccacagcccccagggcccctcctgccagcttcgctgcgcccatgagcttgggtttgcctctagctgagggcatggggcaggcctggggagccggtaggcgctgacccagcggtgacccgggcccaggggaggagggcgccggctctatttgggaaggggcttcgtaaaggggcttggttaatttatgggagaacctcggtgtccccgccctgtgagggctgtgggcgtggggtaaatgcagggcggggaggggagaggggtcagggctgaggaggagaagcaggggcaggaggcagggcggggagggcagaggggtcagggctgaggaggagaagcaggggcaggagcggtgaggaagaggggcatttggtcgaggttgggtcaggtaaggacacggtggtaggcaaaggccagggggcaggtggggtgcctgggaggtccgtggtcagaggatgggtgctggtggggcctggagatg

SEQ ID NO: 43152 - DNA, 2300 bp, Homo sapien
tgggtgatgctgacccacatggaggggtctctggcccagcagtcctgggacatcccctgtatgaagaccatatgtctgacatggcacttgccaccctttctggtcatttgcccctcagcctgtccctgtcacaagatgacaggtgcctcgagggtgggggctctgctgtgcctgtgtccttggtacccagagcagggtagcagcgtgggggcaagtgcaggcacgcatgctgtgcttctctgggcgggtgcacagtgggaagcagggggtgtctaatccagagctggagtcaggggactgcagggcagggaggacacgggaaacccacagcaaggagcggggctgtggctctgctcctcccatggcacagccaccagatgggccaggtgtgagccctgatccatggacatgcgaccaccctcaccagcacgcgaaaagtcgagtgacgggtgaccacctgctttacacgccaccctctatctggccacgggcgccatctcacggtgccggcgtcccagcacgagccacatgggaggggagaattatctttggttagtttgtctctaatagtccttaaaacagaagacaaaaaatgaagacaggcatcaagatgctattatctcaatgtttatatatttaaaatgttttatttatttttgtggaggccatgttgccagccaggtcgcccaggctagtcttaaaactcctgggcacaagagatctgaggccggaatgacaggtgtgagccaccacgcccagccttatctcaatagctaaacgtgtggatctgcctcacatctggagaggcagagaggtgagccaccaacaggactattgaggaaggaaggagacctgtttattgattttaagttttttgtagagacaggggcctcactatgttgcccaggctggtctcaaacttctggggcaagtgatccccctgccttggcctcccaaagcggtggaatgacaggcgtgaactagcgcttcttgcctgacacgtttctttcggaatatttgccgccagccatcggtaaagaaaacaggctcttggccttttttgctgtgctacctcctggtggcctttgctcgtccagatgttcctcgaactcctgctcatgtcgggtaaaggcggctctctctcctgtggcggggatggggccacagtggagaaggtagctgtgccagccctcagggcggccctggtccaaaggacaggggcccaggagccagctcgccgtcccgggaggcctgcagccaatgacgggcctggtgggcaggagggcccagcccccttgttccagtgccttgaatttgaagggccacccactttacggtcgccccaggggctgctgaccctgccttcccctcctacccagcagccacacccaggagcgctccccaacacattcctcgctggaaacccccaggacaaccgccagcctgtacgaaccaggcgtgaggacactaacacaagtccccttccttcactggggggcggcgggggggcggccctggggctgctgctgggcctgctcgtgctccggggctgtccctacttcggctgccgacgtcgccgccggcccaccgggcctcgcagctacacacccgatccgtgccgcccgggtccgcgtggcgtcagccgcccccacccttccccgccctcctggagcctggggggcgccctcattcccgccgccgccctgtcctcccagccccaggccgcgcaggaggccttcgcacacggccccgcgaggaccagacctgctcccggtccctgggccgcccacccccgccgggaaagcggcttcctccggggcccggccccaccccagcgacggcagcagcgcgccgggtcgcagacacctcagtccggggccaggaccacggtcaagccctctgctggggccaaaggactgctccacggaagcgcgcctgcgcactgcctctccacgggatgcggtagcgcgtgcgcggaggcgcggcccaggaacggcaagcgcaggcgcagaagaccaggcgcggcaccgagggcgttcgggggagggaacgctacggactgctcgcagcgtgcgcacgcacgcacgcacgcacgccctcgggaagcgacgagtccgggacgcccagcgcgggcccggagcagggggaagggaagtgcggctcggtcggcgcgggtggagggggcgtgaggccgccctacggtggccgtcgagggacggcgctacggctcccacgctaggccaaacgcctccggcggccgcgcccgagagccccttcacctgcagggcgaccccagccgg

SEQ ID NO: 43153 - DNA, 2300 bp, Homo sapien
ggcgcgcccgacacggggcagaggcgggggtggggaccggggcgacgagaggggccccgggaggtgggcgggcgcgcgggcggggcgggcagcgggcgcctccttcagcaccgcggacagcgccaggcccagtggctcccgggctccctgccccgcacgacgcggcgggacttgggagccccgaaccctccaggggacgctgacctaggaggagcgcgtctcgcgccactcggcctggtggccgcgatgctgctggaaacggggctcgagcgcgaccgagcgaggcccggggccgccgccgtctgcaccttgggcgggactcggggtaagccccagcaggacactgaggacagaaacggcaagggcggcagaggcgcgaggaagggggtgcgtgcagggccagcggccaggcaaagaaagtcccgccgctctgcaggcgggacacagagatggaaactgcagagagtgagtttccagatcccagggtggcggggagggcctgacgctggcctgcaagagtgcgggacagcggttggagtggaggcccctagaaaaaaagggggcatcgcaggcacagctggggggcgatggggccgaccaaggggtgctaggttcccccggtgaccagtgcccgtcagctcttgcacacagcccggcccaggtctctggaccccacagcaggggacccaagcctgtgtctcccgcctgaaccaccctccccaagggccattccatcaccacggacgctgggaaataatggaggcattgttggagggctggccagatgccagcagggtgggccgcctccttaacctgccgccgccccttccccagtcctgccacacacgacccctgatcgcttcggcagcagctgacactcagccacctgcacccagcacagcccgcacacactcggctttgcacccgcgtgtccttgccctggcccttcttgggtaacaagtgctgtgcaaagtgaaggggcagaaagctggctgcatgggccactgctcaaaacggacacatcggacctgctgggagctaggagggagggactgtggtttcttgtgcccatccttctgggcctgggcccttaaagctcacagtccagaagccataggcagagtggacagagtattgctgtgagacccacagggagagggacctgcaggatggcatcagcccctggtcccccaacccttcctgtgtgtttctgcgcactgccagggcacccctgcctttgccaagtcctgtgctgccgagggccacccactgctgtgttcttccccgggtggctgcccagggctggtgctggcccagggccctctgggcaggggtgggtgcgtccctctgcctgcaaggacaggtgggttctggagagctcacctgtgtggactggggcaagaggctgaaatatcaggtaagggaccgtgttccaatggagccggagtgctgggggctggaaatggaaggtgtgccctggggcttccccagctcggcccctcacgacccgaggtcttggctgcgtgtccaggacacagagcctgttctctctcaaggattgcccttcctccctgagccgtccggggccgcagttccaggggtggagcccagaagcctgttagcatctgggatcggtccggcaccttgcggttccggtacgcagccctcggcgccacactcaccccttctgcgtttcgggttgagctcccgccgaccatctgctgctcccgaggccaaacctcagcggcgggaggaccctgctgccttctcgacccctctcccgggaaccttagccctcctggcgtgtgctccagctcaggcctctgcctctgggccgctccggcgcaggaagctgcggggccgggacgaacgctggcgggaagccctgacctgggccctcccttaccggtgcccgccctcgggccgggcacgcggggcggcctctgggcaccgcaggtcccggcgcaaaggcgctcagagtccgcagtggcccgggctggtctccgcgacccccggccccgccccgccccgcggccccgccccccggccgctccgccctccgctcggccagaggctccgggccccagggcggcccgcgggcgcagcgcccagcagcacccggagtcgcttggacgccggttcggggctattgcggggtggcgtcgctgggcccgggaaagttcgggactggagagtggcgacgccgggcggcgggacccatggaggcgcgcggggagctgggcccggcccgggagtcggcgggaggcgacctgctgctagcactgctggcgcggagggcg

SEQ ID NO: 43154 - DNA, 2300 bp, Homo sapien
caacagctgattctttcaacaactgtcacagaatggctgggctgagaacgctgcccagggccctgcagctggcgggagaggtgtctggtgggagcggtgtctggtgcgtcagcctgctgcttcgtgtctcactcgagagttgcttctggtttcacactttttaacccctctgtgctttagcagccgtgaccttgccttcattgcttcatccagtgcaggcctgggttattgaagacaccaaagtgtttctcttccagtttgaaaaccaggcaggtttacacgtgggtttcagtgtatttgcctttgaacccttcaaactaaactttagccttttggctggtgttgaatgtctttagctggggtgacctggagtgacctgggacggtgttgtggtttaccgtctccagcttcagcctttccagaaacccttgtggagggcagtgttggctgcaggtttcatcatattgcagtttgaggtcaccactatttggggaacaagcttgcgtcctgctgaggggcaggattttcagcagagcgtcggtggggctgggccgtcgtggaggtggccccaggagtcatatggccatactcagacacaccttgtgtggcctgctcagagctggatgccacctttaggcaatgtttagagtctattttctaaagttttaagtattttaagaggtattgagactaatgaatataatagttcagtaatttaaatgcttatttattttcagtggaaggatttttattaaaaagaagctaattgacatggaaatgtcagtgaaatttcttacctgcaaggaaagtgaacattttgtatttaagtaaactataatgtgcacattttaataaagaaatctgacatttgaaaaaatggtgattcttttgaaatgtgaaccagctctaccagtgggagttgtggtagaggcggtgggtgcagaatggacccctcttttgttcacgtactggacatctgaaatcctagagtttctcctatcgaatcattggcttttgggacacagcccaagggtcggatggaaagtagaagatggaaagcagtgatagatcatctccctggagctgatctggacgagactcacaggacaagacccttgattttacacaggttaaagggcagctgagatgcatgtcagctacacacttcaaagagcacgcgcggcagcccagcctgagggcacctcagaggacccccagcttgcttgagtggccatccctctgcttcctgggtgtgagtgtcctgctaaggctgtttgtggtgttctgtggggtgcccttgaccccgtgttgtcttctgcccctcccctacttttgctgtgccagtgggggcagggcagtggtcaacagtcttgcctgtggctgtggaggaagccggttggcacctccctggccaggctgtgcagaggctggcagtaactcagtcactcgtcaggcaccgagcagacaccagcctgggtgtgtactgggcgattccttcaggccctgcctatgcccaaggtcttgagtcctcagcagtgcttttgttacaggggactgcaggtgcctctcctcctggcagcccggaggggtgcgggctgagctcctcccagaagttgggggttgagttcaaggaggttaagagtggaaagttccctgaccagcaaaacacctgcaggagagtgccccagtgagccctgggctggagttgatcacgcatggggctgccccggggcacggcctgggcactgccttccagaggctgcacgccagaagggtagggtcagtgtcctcctgccctgcggctggacgacccgcttgctgcgaaactcggcgaatcccagcgcctcagcagggcctggagcttagggaggagcgggcacggccaccctgggtctcagaggggtgagggcgggggctgccttgagtgcggcccaacccagccagggagggaggcgcgcccgacacggggcagaggcgggggtggggaccggggcgacgagaggggccccgggaggtgggcgggcgcgcgggcggggcgggcagcgggcgcctccttcagcaccgcggacagcgccaggcccagtggctcccgggctccctgccccgcacgacgcggcgggacttgggagccccgaaccctccaggggacgctgacctaggaggagcgcgtctcgcgccactcggcctggtggccgcgatgctgctggaaacggggctcgagcgcgaccgagcgaggcccggggccgccgccgtctgcaccttgggcgggactcggggtaagccccagcaggacactgagg

SEQ ID NO: 43155 - DNA, 2300 bp, Homo sapien
ggtgcctgtgtgcccctcatgaggataagccctttgcccctgcgtggggtgcccgtgtgcccctcatgaggataagcccttcgcccctgcgtggagtgcctgtgtgcccctcatgaggataagccctttgcctctgtgtggagtgcctgtgtgcccctcatgaggataagccctttgcctctgcgtggagtgcctgtgtgcccctcggataagcccaatgaaaaagtaaacaacttgaatcaggttagaaaaagaacagtgagaaaaatgaggctgggcacaggtgaatcatttgagtctaggagttccagaccagcctgggcaacatagtaagaccccatctatactaaaaaaaagactagccaggtctggtggtgtgccactgtagtcccagctactcaggaggctgaggtgggaggatcacttgagcctcaaaggtcaaggctgcaatgagctgagatcctgtcaccgcactccagcctgggcgacagagtcagactccatctcaaaaaaaaaagaaagaaaatgaaaaatggttgagaaagttaagtaacgtcctgaggctggaggggccccgctcctcctcaccttggggagaaggacagcgtgaggagaaggacagcgtgaggctagcctgccctacactgggtggccccttcccctggcctgaagttgcagcacctgcaggcttccagcatgtgctggtttagccacggttgactctgcggctcttggtgactcaccacgccgggctccgaggtgcagggacacagcagtgagaagataggacgtgtttcctgtctcttggggcttccagttcagcctcctcaaagatcgactggggcatagagggcgccttacagaagcccagaacaccgcagtttcttaagtatttttctttccttttgaaaaagaggccaggctcacacctgtaatcccagcactttcagaggctgagatgagaggattacttgagcccaggagtctgagaccagcccaggttgatagtgagactccagcctatgacaaataaaacattagccgggcgtggtggagtatgtctgtggctacatctactcaaggggctgaggtgggaggatcatttgagcccaggaggttgaggctgcagtgagctgaaattgcaccactgcactccagcctgggcaacagagaaagatcctgtctcaaaaatagataaatgagtgaaaatacaaaagataaagctggaattcagggtaaccacagaggccattgagcttgttgggagatgctctgagtgcttgggggcctggctctgccaacgaggtggcccattccaggcctggggcacagcactgcacttggcagagcggcctgaaccactcccagatgtttgtttagtgttaaaagtatcatctagacaacttcttagtgtcaaataatgttaatatttttatagatattttaatgtttttgcaaatagcactgctacattctgtctttggaaacaagctccacgtcacactgaagtgctcaataatggcattgagggtgtcctcagaaggcagctccaccctgtccacacagcgtgggcacacagggggctcagctccaccctgtccacacagggtgggcacgcagggagctcaggggcctgacatcagggaggggctgacgtccaccccaggccccgacttccagatgcctcactcagggctggcagattgtgggcgcgtcggtgaaggctcttaggcgtgttggaaatcgcagtcagaataaagctcatcttggcagatgctcaacccagctttacaaaacgccttaaggtccccacaaacataaatgagtcatagtacttattacaactggaactggttgtaaatctgtggatttggtgtgtctcctcttatcccccaggtggaagcgcagccggagcccaggcggggtgtcagctgttcccactgactcccatgccccaataaatgcccaaaggatgaaaggggtggcccagagctgtcctgaatgccacggctcctactttaggattttataaaggaggctcttctcacctttgccctcccctctctcacagcgtgaagcctctgcgggccttcttttcgtcttatttgaagtcattgccggatgtgaggaaaaaatcgcttcccttgcctgaaaagccacacaaagaagaaaattcagaaatcgtggtttggagagaatttgacaagcaagtgttcctcttgaactgaagcccccggagacagtgcgtgtagaccgaaggctgcgtgcttgcagggcgggtttactcagaaacccacccc

SEQ ID NO: 43156 - DNA, 2300 bp, Homo sapien
tggtgatatgttccgtctcttccaggcatgcttttaacagaacctctggagtttgagatcatagctcgctctcagaaaagactcttactctttttacatgatttatagtggaatcattgatttagacaagtgggcagaatcggaatacaaggcaaaaaagagcctcatcagtatctcagtgacaggcagacataacgttccctcccgttcagaaatcactgggcttccggtcacaaggctgtgccagggcagcaccccacgtggctggctccattcctccaggcaggtccatttgctgggtgcctgggtctcgcctctgcacctgcctctcccacggtgcggcgtgccctgccacactgccgactctgctgaggcctccaggctccaggatagccagcacccatcccttgacccagtggtgcccctttaggctgtcccctcaaagtctcagggcctggaaggacccctacagagtgaggagccaggaaatatttgtgaattgttggcagtgcaatttttacatcccagaggaagaacacaaatcttttaaaaagaaaacctcactggtcagcttcggaaaccatgactttgatactggtgactgaagcacgagccaggcactccccttcctcatgtgagtcattccgctgggttgcagtgagggcaggtctctctttacagaattgtcccagctcatcatgagcaaacggtgagagatgacacgtcaccatttcactgcagccctggtgcattaatgcatttaggtcgtgatcactaaggagagaggcgtcgcttgcctctgggtggaagcatgttccactacctacaaagtaatgtcaccaaacaaatcagacaagaatctagatctgagtgccctgttacagaaatgccaggagtccgggatgttgtcagtcaaacccagagaaggaaagtgccaggacccaccagcagtaaccaacaagcctcgctgggatcttgattcaaacaaactttaaacgaacaaatagggactttttttttttcttaaggtggagcctccccctgtcgccggctcactgcagcctgtgccttccgggctcaagcggtcctcccacctcagcctctccagtagctgggaccgcaggtgtgcgccaccaacgcccagctaattttttgtattttttttttagagacagggttttaccatgttgcccaggctggtctcaaactcctgggcttaaacgatctgcccacctcggcctcccaaagtgctgggattccaggcatgagccaccatgcccagtggagagccttcatctttcagaggcaaagcctggtgggttttgtgtagaaatgacgtgctgagatttgttgtgggacagttctgaaagtgggtggagactttggcaaaacaggattcaccttgagctgataattattgatccaagaggtagaatgtgtgggatttgttacatttttatctctattttatttgcatgttagaaattttccatagcaaaaactttagagataggaacaaaaaaatttatggttccttttagcctccccaaaatggcataggtgttccagggtttgcgggcagtgtctgggatggtgttggaaaccacttcacatgtgtctgtgcacgcatccttgccttgaaagaccctgctcagatgctgccagtactcgctggagtgagaacacgggaatgtttttgccaaacagcctggaccgtatctgattaatctgcacgtacttgcttgctgtcctgacttaagtgccggccgctgacagccgcgtctgttaccagcgctttcatccatcagggtgtcatttaattaggggcccacagccttgtccctgctccgtgatgtgcaggttcagcacaaatccgcttgttctgtgactatctgtggtaggagaggcatcgtgctgttggtggagttctctctcctagctccacatagacgctctgtgtgatgagggcctaactgatgacctagagggggcaggtgggctggtctcgcaggtggccgcagcctggagtggggactgctgggtcctgggcttcccgggagtccagtgctcaccacactgaaggtcatgctcctgcttttcagactgggccagtgccattcgcgtcgcagctctggactgcatggaagagaagaaccaggccgtgtgccatgactacgacatccacttctaccccaccttccgggtgagtatcacgcggctgcttgtccgttgaaattcaccttctaccccaccttccaggtgagcatcacgcggctgcttgtctgttgaaattcgccaca

SEQ ID NO: 43157 - DNA, 2300 bp, Homo sapien
accccagcagctctcgctgtgtgccaggcacatggacacgcaccacacaaaccccaccgtgtgccaggcacacggacaagcaccgcacaaaccccactgtgagccactaggcacatggacaagcactgcacaaaccccactgtgtgccaggcacatggacaagcaccgcagaaaccccacgcctcagtgaccctccacaccttgcgggacgggcagccctcaggtgacagaaccgaggctcagagagggaaagcaacttgtgccaggtcacacagcctcatagcccagctcggcctaacaaagccagagccctcgggggtgcaggtttccccacaagttctgatataatgttggggctctcccggcccagggacacaagctcccagctctctgcatcaaggaaggagaccaggagaagctcccccagcaatgacagctacgaggctgcaaatctctccctccctccaccatttgtgcaatgtcttttgtccccacttctcttcaccagcctcccaccactaacccaggggacccacaaggggctcacagtgttggtgtggaccctctgtgggcctcctgatggcagcagcgcctggggaaagagggctgagctgaggcctggcacaggcagggcccccagcagcccctgcccttacaatgggatgctggctcaggtgcccgaagcccaaaggaggtggcccggaaggttggagcttcaatcgaaggcctgttctctgcccgcagccaggcccagggctgtggcaaaggagggtggtgccccagccaacaccactgtccctgccggccagcagccacggccccggctggaagggagcaaggctctgcctggcttctgtggtctttgggggagggcacgtgggcccagcaggcagcttgcgctgcgctcagggcacagatggttctcattcccgttgcctcccttacacaggaaaaacaaaccagcccggggccaacagacccctttttaacctcgtgtttattttccttcccatgcttgaaaacgctgactgtcctgtgggcggcagctgctgagggtcttgccaggacggcactttcctgacctcagggcagctctcccagggaggggctggggtgcacggaggggccccgaaggaatgcagcccatttcctgctcctggacttctccgagtcatacccggggtcgcagctgcctttcaagggcctggagtctcctgacaccaccggaaggcccaggatgctgtcgggggcaggacagaacccggggaggccggctgtgggcctcgctggctgcggagaaccccccaagccatcgggagctgagggtgggtggaggggaagccacgtcacaccacataggcccacagggctccaagaattcagaggaggaggaggaggcggtaggggctggggtcccgggaccccgggtgggcacagcctactgtgccacctgcatcctccctaagcctgcacagtgcccaggaggaaggaaggggcaggctgcatccccattccgggggagcttgggaggggaatgtggccacccagggtctcagaggtggggggcttaccaaccgtcccacaggccaagcagagcctgtatttgtcatcggtgccccaggtttctctaaagcaggcagacagcatccccacggcctgcgccccatggcccaaggcagaagtttggagaagggggcaaagccacgttggggctgcacagaagaggagggtaggacccccgaggcgtagggcgcccaccaagaaaggcaaggaggcctcagcagcccctccccacgtgggtgaggctgcggggctcaccaggcggcctgtggatgaaaggagcccagaggccagtgtggctgcactgtgacccagggacccccgcgggccctcagaagtccccaggggaccagcagcaaggccaggcccaggccctctcccctgcattccctggggtggggtgggctggggcccacaccccctcccccctcccccctccccggggactgcccgcctcacggcgcccctccccccgcgtccgccccgccccccgcagagggaggcacgcggcggtggccgcccggtccgcgccccctccccgcgcgggcggcggtgacatcacggccacggcggcgggaggggcggcggcgccccgcgcacatcacttcctcggcgcctccccgggggaggacgggcgaacgaggcgcggacggacaggcggacagcagggcggacagcagggaggacagcagggcgggcagggggcggacggccacggcgcggggggcgctcccggctcc

SEQ ID NO: 43158 - DNA, 2300 bp, Homo sapien
cccgtctggcccgcagcttccactggcccagaacacgtctaggcatccatgctctgaagccagctccgaccaggaaccgcctgcccaaaccgggctgtggctacacggtggggtgcagactcccggggggacctcgtcacaggccctgctggagggcttggcgcgcttcccccaagtctgggcctgactccaccctggagctcaactggactccctgcttagggggatgcaaggctgggtctggggtctctctgagtggtccccctgagcactgcccctgccaggggctggctcctgcctggcgtgtccccaggggaccccaggcttctagctgtagcctggagaatgcccaactctatggtcagctgtgcaggcctcacccaaggctaaggtcttggacacccgtctctcacagctccacacacacactctctcacagctccacacactcacactcaaactcactccagccagggctgctatccatccccctcacagcacggccgccctggagcacatgcggccctgcacagccgatcagatcagcggaggaaacccttgaaaatcctttagggcaggcccctggcagcagctgccagcaaaatcaccctcacgcccctcccctgcgtggggcccaggagccaggctaggggctcagcgctccatccaggacggcacaatggggctgtgtctgggaccaaagcagagagcagaccggaggcagcaaggcctctgtccgccgtgccgccaccagtacctcatttcgggtgccccaggcagaggcttgctgcttggctggggccagagaatccttgggggccaggctaggcgccccccgggatcagctgctgggacccctatcagggaggtcaccaggttttagggatgtccagaggacaatagtgtccctcgctctggggagccaggcctgcctctgacggctgccacccattcgcaagcccctgcctggacctcacgctcgtgtggctctgcctgaggcctggtaccacccagccttgcttggggctccaggcacctgcccggctgggcccagggcagcccctggggggacattgggagtcaccaggcaggcatgccacctggggcagggccaccctgtcatccccaaaggcgtggggcacagagcccagtcactgggatcacccaggaatgtgcccggagagtagatgccttttcaggcaggtacacacccacctggctggctcccttccaacccagctggatcccactgggctcgtggagggctggtgaggggcagagccccatccagagcagccaggtctctttggccatgatgcccctgagtgccccgggcatggcagggccaggcttgggagggaagcaccccacggtgcccctgccaggtgccaggggagtgaggctggagaagctgcccaccccgcctccagccccccggccccccacccccttccccttggcttgggggaaagagggcttcaggggacgcccacgcgggcacacgccgggctgggctcggcctggagggaggggcgcgtcctcagccacgctgcgcgcccgcgagagctgcctttgttcccaactgcagcctcccccgcgtcccgacccggcccggtccggtcccagccccggccccggccccggccccggcccgtcctacctggagtagaggcgcctggcggccgggcccgggagctcgtcggccacgggcggggccgggcccgccatgggtcggggacgcgggagcgggagccgggagcgccccccgcgccgtggccgtccgccccctgcccgccctgctgtcctccctgctgtccgccctgctgtccgcctgtccgtccgcgcctcgttcgcccgtcctcccccggggaggcgccgaggaagtgatgtgcgcggggcgccgccgcccctcccgccgccgtggccgtgatgtcaccgccgcccgcgcggggagggggcgcggaccgggcggccaccgccgcgtgcctccctctgcggggggcggggcggacgcggggggaggggcgccgtgaggcgggcagtccccggggaggggggaggggggagggggtgtgggccccagcccaccccaccccagggaatgcaggggagagggcctgggcctggccttgctgctggtcccctggggacttctgagggcccgcgggggtccctgggtcacagtgcagccacactggcctctgggctcctttcatccacaggccgcctggtgagccccgcagcctcacccacgtggggaggggctgctgaggcctccttgcctttcttggtgggcgccc

SEQ ID NO: 43159 - DNA, 2300 bp, Homo sapien
ccgacttttaggcccaggcccttcccaggccagaagcctccttcgccttgagcctcggatgccacgtctccggctggaagggaggcgggaggtggctcccatcatcagatctgcggagcagcagcgtctgggctccacagacacccaggcctcaggcctgaagcccctctcctccgatgttgcctggaaggagggggcagtaaaccgagtgagaccacttgaaaagtggctgggtggggcaagtgggccttaatcaggaagccccgtgcgtggcgctggctgcaggatggggcttggctggttgtcatggcgacggtgggctcctgtgacccacgtggcatccggatggccattcccagagggatgggtgaggtggctgtgaggtgcctggcaggtagtgggtgggagggcctggccctgaggtgagaggatcacttgagctcaggagtttgagaccagcctgggcaacatagtgagacccccatctctaccaaaaaaaaaaaaaaaaaaaaaaagctgggcatgatggtgcaaacctgaagtcccagatacttgggaggctgaggtaggaggatggcttgatcctgggagatggaggctgtagtgagccgagatcgcaccactgcactccagcctgggcaacagagcaagaccgtgtctctataaaaataataatggtaacataagttttaaaaatgaaaaatgaaagcaacagaaagcaaacaggaatgatggggccggcctgcaagcagccgaggctgaacccttcccccacttctctgaaatcaggtccctcctgggctccagctgtgcctgccacctcctggggccccccaagctgcgcccttgctgagtcttttgtggctctccgggggcaccctgcagatgggggcccgcctgctcacactggccaccccatggcatctgctgggtgtgtcctccccccgcgaccctccacccagggcagcgcagcagcctgaggcccatgtgacctgtaagagtaggatggaggaggacaccaggccccagagcaggcagcagggaggtgcggagccgggcagccacggagtgaccccacactcctccccggcagctgagtgccaagggcagctccccaaggcccagggtgggggtccctcggtgagcagggctagggtggcagctgacgcacagggtgcttgggggttgtgcagggcccagggtgaggggtttcttctctaaagtccctgcccgaaggtgggggaccacggccaagcagggcgttggtgttcagaagagggcctggcccttggggttaggtggcgctcacacggcggagttcaccttgggatggggcgccatccacatcttcccacagcagcgctgggggtggcgggcagcacctgggaacagcgggttctcaggcctgtcctggctggcagcggcgagcgcttagctctgtgggtgggggaccaggaggagaggggctgggactggctaacccgcagccacacctccgcagcactggtctcccctggagacttggaggctgactgaatccccaggccctggctgggagagcttgggggtgggggaggagccgagatcagatccccaccccacccgacccccatgtggccttcacaagcccccactaccgtctgggagcctcagttgttcttggtgggaattaggggggcctctcccagcagctgtggtcgctcaggaggatggctagggtgcctggcccctgcagcccgtacctctgggatttgggtgaaggcagggtatgggggccacaccccctgcaacaccggcccctgggcctgagggtcttgccggggtcacaaactcacacctttgccccagtggcgttcctgaccttggccgcacaaggggtggacaggaggtgctggcagaggtgtgctggctggggcgcccttgggccgcacacgtgcttccaggcctgtatcccaaagagacacttaggtctgtgagcacagatgtggtgtgtgccctagcccacccaggggcgtcgtctgtagtgaagccacggaggtgctccggccccggggcgactttgccagggctgggccatgacgccaagttcctctgcacaggatggaggcgtcctgcctagagctggcgctggagggcgagcgtctgtgcaaggcgggcgacttcaagacaggcgtggccttctttgaggctgctgtgcaggtgggcaccgaggacctgaagacactgagtgccatctacagccagctgggcaacgcctacttctacctgaaggagcacggccgggcgctggaataccacaa

SEQ ID NO: 43160 - DNA, 2300 bp, Homo sapien
ggtggcctgggtcccatcccctgctctgccactgaccatgctgtgacccaggagtggcaacgccactgtggggactgagccagacagtgtggacattgggccggccactgacccctggcacaagcgggtggggtccccctcccatccctcaattcgccaccctgttgcccccaccacccatgtatgtatgtaaatatcactctctggagagagacaggctggcaaaccacaggcccctaagtactgtcttgtgtgcaggtctggggtgggtggtggccggaacaaggggctcagagccacaggcctgtggcctttcacaggcagcagagaggagaggtcttttgaaaggctgccctgcctggaggcttaaaagtggcccaaggttttcctttgtggcgtggtgaggagaatgttctggaatagacagaggtgccggttgcacagcatgaatgtacaaaatgccagtggatcgtccacgtgaaaatgatcaaattcctgttagacgcatttccctccaatataaaaacaaccccctcacccagtgacttggagggtgcccgtaagggtggagggagtgcaagggaggaggcttgccggccgccagggggcgagcgaggccaagggcccagaaactgcccgcaaaggcagagccggccacaggccaggttgcttggactctgcgctaatccttttaatgggaaggaaaaaggcagagctgattggggcttatgcttgaaggtggcagaatttgtgggaggtccagctgggggcattatcctgtcatccggccaatgccccttgggcctgggggcccctgatgaccctcgaagccagggtcatgctggggccgtgaccaccaggggaggggctggggctgggggctggcctggagagggcgggtatgaatctggtctccctctctggcagagtgggcgagggccgggcgtgctggagcctgggaaatgcctacgtgtccatggggcgcccagcgcaggccctgaccttcgccaagaagcacctgcagatctcccaggaggtgagccaggcctgcccccagaagtcccgggcactgcccagcccactccagacgggccgggtcccctctgccccgagcgagcgtgtgcgtgcctgggcccccctcatcctttcagggccattgcagctgcctggtccttccgaggcctggtgatgacatgtctaccatgcccgggggtttttcctgcagcccccagctggtgccttcctgggcagctgcgtctcctcctccttggagagtttgcacagggtctctgtgggctccgcccatcagcgccctcctactgtggtcagggcggaacatcacagatgaactgtgggcctcccggctcccggcctgtccttacatcacccactcccacgccacctccctctgcacaccccgagcctgttcatgctaaagacggtgccagcccctactgaccaccatagacccatgtaggaggtggccgggtggggaggcctgcaggtgcccaggtgagggtggagaggggcgggcatgggaaggtcagcagagccctcgtctgaagagcttcactggcagccagcaggcagcccccgtgtccctctgagtgcaggctacagcctccagggccttccagggctccatgtggccctccccccaaccccatgccacctctcttctgcttgacttaagcaaacagttagttcctgagtgatgtggatgttcccgggagggtcccccacagagcctcggcgcacaaggcaggggctgagagaggtgcagccgggcggggccgggcccctcgcgcaccggagggcacaggcccaaccgcctgggaccccaagcatctctggggtgaactaggggctgttgaggacctgtggggccacctcacccagggacagacccccagactccacctccgggtccacagtgagtcctggttccctcagaggcccaggggtcagtgaccagttcaggtcactcagaaggtcagggacgggtgtactgggggccattaaggtccccttggagcccacagcagggcccccagccacacctgcccgctccgccaccccactcgccgcagatcggggaccgccatggggagctcacggcccgcatgaacgtggcgcagctgcagctggtgctcggccgcctgaccagcccggcagcctcagagaagcctgacctggccggctatgaggcccagggtgagttccagggttgtgggggggtcttgctccccacaggcacggaccgcatcaggagctgcggaggggtgggatcgaggccaggc

SEQ ID NO: 43161 - DNA, 2300 bp, Homo sapien
caggggaaggtggccttggggcccagggtcctgcttctgaggggctccaggagccccaaactatccagagcctttccccgtaccaggcactgagccacggttttgcacctgcagtcgtgggcccctgcccccatgtgagggaggcatcagcccctcaacagctggccccagcctcagggaaggggagggctgcccgacataggaccctgagaggggctctgccatggggcctgggacatggcccctgacgggtcctgcctttcccaggagggaccttgctcagtccacctgggccccgggtcacctgggggagtccagattgggccagaggcagaggccccccgcggctgtgccctaggtcatcatagcccaggagccagttccttttagaccaggaggccacatcctcctggggaggtacctgtgtggccccaactggcactcaggctggcaaccccagtgccaccctctgcctggacctgcagctcccagagccctggcccaagtggatgtggccctccccacagactgggccaattctcccctccctcctggctggggaatccgggggagtgggggtgttgccttaggcctgagccaggctgcaggaggagagccctgcggggagaagggggtgctagaactctccctcctcaggtctgcctcagggacaggaggtacctcaggcttccgtgacagctggggactgactccaggggccagagccaggtggggtctctcctaaaacagggctgtccacagggccctcggctcagctcaagggtctgaatcccagctcttttttgctccagcatgaccttgggtaggtcacacatgtctctaggccccactctcctgtgccctgggccgagtccagcagaaaactggaagcaggacgggagccctagtcctgggctgtgggggtcaggtgtcgggaattccagttgtctgtcagacagctgtccgtctcctgggctgtgggggtcaggtattgggaattccaggcagcatcggggacccgggaggtgccatctccaccaacattgcgtctcttgttaactcgttcagctgtgagcccagcatttgcagacctggaagaggccaccagccgtgagatggacaggctggggccgggcaggggctgccagcgccggtcgggaggtggacggggcttggaaccatcacaaacacccttcagccctggggcccggaccaggccctgtgaggctgggtcacggggtggacctgcttcagctgggccccttggggggccacaggagaccacgccctccagcctcccttgtttgggtgtgtggactgaggcccagggcggggttcattccttcgagttcattcacacagcagacaccggtgagggctgtgtagggcatggacacagggagctcatggcagggctgacacagggtgtggtgggcacagggacaggaggcacgggaggcttcccgggatgtctgggaagtgttccaggccaaggctggggaggctggcccagggcaggtgacggacagaggcctggactggggtagcacccatgagaggggagaagtccggggcagtcggcgggtgccgagggtgagtgacacgtcctgggggaggggtagccgggtgccgagggtggatgacacatcctgggagaggggtagccgggtgccgagggtggtgacacgtcctggggtaggggtagccgggtgctgagggtgggtgacacgtcctgggggaggggtagccgggtgccgagggtgggtgacacgtcctgggggaggggtagccgggtgccgagggtgggtgacacgtcctgggggaggggtagccgggtgccgagggtgggtgacacgtcctgggggaggggtagccgggtgccgagggtgggtgacacgtcctgggggaggggtagccgggtgccgagggtgggtgacacgtcctgggggaggggtagccgggtgccgagggtgggtgacacgtcctgggggaggggtagccgggtgccgagggtgggtgacacgtcctgggggaggggtagccgggtgccgagggtgggtgacacgtcctgggggaggggtagccgggtgccgagggtgggtgacacgttctgggggaggggtagccgacagggggcaggttagagtcccgatcttggccagggtctcagaagtgtgtgtggcctgggcaagcagcccccggtctcgtctgggggtctgcggggctagctttggctgcggtgaccccactccctccccagagcatcccgagggccccgtcttcggacgaggagtgcttct

SEQ ID NO: 43162 - DNA, 2300 bp, Homo sapien
cagcagtggctggtcccaacatgggtagttctgttgcagccactgggatgggggccgggcctcatctggggcaggagaagagtccagggattcactggtgcccggcacctcaacctggagaaaacaccgcagcagcactcctggccagccaagggcaacactgacagcccctcccagggttgcggggccggcagggggtgacagagacacgctcctgtgggcagctcttcccggccagtgcagcgaccccgcagctgcagcagggctgggtggccactcttgcatcatcagcagccggccgtggaggagggagggcacagccagggatgtgagcaggcgtcggtcaggggaatgaggaagtcccacaagaaccggctcccccagctgctgtgctggtgggagggccactggccaacctgctctcacccagcttgggctggccatagtgccaggcagttgccctcagctcctctgcccattccagccatggaggtggctaaccttgcaggctccagggcgtgatgggagtgtccaggaggcagaggccagagggggtcatgctgtagggggagttcctctctcagaccccatctgtgcctcccccgctgcgtatctgggtgacatggatgccaacgggcaggagcaagggctgggaaaggctgcggaggggccctcggctggtctggtggggagcggggtcactgtgtctctgctgcctccctgggggatccagcgtggggatgggacatggagctgggcacctctcctggatgcccctgggctgatccccctcgatgccctgacgagagccctggcccagcgtctgagaaggagtgggagctgggcccgggtgggggcaggagccggcatcgctctcagcactgccccacactccccagcctgcctgctgaggccatgtcggactacgagaacgatgacgagtgctggagcgtcctggagggcttccgggtgacgctcacctcggtcatcgacccctcacgcatcacaccttacctgcggcagtgcaaggtcctgaaccccgatgatgaggagcaggtgctcagcgaccccaacctggtcatccgcaaacggaaagtgggtcagtgttgccccgcgggccccaggccccaaacccaaccacagagtcagctcggaggtggctgcacgctctgccaccctgaccctcaaccccaggagagccccgcctggctttgcccctggcctctgactgaggcccaacctcaaccctggcacgtggcccgtcccccagcctctcctgccggcttggtgctgccaagaggggcagcggggctcccaccgcagcgggggctcctgagacagccaaggggcgggtgggcagcacttggtccccagcctagtaccaagacccgcagggtacctcatccaagacccagaccacggcacacctcatctgcatgccagcctccacctgtccctgcccccaggcccacccaccccagccctctgcctcgcctgtgccccgcccccagttaggcctctctggcccgcaggtgtgctcctggacatcctgcagcggaccggccacaagggctacgtggccttcctcgagagcctggagctctactacccgcagctgtacaagaaggtcacaggcaaggagccggcccgcgtcttctccatgatcatcggtgagtgacgggggaggcggggccgacaggggaggcgctggcggggagcgggcagtggtgttgggtcctctgcctggcccccatccctaggagccctgagctcctgccacagcgcagggcgtgatggagctgggccaccggggaacacggcaccatctgacactggcctggcccacagacgcgtccggggagtcaggcctgactcagctgctgatgactgaggtcatgaagctgcagaagaaggtgcaggacctgaccgcgctgctgagctccaaagatgacttcatcaaggagctgcgggtgaaggacagcctgctgcgcaagcaccaggagcgtgtgcagaggctcaaggaggagtgcgaggccggcagccgcgagctcaagcgctgcaaggaggagaactacgacctggccatgcgcctggcgcaccagagtgaggagaagggcgccgcgctcatgcggaaccgtgacctgcagctggaggtgcgcccgctgcccccgggaaaccaggccaccctcgcctggcctggcggggtctgcaggccggggcggtcgggggtggccccacgggtctgcggtcaccgcctggaggggacagccaggctcactggaccttctgcagattgacca

SEQ ID NO: 43163 - DNA, 2300 bp, Homo sapien
agagacagcccacccccagcctgcaagagaggcagccagaggccaggtatctgctggccgctgactgaccaggtccgcagtgaacagaggcgggcctgccgactgactgtgtggcatggagcatggctgttccccaagtgcacacctgaacacttggaggaataaagttctgtttttaattgtggagctggacacaggctgttgtggttttgttgtcctgaggtaccgggcagtgtacagggaccccccacctggctggggtcaggctgctgcctagtggctgagccaccctagtgcaggcagttcgggaacaagcagggtgctgggggcccagagctggggtcctggaaggcctcccgtaccccggctgccctcctgtcagagaagcaggctttctttcgcccatttcctggaaagcatctgtggctttgtccttcaggctagccggcaccctccccagatggctgccagccctcgcgctgccctggctgacccagggggttccctggaacagatgacctggctaccccgacacggcggcagcccccaccctccactgttccttttgcatgggcctttattggcataagactagcccccatcttctccgtctgtcccctagctccctttcctttgtctctgtggcagcagcgcccccaggcccttggctatctgggcttcgatccttcactggagccactgtggggcctcagccctgggcacctggcagacgggacggtcccatggccgacctcactcctgagtatgtgttgctgtgcctggttctctagtctggtgcctagtctgggggccactctgatctgtgggttatttagcggtatattatttaatttccaaatatttagagattttgccgatatctgttaccgatttttagcttccgatatggttagagaacatggtatgtgtgttcactcctaaggacacacaccacagggaagtcactaaggtccgcgttttaaacgctggggaaacactgggtcatgagggcctggtgccagctccggttcgctccctggcagggcccaggatggccccggcctgcacactcgctcatgttgatggtgaggggtccagcaggggcacggccccctggaatgtggcattcccgagagcccaggaggacccctaactgtccgctccttaatgtgtgatgtcagacgttgtccgcacagaggcctgagggctggaggctgagaacggttaggcaagctccacaccagcttccttgccttccagcctggcggccccttctcgaacctgttgggtggcaactcagttcaaccagctttaccgggtgaggcggggcctgggggttcccaagcctgcagggatgaggctctggcagcccacacgctgaagtgcacagttcagggcagactctgctgtccgttgtccctggatgggggccgagctgtgccctgctgtcaccggctcttctgaagctggtttgggggaccccgagagtggcctcagtcctcacatgcatcctggtggagagcagggatgcctcatgatggggataacgaggataacgacacttctggaagggacgtttctcccccgtgtgcagctgggtggtggccgatgccatggcccctggcaggctgctgtggcctcctgggctccataaggtgggctgcagcccttctgtgaccaaggcgtgtgctggccatgccgtgtggctgtgtgcccccctgcacatgccctgccccgctgtcctgagatgctggcgagggcgagggtgttcgcacagagcaaagcatgccttactgaagaagtctccagaagcctgtgaccaggtcaaagtggctgggtgcgggctggccttgtccagccccctgggggtctctgctgtctcttctacttgccaggtgccagggctgggcctctggggcatccccaggacccccagcccccggccaggctgggagggctgggagcagctttcctctggagggcagcggacttccacttccgtctgcctcttggggcctcctgggctgggcgaatcagaaagcaggtcaccagggactgtccccctgtgggaggactggcgggactgtggagttaagcagaacccatcaggaagtgcacaggcgtccggcgtgctcctccctccctgcagccccgggcagcatctcccagaggctccgcggcccaggctcctggtgtgtctgcagtgcaggtggctcctggaagaccctcaggtgggtgggtctggtgctttctgaaaggtggccaggaaggttggcgttggcctagttcaggatcctggc

SEQ ID NO: 43164 - DNA, 2300 bp, Homo sapien
ctctgtgcttccagcccccccgcctctccctgcagaccccaccctgcccccaaccccccagaagagctcttgagggcacccttaggaggagctgcactggcagggggaacaaggccaggcctttgcctgctgtgcagggcacgacaacgtcccctacccaaggggtcacagccagcagcagcctgcggttcaggagcctccggtgcagagcgtgtctccagcaccgctgcccactctgggtggctctgtgccgtagccactggacatgggatcgggccacatgcttggctccttctgtggccccggagttcctacagaggcgtgtgggaggccagcaccagcccttggggcctcgtcccatttcagggagtggcaggggatagtccagatgctaggagaggtggtccaagccagcagaggacacctgagctgctgactctcctctctttcatttccaggcatcctcaagtgcccagagcaccccaggtaactctgcttctctgccctggtggggaagagacctaacctggccctggcggggaagaggcctaacctggccctggctttcacccacagcccccaagcagcacagcctgtggcccctggtgacagagctccctcgagtcccaccacagggatgagagtccggctgggccagcttggagctccctgggctccccttgcagccctaaggcttccccagcatggggcccagaggcaggggtcgtctggagcgagcgtccgcccatgcccaacaccggcaagctgggctgccggctgatctcagccagcattaaatgggctgggtttcccagagtgcccactgccctggctttggccggagcattgccatctggggtagccactgtgacttgggagacccaggatgtgccgcttgaccctctcttggctcaagaccccaggctccccacatggtccctcctgatgaggggatggcagcgaggggctgtccctgggccagatgcctggggcttatcaagtgtgggtctttcctccccacaggccacctcttcccaaacgtgccggctcaagaagcctcaaagagtgccagccacaaagggagccgaagactggcgtccagccgggtggagcgcaccctaccccaggcgtccctgctggcttcaaccggcccccggcccaagcccaagactgtgtcggagctgcttcaggagaagcggcttcaggaggcccgtgccagggaggccacccggggcccggtggtgctcccgtcccagctgctggtctcctcgtctgtgatcctccagccccctctaccacacaccccacacggccgcccagccccgggtcccaccgtcttaaatgtaccgctctctgggcctggggcccccgcggcagccaaacctggcacttctggctcctggcaggaggctgggacttcagccaaggacaagagactctccaccatgcaagccctgcccctcgctcctgtcttctcagaggccgagggcacagcccctgctgcttcccaagcccctgccctgggccccggccagatctctgtgagctgccccgagagtggtctcggacagtctcaggcccccgctgcatcccggaagcagggcctgcctgaggcgccaccctttctccccgcagcccccagccccaccccactgcccgtccagcccctcagcctgacgcacataggagggccacatgtggcgaccagtgtccccctgcctgtcacctgggtgctcacagcccaggggcttctccctgttcctgtaccagctgtggtgagccttcccaggccagcagggacccctggccccgcagggctgctggccactctgctgcctcccctgactgagactcgggcggcccagggccccagggccccagcgttgagcagctcttggcagcccccagccaatatgaacagggaaccggagccttcctgcaggacagacaccccagctcctcccacacacgccctctcccaaagtcctgcagaagcggatggcagtgtggcctttgtccctggagaggcccaggtggccagggagatacctgagcccaggacgtcctcccacgctgaccctcctgaagcagaacccccttggtccgggaggctgccagccttcggtggtgtcatcccagcaactgagccaagggggacgccggggtccccctcagggacacaggagcccagggggcctctgggcctggagaagctgcccctgcgccagcctgggcctgagaagggggccctggacctggagaagccgcccctaccccagcctgggcctgagaagggggcc

SEQ ID NO: 43165 - DNA, 2300 bp, Homo sapien
gctgatgcccctagctcaccccaggctggagtggaggccccctcaactggctgggcccaggatgtctttgcagcaccgatacttagaagctctcaggagccaggaactgtaggcccctgcccagctcccggccgagttagccctggcacgttcctgaaggaatgaatgcccacttaggggagggccccggggcagctctccaggccaggagaccccagagggtgtgcacaggtgaccagggaagcgagtttgtgtggtgcgggcccccaccctctggcctcagtctcctgcacgtgcctggagatcggcctggcctcggcgatcctgagcatgcagggcaggctggggaaaaagcctttcacgtagactttctcatccgttgcttaaccaaaccccaacatgtccgttaacagaggatgaaacaagcacagagaggtccagcgatggccgaaggtcacagccagtaagggccggtcttccggatcgtgaccaggtggccgggtgcctgtccctgtctgtcccctgccttgaggtcccgcgtccacccgcgcccctccagagcgcgcggaggcggcccccagggcggccgcgcgagggcagcatcgagccgttcgcctctctagtcccggcaggccgcagcggccgtcccggcgtgccccgcgcctcaggaggcgggacttccggcgcgcggcgctcttgttctgcagccgccggaagcgtcgagtctgcagtcgcccgggcgacggcggggtccgcgcggccaggtaaggtgtgcgcccagcaggtgaggcgcgggtggcgtcggcagcttcagggctctccccgtggagggggcgctgtcccgaggagcggatagccgaggcccgggacgggggcggggcagcgcccaaagtcggggaaactgaggcccggcgtggcccccgtccggccgagcctgggcgcgcggggattctggccctgggagcccctcggctgggagcgggctgcgggctccgaggaggctccggcggggcggccccggctgcagggcgcccgcgtgcgtctcggggactgcgccggcgattccgcggtggccgagcctcggagggggtttccccagttcacgcagcgagcaggaggcggaactgggcctgggccgggtctgtctcccaagccagtgcctaaacgcccatcgtcctggcgcatcctggggttccctgggcccagccgagtctgggtggcgtccccgcagctggggctggagggaccgcctgctgcgctccgtcttggtgggcagccctcatgaccagcccttgggagaggggtgcggggagagggacagcccctgatgtcagtggctcagcacgtgtgactttgacctccttcctgctgatcattgctcacctgagcgacacggggagggggaggcagcagcctcgtgtgaggcttccagaggaaagcgtctccgccggcccggaggcgctgaaccagcctgcggtcgctgccagctctgcctctggccggctgttaactgagtttacaggttcacaagcatttcgggcataaacaaggggctttgtgaaggagtgaggggacctgggctgctgatgcggctaacggtgctcgcgggtggatgctttggttttgttccagttgggcagggccccagtcagcctccagcagggagagccacgccaaggacgggggagggcgtttctctttgttgttgggtgttttgggctcccgggtctgtgctagtgattcctttagattttctctgctaatgtttcattctcccactctctctctagcgtccttctcccttcagacttcctggaccacagttcctaagaaaaaagcttgacaaacatttgttagtgtcaggcactgccacgttccaggcgttgttctggatgtacagagaacagccagccttccctttgggagcttccttcccaaccatgctgttagtgcctgccacctgggcagtctcagtgtgtgtctctgtgaacgtttctcaaatgccctctgtggtccggctctgtgtcatgggagagcaggatggccaaagtgggtcacgggctgtgtccttgccctgtagtgactttgccactgcaccccacaccttctacgctgggtggccagtttccatgtggcttggtgtgggagcagagacgggacagtggggcctgtccttgttcatccactccctgcctgtgctggttgcagcctcagagcaggcgggagatgttcttggggcttaggctcctggcagagcacatagcaggagtttgtggggtctgaggttcctgtcccagggt

SEQ ID NO: 43166 - DNA, 2300 bp, Homo sapien
agagcgagactctgtctcaaaaaacaacaacaacaaccagctcctcaggtgctgcaacgctggggacccagtgccccctgaccctcttcccgactttcctacctaggtagcctaaataacgcccacttttcccttctccctcttgccaccgccttcccaccctccggggacttaagcagccacactcgaccctcccagctgtgagccccatgtaaagctggctcctgtggccccagccccccaggtggggcttccccgctccctgatgtcacctcgctgctactctaggatcaagactgaacccttgaaatcccacccccacctgctcttttgggctccagctacaccacatagccagtcacattgacagtcccaccagacacgtgcctggcactgtgttggatggagacaagaagaaaaggttgctgaactactctacctccaaaatgtgtcccgtgggctcctgacgggctctgcttagaacatttcccctttccatagccaaaatctgcaaagaaacaatgtcacccaccatgctggcaggaagtctttatgacctcacatttggtttttttcttttgcacatggagtctccactgcagtggttctcacagtctagagaactttttttttttttttgagacggagtcttgctctgtcgcccaagctggagtgcagtggtgcgatctcggctccctgcaagctccgcctcctgggttcacgccattctcctgcctcatcctcccgagtagctgggactacaggcacctgccaccacgcccggctaatttttttgtattttttgtagagacgggttttcaccctgttagccaggatggtctcaatctcctgacctcatgatccgcctgcctcggcctcccaaagtgctgggattacaggcgtaagccactgcgcccggtcagccgagaaaactttaaaaaaaacacaagctcccagacttgtgaccctggagatggcctgacttgcagactggccctggtgtccgtggtctgaaagcggctcctcagcagattttgaagcccagccggggcaagcgcgtcctcttgtcttgtgacaacccccgaatgtcctcagatcctggcataaccacacaaacactcctgcacaccccgggcacccagcagcacttctgcttgggtagaacgaggacgaaccagatctggccactgcccggctgtggaggcagatggaatgctccagctcggtttccaatcactgcccactaggtgaaggcaccccgactccagccccacgaggaaagcgggcgggctcctgtgctccccgggcactaaccatcctgtactggaactgtctgtcttgggggaggtctccccgcaaccagactgtgagctcctagcaggggactccgcctttgaattccgagtgcctggcacgcagtgagcgctctgcacattgatgggtcaatggacgagctcgtgctgcagcggaggtgccacacgtggcgcgggaactggaagcgtccccggggccggcgccctcgtctctcacctgtgtctcccacggaagccagcaccgggctgggcacatagcacataaaggccggccgaatgccgaagaagggggagtccaggtccctgccatgggggcgctcacaatttagctgggggagacaagaccggcgctcatagaacgctggagctggaagcaacgacaacagcgactttactgcgtgccggggcggccgccgcccacctggaccgctggactcggcccctgccccgctcaccgtcgggaatggcgaggctccgggctcgggacagcggggtggcgcccgggcggcgctggtagcccgacatcgccgccggcccggcggggcacgacctgcctagcccggcagcggcggctccatggccccggctccgcccgtgccgcggcccgcgtcgcccgcccccgtcgcccgcccccgtcgcccgccgctcggccgcccccgcgcctccgagcctctcgccgctgcttccgctccgagcaccgaaagcgcgtgcctgaacgccttgggccgtcggcgagggggaggggaagccgtgggcggaagcggaagtgacgactgaagcggggcggagacgcaagatggcggctgtggtgctggcggcgacgcggttgctgcggggctcgggttcttggggctgttcgcggctgaggtgagccaaaggcgaaccaggcttcggcctggggcgggggcggctcgagtctttctggacgctccgtcttcggtttctacaggtgacatggcgcccgtgggacgggctcgcacttcggga

SEQ ID NO: 43167 - DNA, 2300 bp, Homo sapien
aaacgtcagagatcaacggacagaccgcagcaaccgagagcctggaccctggtgtcagaaccctgcgggtctaacagagctgggcccccaccggctcagcctcctgaaggagcacgcggtaggtgaagcgcgggggcaaatatgaggcatggcctcggagaaggcccgtcgacccgggaagtgagggggggagaggacccagcagccggggagaggagagacagatgggactgcgtccccgggctcgaggcgcaaagcaaggcagggcccccgtcgcctcggggacaccagtgtcccgaagtgcgagcccgtcccacgggcgccatgtcacctgtagaaaccgaagacggagcgtccagaaagactcgagccgcccccgccccaggccgaagcctggttcgcctttggctcacctcagccgcgaacagccccaagaacccgagccccgcagcaaccgcgtcgccgccagcaccacagccgccatcttgcgtctccgccccgcttcagtcgtcacttccgcttccgcccacggcttcccctccccctcgccgacggcccaaggcgttcaggcacgcgctttcggtgctcggagcggaagcagcggcgagaggctcggaggcgcgggggcggccgagcggcgggcgacgggggcgggcgacgggggcgggcgacgcgggccgcggcacgggcggagccggggccatggagccgccgctgccgggctaggcaggtcgtgccccgccgggccggcggcgatgtcgggctaccagcgccgcccgggcgccaccccgctgtcccgagcccggagcctcgccattcccgacggtgagcggggcaggggccgagtccagcggtccaggtgggcggcggccgccccggcacgcagtaaagtcgctgttgtcgttgcttccagctccagcgttctatgagcgccggtcttgtctcccccagctaaattgtgagcgcccccatggcagggacctggactcccccttcttcggcattcggccggcctttatgtgctatgtgcccagcccggtgctggcttccgtgggagacacaggtgagagacgagggcgccggccccggggacgcttccagttcccgcgccacgtgtggcacctccgctgcagcacgagctcgtccattgacccatcaatgtgcagagcgctcactgcgtgccaggcactcggaattcaaaggcggagtcccctgctaggagctcacagtctggttgcggggagacctcccccaagacagacagttccagtacaggatggttagtgcccggggagcacaggagcccgcccgctttcctcgtggggctggagtcggggtgccttcacctagtgggcagtgattggaaaccgagctggagcattccatctgcctccacagccgggcagtggccagatctggttcgtcctcgttctacccaagcagaagtgctgctgggtgcccggggtgtgcaggagtgtttgtgtggttatgccaggatctgaggacattcgggggttgtcacaagacaagaggacgcgcttgccccggctgggcttcaaaatctgctgaggagccgctttcagaccacggacaccagggccagtctgcaagtcaggccatctccagggtcacaagtctgggagcttgtgttttttttaaagttttctcggctgaccgggcgcagtggcttacgcctgtaatcccagcactttgggaggccgaggcaggcggatcatgaggtcaggagattgagaccatcctggctaacagggtgaaaacccgtctctacaaaaaatacaaaaaaattagccgggcgtggtggcaggtgcctgtagtcccagctactcgggaggatgaggcaggagaatggcgtgaacccaggaggcggagcttgcagggagccgagatcgcaccactgcactccagcttgggcgacagagcaagactccgtctcaaaaaaaaaaaaaaagttctctagactgtgagaaccactgcagtggagactccatgtgcaaaagaaaaaaaccaaatgtgaggtcataaagacttcctgccagcatggtgggtgacattgtttctttgcagattttggctatggaaaggggaaatgttctaagcagagcccgtcaggagcccacgggacacattttggaggtagagtagttcagcaaccttttcttcttgtctccatccaacacagtgccaggcacgtgtctggtgggactgtcaatgtgactggctatgtggtgtagctggagcccaaaagagcaggtgggggtgggatttcaagggttcagtct

SEQ ID NO: 43168 - DNA, 2300 bp, Homo sapien
aaaagtcttttattaacattaacttagcaacttgataatttattaaaataaccattatagacaagaaaaatctcaaacatccttcaaaagtatagtctaaaaaattacaaaactgggtactgaccgaaaatgccaatttttccaaaaagtgagcaattccactaaggtatttcgcttcatatctcgatcctgaattgataagaactagtagtaaaaagaaaattgacaggttacatcagatattcaaaataagatttaatcaagagaaacattttaagatgtcaatatgacatgataatcagatttaattacatgagggtgattgtgctgatggtttcacaggtatatgtgtagctcaacatttatgaaatcgtacactttgtttccactcagggtacaattcataattggcatgctaattacaactaacagtcaactaaagcatgtgcatgttaaaactgcgggaccacccacgacaacacaacagtacttacttcctactgtacaaaactgtccaaacttattctgagatgccacgcgaagcccattatccaatgtggttactttggtttcaaacttttcctgtccatcaactgtagcaaaaacaggcttgggtactccaggtaagggagaagagagggggatgttgggataggcaccaccactactaaaccgtctgtacgcaggaggtccaaacctaaaacagagaaagcggcccagttacaacaggcttgagacaacaaacctgtgatgacctgttaggtgcggttagttatgttttgtctgggttaaaagtgagcatctgcctttctacaggacttatttctacagactttggaagacaaagcagaggctgacaacaaaggctcagccacgggacctggagcaagctggttccgtcctttgggtcttagttgctatctctgtaaaaacagggcttattaacagtaactcactctaagtgcagtttgtacacataaagcacttaacagctctgccctccaacagcaccaccgaagtcttggataaaagccatatcccttattaacctggtccgaaggcggggtgtgacttggcctctgtctccctctccaaactcatctcttgaacccccacactcccataggtcctggtcacactgattcttgtcaattcctggaacacatttgactcatcaaccccaaagcttcttcaccgttccagggcttgccctttgcccatgcctaccccttctttcattcttcagctcttcccttaaatgtcaccctgatggaggactatccctcaccagtctagtctttcctgctattttctatcatgaaaggctgcttgtttactccaaagcatttacgcgactgccgatattttgtttacgctccagcctgtatccatctcctggaggcagcacctccgcacccctgaaacggcgctcgttgtgtggggaggggcgacgcctgtgctgtcggaacaaagttccagcgtggggaaaggcaggcccggtcacttgggtgggaggagcggtgggtacggaaagggttcttaaacgtcagagatcaacggacagaccgcagcaaccgagagcctggaccctggtgtcagaaccctgcgggtctaacagagctgggcccccaccggctcagcctcctgaaggagcacgcggtaggtgaagcgcgggggcaaatatgaggcatggcctcggagaaggcccgtcgacccgggaagtgagggggggagaggacccagcagccggggagaggagagacagatgggactgcgtccccgggctcgaggcgcaaagcaaggcagggcccccgtcgcctcggggacaccagtgtcccgaagtgcgagcccgtcccacgggcgccatgtcacctgtagaaaccgaagacggagcgtccagaaagactcgagccgcccccgccccaggccgaagcctggttcgcctttggctcacctcagccgcgaacagccccaagaacccgagccccgcagcaaccgcgtcgccgccagcaccacagccgccatcttgcgtctccgccccgcttcagtcgtcacttccgcttccgcccacggcttcccctccccctcgccgacggcccaaggcgttcaggcacgcgctttcggtgctcggagcggaagcagcggcgagaggctcggaggcgcgggggcggccgagcggcgggcgacgggggcgggcgacgggggcgggcgacgcgggccgcggcacgggcggagccggggccatggagccgccgctgccgggctaggcaggtcgtgccccgccgggccggcggcgatgt

SEQ ID NO: 43169 - DNA, 2300 bp, Homo sapien
tgatttcgtgcctgtcccatgggccagctctgtgcacttctgactgtgcagtgcctcatgccgggaacagatgttacagtgagacaagctccatacgagccagccattgctgtcccccaagccagccaaggccgggcatgtttccacactcaccagtgggttcgttcagtcaacaggaggctgggatgaaacacttcaccttttgagagagagtatagttacaaaaatctgtatcagaagtggctccattttgactcaagctgtgtgtagctgtgagtcctgcctaccaagcattcacactgtaagacaggaaaagagaaaggggaaaagtgtctgctgttccccgatgaagggtaggaggtgtcccctggcacgcaaagcccaagcgtccctgaaatgtctgctgggccccaacaaaaggtaggtgcccctggcatgcaaagcccaagtgtcccctggctgttgagcagagtgtgagctcagggcctggcattgtccacctggcacgcaaagcccgagcgtcccctggctgttaagcagagtgtgagttcagggcctggcattatgggcttgtgttttcttccagagacaccaccatgtatgctgtgtctgctgatagcaaaggcttggacacggtggttgccttactggctgatgtggttctgcagccccggctaacaggtgtggatcccagccgctggcgtttgaggtgggcttggacatagggaagaccggaaaggtttgcagaagccctgtagccatgagggagagcaccatgtaattggagctttaggccaacacaaagtgacagcgagatctcataagaaatagcgctggggctgggcatggtggctcacacctggaatcccaggactttgggaggctcaggcaggcaaatcgcttgagcccaggagtttgagaccagcctgggcaacatggtgaaaccctgtctctacaaaaaagatacaagaattagctggctgtggttgcttacacttagagtcctagctactcgggaggctgaggtaggaagatcgtttgagcctgggaggttgaggctgcagtgagccatgattgtgccactgccctccagcctgggcaacagagtgaggctttgtctcaaaaaaagaaagaaaggaaaaagaaatagtgctagtagccaggcgtgctggctcacgcctgtaatcccggcatttagggatgtagagatgggaggatcacttcagcccaggagttcgagaccagtctgagcaacatagcaagactctgttctccacaaaaaggaaaaaaaacccactggtgattgtaaaagtccttagtgtttgagagaatgtgtatttgagacatctgtgccctcatccctgtgggatgtttttagcgaaattggttctttgatttcggaagggcacctcggaccgtctttaaacaagtggaatggtgtgtgccagaaatttccatttcactgtttccattaccctcctcagccttgcagatggcaggactttgagtccctgtcaggggtggaccaggagaggggaacgttggcttttccagataccctaagggtgcagtttcacagcagcttgcgcttggtgttcaaaggctacagtcccacgttaagatcttgtggtcacaactgatgaaaggcgcccttgacatctgtctgtgcctctgtttctttttggagatagagtctgtctctgtcacccaggctggaatgcagtggcgcgatctcggctcactgcaacctccacctcccaggttcaagtgattctcctgcctcagcctcctgagtagctgggattacaggcgcccgccaccgcgcccagttaatttttgtatttttagtagagatggggtttcacagtgctggccaggctggtcttgaactcctgacctcaggtgatccacccacctcggcctcccaaagtgctgggattacaggcgtgagccaccgcacccagcgtgtgcctctgtttctaagcaccttcatgtctggtctcgtgtcctcacagcagcacttgggacagacaggtccagtgtcttcggtgcctttcaccagcaaggaagccagggcttagcaggctcacgtggctgcttcatggctgaggcgggatgtgaggcccaggtcccctagctcctgctccctgtagcagtccccctcactcacacaagcacccagtctgcccctagatgaaggcagaggtgactgccaacagccaccaacaggcgacactcaggccagcacacaagctgtgggtcactgctgtgttcctcatctctgcctgtgcagactcagc

SEQ ID NO: 43170 - DNA, 2300 bp, Homo sapien
attctggagaggcagattttactctttataaatacgcacgcagctgctattgccagagtgcaagtaaaatatcagcttgcgtcggattttcccagggctggctgcagatgggcgctggtgctgcttgttggaggaagcctggtcatgctgtcttcagtcacctgtgtctgtggctcttccccattaggcggcttacagggagaacacagttggcctccaccgtttctgccccacagaaaacgtagcaaagatcaaccgagaggtgctgcattcctacctgaggaactactacactcccgaccgcatggtgctggccggcgtgggcgtggagcacgagcatctggtggactgtgcccggaagtacctcctgggggtccagccggcctgggggagcgcagaggccgtggatattgacagatctgtggcccagtacactggggggattgccaaggtgaagtagcgggaacgtctcatggcctcgggtggggaacacgtcccctggcccgtggtgtgacctgtttttgtattgattctgagggtgataggtgttgactgcatgtgtagctttgccttaacacatgctgtagtcccacagcagggcatggactgtgtcccctgctgagaatgagtgctgctaggcctgagagcaacacaaaaggtggatgcggttctttctctaggggagtgggtctgccactgcgtgttgcattttttttttttttttttagagatggagcctcgctctgtcacccaggctggagtgcagtggtgcaatctcggcttactgcaacctccacctcccaggttcaagtgattcttctgcctcaacttcccgagtagctgggattaccaccacgcccggctaaattttgtatagagatggggtttcactatgttggccaggctggtctcgaactcctgacctcatgatctacctgcctcagcctcccaaaatgctgggattacaggcgtaagccaccacgcccagcttatatgtatatacatatgtttttttttttttgtctttttggtagaggtggagttttgccacattgcctaggctggtcttgaactcctggactcaagtgatctgcccaccttggcctcccaaagtgctgggattttaggcatgagccactgtgcctggctggcattggatttctgtgtaaccactctgaagatgatctcatctggggtttgcgagccctcattgtttttcacatggcgacacttgcttgttttcttggttacagctagaaagagacatgtccaatgtcagcctgggcccgacccccatccccgagctcacgcacatcatggttggactggagagctgctccttcctggtgagtcctggtgctgggtctgatggcgttcctgatgcagtgtggccggctcagccagccctgccctctgtccctggcatccgacagcgctcctgatggggcgtgggcggctcagccagctctgccctctgtccctggcatccagcaatgctcctgatgcagtgtgggcgactcagccagctctgccctctgtccctggcgtctgacggcgctcgtgacacagcgtgggtggctcagctagctctgccctttgtccctggcatccgacggcgctcctgacgcggcatgggtggctcagccagctctgccctccgtccctggcgtccagcggcgctcctgacgtggcttgggcgactcagccagctctgccctccgtccctggcgtctgacggtgctcctgacgtggcgtgggtggttcagccagctctgccctccgtccctgcaggaggaggacttcatcccctttgcagtgttgaacatgatgatgggcggaggtggctccttctcggctggtgggcccggcaagggcatgttctccaggctctacctcaacgtgctcaacaggtgggttgcactcttttctgtatcctcaggccaccaggccaggccaggtgtgtttttggaccatgaggccaccttccaggtgacttttctccagtttcccatggcctgatcctggcgagtccccttcactcccatgactctcgcttcctcccaggcaccactggatgtataacgcgacctcctaccaccacagctacgaggacactggcctcctttgcatccatgccagcgccgacccaagacaggtgagggccccgcctgccaccgtcctcagtgcggttgcctgtccagacctgggcgtccctgcctagacgggtcagtaggccggcaggcgcaggccacactgttatcgtcttgcccttcttcgcaggttcgagaaatggtagaaat

SEQ ID NO: 43171 - DNA, 2300 bp, Homo sapien
tgtggttcattatgtggaccagcccctgccacgctgcagccgagcactgctcaccctgggggcaggcatgcagaggtcatgctgttgatttcattccaggcctgcgccacctccgggagctcaaggctagggaggattggccagaggaagcacctggtgctgaactaggcttgccctgctgtgaacttgcacttggagccctgacgctgctgttctccccgaagaacccgaccgacctccgcgatctccgtcccgcccccagggagacacagcagtgactcagagctggtcgcacactgtgcctccctcctcaccgcccatcgtaatgaattattttgaaaattaattccaccatcctttcagattctggatggaaagactgaatctttgactcagaattgtttgccgaaaagaatgatgtgactttcttagtcatttaggatgatttaaggatatagtattcctggtcatttaagaatgttcattcattgaagccggagctgtctctgccacaggagagccacatggtcggtagtaaccagggcctctccaagcccagctgtgagtcactgcccagtgagtcccgcgcttcctttaaggtgctgggagcaaagagagggtgactgaggcagaccccaacccctgctctgcaccatctgggccctcgccgtgtttgaacctggctgaatgagtggagggcgctgtgttctcaatcagcgcctccgaggagccgtggggttccttcggcattagttcacggtttttgagagaggccttagttactgcagtgaatttctttcctgttgcaaagacgcttccagcctcactttactttctgtggcctgatgaggaccatgggtgattttgtgtacccaaagcgctggggactgcccaccgtgtggcccagtcactgggaaggagccccagagagccggctgtctgacatgatggctcagggtggtcatccaggttgaaaactgaccgtgtgatgtttgatttgggcttcatttcgtgtgtaggagcacggttagactcactgttaaggaagctggatgcacttctctaaaaggctgcactttccgtgagcacttttcgtggtacaatccacatgacccactttctcccctgggggacgttggttcagaggttggtagcacttggggagagtatcttaacacagtttcttgacagcagctctggaacttagtatttctgccccgagttttgccacactgagactttgagtagctcctggtggactcaaccctgttcaactcagagacgggcctcctctcactgatgcaaagctttaaggcttctctgactgttctgaaactcttcgtattcttgtcaagtctaaagagactgaagaaaagatttaaatactaataaaaatcagtagataatttctgtaggttctgctggaggaatacaaactgtttggtgttttaaatttaagtgtagaaattgtagaatgtggaattagcacagatccttcctggctttctgtttcacttgatcatttagcccagaccacccaggatgttttccaaaatgttccacaggcgtgtcccgctggatccatttgtccttgtcacttggagaaaggccagtccctgtgacggggcagccctctctgtccctcggtcagctcgtgtgaatcctgggacctcttccggtcggctctgcccgctgttctggggtcgactgccacgacttttgattcaagaagcttcctccaggcgggagcggctatttttcctaaatgagaattgttacattgcaaattgttgaataaaatattttgcgctccttcaagcaccttcacctgtggttccctttggtttgctggaagcgagtgagtgcaggtgtccgcaggcctcggcgctgtcctggaccgcacccaggtcctctccggggacctgcacctgcctcgctgggacctgccggactgcggggctgccgggttgggaggggcgtgggagacccgtccgggtccggtgcggcgcagtcctccggccgccaggggccgctgtgggcggggccggggcgcggggcggggaccgggcgcggccccgcggcggcggttgctgggtcccggccgggctgactccgcttctgggcggccgggcctccgcgagtaccgggtcgacttcggagtctgcgagcccagccaggggtgcccgcttcccacccctctccccgagcggcgtccccgtcggggtcgaacctcccccgcgacaggcgcccagccgcctgttcccccaggccttgcctgcggaccgccctgggaacggcgt

SEQ ID NO: 43172 - DNA, 2300 bp, Homo sapien
tgtaacccaggccagaacagtttcatattttttggcctggtgtgagagacttaaattccctgggatttggttgctgcaattcttcttttcctcggcaggttttaagctctgcagcgtcactccctggctctgaactcccctcctccaggcctgagggttcccagggaggagaggtaaggagtgccgacgccagggccccccgcagcccaggcctccccagcagctcactgtccaggcgcctcttcctttatggaggggcggtactgggtaggaagaggcagtttagaaacaagagcacctcgaaggtggtgttcctgggggaaaaaaaattgcacttgttttaacaaaactgtttgggagctccaggaggggtgcagggggtttgagttgtcgcctcagtcccggtcctctcccttcaacagcacgggaattgtcttgaattgtgaggtgtcaggaggtgaagctggcttaggccgaggctggacttttcctcccagccctcccctaagctaatggttgtttcgggataacagctttacattaagacaggaatcttaagctaacactggcttttttttcccttttgagttatgttgattctaatggcatcacaaagcttttgaaatggaactgacagcttggattggacagtgacgtgcatgttgactttcgtccgtgttttatgtgtgttcttgctgttttgtagctttcgcgctgtagttcaatgagttcattatcacgtgaagtgagccagcattttaatcaggtacctgcggctggtggtcctcactaacatgagagctggcgtgtgccgcctgtgttcctgagcacgcggtgccggttcgccacgtgcgctttgccactaacctcgcccgttgtctccctcagcgtcacgtgaccaagggtacagggttccttttttttttttttttttttttgagacggagtttcgctcttgttgcccaggctggaatgcaatggtgtgatctcagctcaccgccacctccacctcctgggttcaagccatcctcctgtctcggccttcctgagtagctgggattacaggcatgagccaccacgcccagctaattttgtatttttagtagagacggggtttctccatgttggtcaggctggtcccaacctcaggtgatccgcccgcctcagcctcccaaagtgctgagattacagcagtgttcctttaaatggccttaaagggggttttgctgttcagtctccacatacatggggcaactggatcgaccctgaggtgtcctagtcaatgagtgggttctgtcattttgctctttccaaattggtttttccaatgacgggcctgggtcgtggcctcgccgagtgagtgtttccccggtcaggatgctctcctttggaaggaagattgctcctttctgatcaagcatgagaacgttggtttgaggccggggcgggtgcagcagtgacctgcggccaatgtgggagggaggtgaacgaacgcttcatcttctgcctgtccaggcaccagctgcagccgtggctcagcagaaaggcttgcagcgacccttccgcctgcaaatgagagccctgggcctcgtgtcatggctggagccttagagctgcagccgtgggcacctcctcaccacctcgcacgctcggtgccacctcagtgctgtgtgcaccttcccattgcatgttccggtgcttaaaacattggctctgcacgttgctttgattttcaccatttttctctgaaccattaaataactaaatccagtgttgcaagaagtgtcttggatctgcttctgtagcttatgtaaaagtactgtaaatcccacccagaagcggtgtctgtatctgcacttgaagtgacagctgctgtgcagcgcagccctgctgaggtgacttctctgtgcttctcaggctcctggcgacctccctgctgcagggggccctcccagcggggccatgcccttctacaaccctgctcagctggcacaggtgagtgactcctacctttccctacgagaccctaacacgcccactgacgacctgaccctgctgctcagtgatggcagctttctgccctagatcctctttttctttctttttaaaaaatatatttatttatttattgagacagggtcttgctctgttgcccaggctggagtgcagtggtgcgatctctgatctcagctcactgcagccataacttcctgggctgaagcaatcctcctgcctcagcctcctgagtagctgggactacaggcatggtcagcacacctggcaaattttttatgttttgt

SEQ ID NO: 43173 - DNA, 2300 bp, Homo sapien
gccatcccagtgggtttctgtgcacacagtgggtgtctgaagctgtgtttccctctgcagaagaaagccccgcccccacctccaacctcgatgcccaagactgtgcaagctgccccgcctgccctcccagggcctcctggagcccccgtgaacatgtactctagaagagcaggtaagggtggccttggagtgggagcttgcttgaacgattaactgtcccagagagagaggccaatgtgtagctgttgtgcgtggggaggaggtggcttcccgcacgtccctgcgtgcttttcctctgacgcagtgagcgcagagcatttggaagctggaggccacctggcgcgttcacctcaatttgcttccctcccctttgcagcaggaaccagagctcgctacgttgacgtcctgaacccaagcgggacccagcggagcgagccggctctcgctcctgcggactttgtcgctccactcgcgccactcccaattccttctaacttgttcgtgccaaccccaggtaggtagcacgagcaccagcccctccaggtcagcccccagtctcctgacctttgatcctctttctatgagtctctcctaaatctcccgttaaaagaatgacctggccagcatgcagagagcctggggttggtttgtggttttttttttgatttgcctgtttctgcatgagtgtgccgcgtgtgcagtgtgaaactctcttcctctcggagtgtcttcagtgagaccccagggacgttcgggacggaatgatggcctcctcgctctctcatccccagatgcagaagaaccacagcttccagacgggactggcagggaagggcctgcagcagctaggggcctggccaatccagagcctgccccagagcccaaggtgagcgggtacggtgggaaaggggaaaggtacccagtgaggaggcacctccccatcctgccagacagggccttgccttctgcaagtcagtatccaatgtgtacgtagagtgttccgccttaaacgcctcacacttatgtatggtagagacggaaggtagaatgcagggtgccgggcgggacagagctgtttgggaagacggagatctggggatagtggcggtgatggttgctcagcacggtgaatgtgcttaaaacttaaaaatgattaaagtggcaaattttacagtatgtatattttacaatttttaaaattggaaaaagtaaaattaattactctaagttacagagaaattacctaccgataataaaagttaagtatattttcatccaaaaaaaaaaaacaaaaaacaaatgactcccatgtgaagtagaacagctcagaccagtcgggagtggtggatgatgcctgtaatcccagctctttgggaggctgagctgggcgggtcacctgaggtcaggagttcgagaccagcctggccaacatggtgaaaccccatctctactaaaaaaaaaacaaaatttacctgggtgtggtggcgggtgcctgtaatcccagctactcagaaggctgaggcagaagaatcgcttggacccaggaggcagaggttgcagtgagctgagattgcgccattgcactccatcccgggcaacagagccagactccatctcaaaaaaaaaaaaaaaaaaaccagctcagactgcactctgtacggtgggacaggcctgggcctaatcctgttctccattcatcagctgtgtaaagcatggggcagtcactcacctgtctaagcctcagttttcccctctgtaaaatgggaataacagtagccccagattgcaagcctgtcatgggcacacacaggcacctggtagagagctgcaggggtctagagtcaacagggttgtgcggctggacccacgtgtgaggcacttttcacttctctctgaggagcactttacgtggaagagggcgtttgtaacccaggccagaacagtttcatattttttggcctggtgtgagagacttaaattccctgggatttggttgctgcaattcttcttttcctcggcaggttttaagctctgcagcgtcactccctggctctgaactcccctcctccaggcctgagggttcccagggaggagaggtaaggagtgccgacgccagggccccccgcagcccaggcctccccagcagctcactgtccaggcgcctcttcctttatggaggggcggtactgggtaggaagaggcagtttagaaacaagagcacctcgaaggtggtgttcctgggggaaaaaaaattgcacttgttttaacaaaactgtttgggagctccaggaggggtgcag

SEQ ID NO: 43174 - DNA, 2300 bp, Homo sapien
cgacacacactgacttggacagcccgccttccacttctcaaaggggaggacgtcggaagctttgtcagtgtttagacgtaaaaagttcctgaaggcacgttactgttctgacctatttaaatgacagtaaaatacacagaacaaaatgcacatttttaccattttctgagtgcacagttctgtggcaccaagtacattcacactgttgtgttgccatcaccaccatccatctccagaactgtctcaccttcccaaacagaaactctgtctccttgaaacgaaacaactcccggttccctcccacctccatcctcctggtgtctctggatctgcttcccacctccatcctcctggtgtctctgtggatctgctccccacctccatcctcctggtgtctctgtggatctgccccccacctccatcctcctggtgtctctgtggatctgcccccgacctccattctcctggtgtctctggatctgctccccacctccatcctcctggtgtctctgtggatctgctccccacctccatcctcctggtgtgtctggatctgctccccacctccatcctggtgtctctatggatctgctccccacctccatcctcctggcgtctctgtggatctgctcccacctccatcctcctggtgtctctgtggatctgccccccacctccatcctcctggtgtctctgtggatctgctcccacctccatcctcctggtgtctctgtggatcgccccccacctccatcctcctggtgtctctgtggatcgccccccacctccatcctcctggtgtctctgtggatctgctccccacctccatcctcctggtgtctctgtggatctgctcccacctccattctcctggtgtctctgtggatctggcgactctggggcctcacagaagtgggtcatgtagaatttgtctttttgccctggcttatttcatggaacataatgttttcaaagttgttctcgtgttttttatatttagggtgaatcctggttctttcgttggctacctggaaagaaaaagacagaagcttatttgccagatgacaagaacaaatcggtgagtgctgtcaaatacgcacgggacgtccgaagaattgtaatgatttttctgtcactttcagagcagacctgagtaggtgtttcctgaagttttgaagtgtcatcattaatcagatgctaattctgtttaggttcagtctgctgaccttttttctttttaaaatcttggcagattgtttgggatgaaaagaaaaaccagtgggtgaatttaaatgagccagaagaggaggtaaattgtcattctagttcctgttgggtgtgaggtgtgagtggagggaacagcctcatgtggccctgtgatatttgggtggctgttgccccttttggagcctcctgactgtgccatcccagtgggtttctgtgcacacagtgggtgtctgaagctgtgtttccctctgcagaagaaagccccgcccccacctccaacctcgatgcccaagactgtgcaagctgccccgcctgccctcccagggcctcctggagcccccgtgaacatgtactctagaagagcaggtaagggtggccttggagtgggagcttgcttgaacgattaactgtcccagagagagaggccaatgtgtagctgttgtgcgtggggaggaggtggcttcccgcacgtccctgcgtgcttttcctctgacgcagtgagcgcagagcatttggaagctggaggccacctggcgcgttcacctcaatttgcttccctcccctttgcagcaggaaccagagctcgctacgttgacgtcctgaacccaagcgggacccagcggagcgagccggctctcgctcctgcggactttgtcgctccactcgcgccactcccaattccttctaacttgttcgtgccaaccccaggtaggtagcacgagcaccagcccctccaggtcagcccccagtctcctgacctttgatcctctttctatgagtctctcctaaatctcccgttaaaagaatgacctggccagcatgcagagagcctggggttggtttgtggttttttttttgatttgcctgtttctgcatgagtgtgccgcgtgtgcagtgtgaaactctcttcctctcggagtgtcttcagtgagaccccagggacgttcgggacggaatgatggcctcctcgctctctcatccccagatgcagaagaaccacagcttccagacgggactggcagggaagggcctgcagcagctaggggcctggccaatccagagcctgccccaga
